United States Patent Application Publication US 2008/0256662 A1 - sequence listing, part 6

SEQ ID NO: 45221 - DNA, 265 bp, Glycine max
  unsure (1)..(265): unsure at all n locations; Clone ID: 701130043H1
ctgcaatggcttcaagtcaggaggaggtgacccttttgggagctactggaaganncatatgtgtgcngggttcatattgccctcaagttgaagggagttcaatacaaatatgtcgaagaaaatttgaggaacaagagtgaactgcttctcaaatccaacccagttcacaagaaggttccagtgtttattcacaatgagaagcccatagcagagtctctgtgcnngttgaatacatgatgagacagggngaacgaccccatcttgc

SEQ ID NO: 45222 - DNA, 279 bp, Glycine max
  unsure (1)..(279): unsure at all n locations; Clone ID: 701130044H1
cagaagttgtctgagatcaaagcggggctagatgatgctgatgttctgattcggaaaatggaccntgaagcgagaagtttacagccaagtgtncaagcaatgcttcttgcaaagttgagggaatacaaatctgatctaaccaatttgaaaaaggaatttaaaaggctaacatcacctaatgctgatgaggctgcccgtgaagaattgttggagactggnatgacagatacacatttgngcttctgctgatcagagngaacgattaactatgtccgtgga

SEQ ID NO: 45223 - DNA, 279 bp, Glycine max
  unsure (1)..(279): unsure at all n locations; Clone ID: 701130046H1
cagacctaggatttcggccgtttgctccccaaggaaagaagcagagtgtttcttttgaaatcagctagaaaagatgtcaggtgaagcggtagctgttgcagctgaggcacctgctgcttcaattccaggtgagccaatggacatcatacctgctctacagcttgtgctgagaaaatctctggcctatggtggtcttgcacgaggtcttcatgaaggtgctaaggtgatcgagaagcatgctgcacagctctgcgttctagcagnagattgtgaccaacc

SEQ ID NO: 45224 - DNA, 282 bp, Glycine max
  unsure (1)..(282): unsure at all n locations; Clone ID: 701130047H1
gggatggngaagtcaagagtgctatttttctctatgcttgntcttgcaacctttcagaaagcagtctcagaagagcaccaaccccttncaaaagttgccattcataaaacaacacttgctcttgntgaacgtgcttttatcaaagccactcctaatgtcttggncttgaagggacaaaatacagaatgggttacactgcaatatagtaatccaaaacccacagtagatgattggantggagtgttttctcctgcaaacttcaatgcttccacnnnccctncg

SEQ ID NO: 45225 - DNA, 246 bp, Glycine max
  unsure (1)..(246): unsure at all n locations; Clone ID: 701130048H1
ggttgctatcagcnantaagagtgagtgantangttctcttantagcancaaggtttagtgacaccnaacagactggaaatgggtcgtggggtcagtgctggtggtggacanagttcctggattatctctttgggcatggggtactgccagcagtgcaatggtgtcncactccaaatgcangtntccttcaccaccggttgaaaancnaagtncacnccagcagcancgnagcacctgcaactttc

SEQ ID NO: 45226 - DNA, 252 bp, Glycine max
  unsure (1)..(252): unsure at all n locations; Clone ID: 701130049H1
gagaattgaatgtgaatggggaancagaagcagaagtggacgcaggacgaagaagatgcactcatcgccggcgttgaaaagcacggccccggaaagtggaagaacattctcaaggatccccaattcgcccctttcctcacttcccgttccaacatcgacctcaaggataaatggcgcaatttgagcgtcacaacggtgctcagggctccaaagaaaaatctagggttcccaagcttaaagccctccctgctc

SEQ ID NO: 45227 - DNA, 269 bp, Glycine max
  Clone ID: 701130050H1
ggcggttctcactctcattgtcagtgtcatctcactgtcgctctcactttctcactctccatggcggttcaactcctcactctcactctactcgttgtcactgtggtctcggtctcactgtcggtattgcgacgatagcgctgttgggattcaaggcctcacagatccatcgcgttggttcctgccaggattcgaggctgcgacgtcgtcatcgtttccagagctggactacgggatccgacagctagaccacgccatctctttctcca

SEQ ID NO: 45228 - DNA, 270 bp, Glycine max
  Clone ID: 701130051H1
ggggcctccgccactactattctcacaacatccacgagcatcagctccttctccgtcaaaagacgcataacctcaaccgtcttgaggctcagagaaacgagctcaattccagggtgaggatgctgcgcgaagaattacagcttttgcaggaaccaggctcttatgttggtgaagttgtcaaagtcatgggcaagaacaaagtccttgtcaaggtccacccagaaggaaaatatgtcgttgatattgacaaaagtattgacttacaaagat

SEQ ID NO: 45229 - DNA, 267 bp, Glycine max
  Clone ID: 701130052H1
cagaaccgttgaatcaagttgaggaagatggcactagtctctggaggaagatcaacactgaaccctaacgcccctctttacattcctgccgcgtttcgccaagtggaggatttctctccggaatggtggcagctggtgacgacgctgacatggtaccatgactactggctaagccagcagcacgatgagggagccttctacggcgaggacgacgggtttgatggcaatgatgtcgttgatttgcttcctgattcgtttgatcttgat

SEQ ID NO: 45230 - DNA, 273 bp, Glycine max
  unsure (1)..(273): unsure at all n locations; Clone ID: 701130053H1
antttccnattagcactagtncagncagtacaagaaactagaagagcaaccaaaattttccaattgancnagaantgcacaacgagaacaaaatcntatcgtgagancgaataactgaaaanaaaggaaagaagaacaanancatgataacgtggaaagacctatacacggtcctgaccgcagtggtccctctctacgnggcgatgatcctggcgtacggctcggtccggnggtggaaggncgtctnaccggaccatgctccggcatnaaacc

SEQ ID NO: 45231 - DNA, 272 bp, Glycine max
  Clone ID: 701130055H1
cttcaaagtcttctctctcgagaatcatcgaataaaactagggtttccgatcgtcgtcgaggagaatgccgaagaacaagggaaagggaggaaagaaccggaagcgcgggaagaacgaggcggacgacgagaagcgggagcttgtgttcaaggaggacggccaggagtacgcgcaggtgctccggatgctggggaacggccgctgcgaggcgatgtgcatcgacggcaccaagcgcctctgccacatccgcggcaagatgcacaagaaggtc

SEQ ID NO: 45232 - DNA, 282 bp, Glycine max
  unsure (1)..(282): unsure at all n locations; Clone ID: 701130056H1
gccttcttcgccgtttcagctcaagagccaccagcaggtaagatatggttaagcataacaacgttatccccaatgggcacttcaggaaacactggcaaaactatgtgaagacttggtttaatcaaccagcacggaagcaccagaaggcgtttagctcgggcagnaagnnggctgtccaagatnttnccaagggcctactgntggacctgctcangccaattgtncatggaccagactctnaanatacancatgacatcnagatngggnnagggntntctctc

SEQ ID NO: 45233 - DNA, 61 bp, Glycine max
  unsure (1)..(61): unsure at all n locations; Clone ID: 701130057H1
anggaancgnaaacaatcatatatgntnaaaaaanttaaatcgcaaangaaacaacagcca

SEQ ID NO: 45234 - DNA, 272 bp, Glycine max
  unsure (1)..(272): unsure at all n locations; Clone ID: 701130058H1
ttgaagcttgctcctattgcatacttcagtatgtacagtggatcaatatctcatttaccaactggctatatgtggagtcctcatgttgttccaaaaccaagtgactggggccctttagttgatgttgttggttattgtttcttgaaccttggatcaaagtatcaaccacaagaagattttgttcgatggattcaaaaaggaccanaacctttatattttgggtttgggagcatgcctcttgatgatcctaaaagaatactgatgttatagtg

SEQ ID NO: 45235 - DNA, 72 bp, Glycine max
  Clone ID: 701130059H1
gtcttgatgaacagtaccattctgatgtattgctttccttgaaagttaatgcatgcttcttatcttctgtct

SEQ ID NO: 45236 - DNA, 278 bp, Glycine max
  unsure (1)..(278): unsure at all n locations; Clone ID: 701130060H1
gcggcnctctcatgncntcaanncaancacccngatnctnnctgaatttttgggcttggagacaatgcttgcanttgtgtgcagtnnnntatgaaggcattnatgcactggagaaagtatgatcctgaangcttgataaactgtaatggtggattgcatggtatagggtcaacaattggnnagagnataaatggccgatttgttgtcatatctcttgaagatataagacccttgttggaggtttttagccantgntccccaaaagaaantgncncncc

SEQ ID NO: 45237 - DNA, 146 bp, Glycine max
  unsure (1)..(146): unsure at all n locations; Clone ID: 701130061H1
cgacanacccattccccaacatgtnntgacncagcacaagcgaggancctctttgattngattacgtctncattganggaatgcattgctaaagaaggagntggttccaatantccacacaacntaanaagncaaaaaaanaagag

SEQ ID NO: 45238 - DNA, 279 bp, Glycine max
  Clone ID: 701130062H1
atggccctatgccaagttgatactcagttgctggttggttcttccaaactttaatggggcagcacatgtttataggcactatgttagaccattctatatgaatccacaaatgcctcaaatgcctcaaatgcctcaaatcccaggaacttctcaaatgtggtatgttcctagaaagaacatctttagtaagcaggatgatgtccttactgctgctgagagatacatggaagagcatggaacagaagcatttgaaagactcataaccaaggctgacagaga

SEQ ID NO: 45239 - DNA, 279 bp, Glycine max
  unsure (1)..(279): unsure at all n locations; Clone ID: 701130063H1
ggccctcaaacttcctactcttccaaagactttagaaggtgttatcagccaagagaaatttgagaaatctagagcctatagtcttgataaaagccacttccattttgttcacgagtttgtgacaatagtgacagactctacaattttgtactttggggtattgccctggttttggaagaaatcaggngattttatgncaatagctgggtttcaatgctgagaatgaaatactgcatacccttgccttcttagcagggctgatggttggtcacagataac

SEQ ID NO: 45240 - DNA, 212 bp, Glycine max
  unsure (1)..(212): unsure at all n locations; Clone ID: 701130064H1
gggcttgctttccagcatatagtgtatatganttgtngcaatccagtgactcagaatgggaagtatgtggctactgcttcatacgtcaactgggactccaaagacaagtncatatacgctattgctggtgacttaaaagcagaggacttccaagttggttgtcacgtaaagctggttgcnctganncctgntgcaancngnnccnttccggg

SEQ ID NO: 45241 - DNA, 272 bp, Glycine max
  Clone ID: 701130065H1
ctaagatcaagtgtagtatctgttcttatcagtttaatatctgatatgtgggtcaggggaggattcttcacagtagcttgctgctggaatcatcatttagtgtcgctcaagtgttgcactacaccttcggcctgccacaccccaccatttcagttctaaccttagtaagtttcaggagccgtgtgtgcttcaactcttgccagaaatggggtttctgttactctctttgagtcagctagaggccctggtggacgcagttcccaaagaagaga

SEQ ID NO: 45242 - DNA, 270 bp, Glycine max
  unsure (1)..(270): unsure at all n locations; Clone ID: 701130066H1
gcagtagtttggcgtggtaattggtagagcgagaaacagagaaatggacgattacacgagggaaatgntggacctgaagacactggtcactcgcactctcgcgaagnaaggcgtcctcgccaggatccgtgccgaactcagggcnagtgtgttcgaagccatcgcaaaggaagatcntgngattgagnaggancaaggtctaccncctgccattgctaggtagttgcnacgatcgngctacncaacttcacgctnctcctccnnggagaa

SEQ ID NO: 45243 - DNA, 267 bp, Glycine max
  unsure (1)..(267): unsure at all n locations; Clone ID: 701130067H1
ctccaaggaaataaaacaaatacaatcaaagaatcttctttgcttnctctcctttgcactttccttctcctccttgtgattttttgtttgcatcaaagggagaaactgggagacacagaagatgagagagataattagtattcatattggacaagctggaattcaggtggggaattcatgctgggagttgtattgccttgagcatggaattnnncccgatgggaccatgcctagtgacacctctgttggcattgcacacgatgcttt

SEQ ID NO: 45244 - DNA, 265 bp, Glycine max
  unsure (1)..(265): unsure at all n locations; Clone ID: 701130068H1
gacggcaacgttgtgctgtccgccttgaccgagccagagcttcgtcttggccctcgattttgccctgtaaaactaatcccagtcacnacagaaataatcaatggcaccgaaacagaccaaggctgngaannagatcgcttacnatgcgaactgtgcgacctaatggaggagtacggccaaatcctcgttgtaaactccgacaacgtgggatcgnaaccagctccagaacattcgcaaaggtctngcggcgantctattntcctct

SEQ ID NO: 45245 - DNA, 266 bp, Glycine max
  unsure (1)..(266): unsure at all n locations; Clone ID: 701130069H1
gcttcttcactttctctcgtttcaatcgaaaaaaatcatgggcagaanttcttcgtcggtggcaactggaaatgcaatgggaccactgaggaggtgaagaagattgttactactttaaatgaagctaaagtccctggagaagatgttgtagaagttgttgtgagccctccttttgtgttccttccttttgtaaaaagtttgctgcgccctgatttccatgtctcggcccaaaattgttgggttcgcaaaggtggtgcttatactgg

SEQ ID NO: 45246 - DNA, 271 bp, Glycine max
  unsure (1)..(271): unsure at all n locations; Clone ID: 701130073H1
ggagaactttccagttgttgacatgggnaacctgaataatgaagagagatcagcaaccatggagataatcaaagatgcctgtgagaactggggtttctttgagttggtgaaccatgggatatccatagagttgatgatggacaccgtggagaggatgacaaaagagcactacaaaaagtgtatggagcaaaggttccaagaaatggtagcaagcaaaggcttggagtctgctcaatctgaaatcatgatttggactgggaaagcatttctt

SEQ ID NO: 45247 - DNA, 272 bp, Glycine max
  unsure (1)..(272): unsure at all n locations; Clone ID: 701130074H1
ctgtactggtgggtgaacaattatgttcctcttcctacacgcagcangaagaagaaggagaagcccaagatgggaacaatggagagcttgaagttcttggtgtcttcaaagtacatcagagatcttgccactttagtggttgcttatggaatcagcatcantcttgttgaggttacatggaagtctaagctcaaagctcagtttcctagtcccaatgagtactcttcttttatgggtgacttctctactgcaactggaattgccacattcac

SEQ ID NO: 45248 - DNA, 275 bp, Glycine max
  unsure (1)..(275): unsure at all n locations; Clone ID: 701130075H1
attttctctctcgatacaaaaatacatagaaatggcctcttctcttgcatcctcatcaactgttctctggatcctttttctaaccattgcaactcttcatttgagttcagccaggaagttgtccgggtcagacccgcagttgcagtttcaataccacagaggccctctcctcaaaggcaaaatctcagtaaacctcatntggtacggtaaattcaaaccttctcaaaaagccatcgttgctgatttcatcanctngctctcctctcccaaacccg

SEQ ID NO: 45249 - DNA, 245 bp, Glycine max
  unsure (1)..(245): unsure at all n locations; Clone ID: 701130076H1
ctcttcattcatgcttngcagatgtttgacatantgtattatggggaattgtanccgatcgctatngccgaaaacctgtnatagttatggggattattncagttgtcattttcancacattatttggccttnncacaaatntttggntggctgttatcangagattncttctgggnngtntaaatggtttgcttggnnccagtgaaggcctatgcctctnaacattncgagaagaacaccaagct

SEQ ID NO: 45250 - DNA, 245 bp, Glycine max
  unsure (1)..(245): unsure at all n locations; Clone ID: 701130078H1
cttgccctgctcttaacttaaaggcaaagcctntttgtacttgttcaataatnagaaaaatantaatgtttttgtaagcacttgaaaactctttgttccagtgtagagactagagagtaagctcttcctttaaaggatcaagtctacaaatattagatcgttagtatgccnttatccaataatttgcattctagttggttgatgacatagaactagttgagcttctattatcagtaattttaata

SEQ ID NO: 45251 - DNA, 269 bp, Glycine max
  unsure (1)..(269): unsure at all n locations; Clone ID: 701130081H1
gtgtgccacaaggagtgccacgaggcttcttaacctaacgcgcgctctctccacggaggcgcgtgggcaaaagatcgagcgcatcgccacggagcttctcgacctcaacaggttcgagaggcacgatttcacggtcctctggcggctcaagatgggtctgcnccgctacggcgctcctgtggctggcatgacgatgccgtccgtcggggcggctgcccgggctgaggccggtnctgccgcagtcgcggagaagntggcatttgnttgna

SEQ ID NO: 45252 - DNA, 268 bp, Glycine max
  unsure (1)..(268): unsure at all n locations; Clone ID: 701130082H1
ggtttccgaagacgaggaaatcgaatccgataccaaccccttcgataaaaacgaaaactctctctatcaggttcttggtgtggngaaaacagcatctcaacangaaataaagaaggcatactacaagttggcattgaggctgcatcctgataagaaccctggtgatgaggaagctgnagcaaagtttcagcaattgcaaaacgttattgctattcttggggntgaagaaaaacgggccgtttatgatcagactggttttgttgntgat

SEQ ID NO: 45253 - DNA, 228 bp, Glycine max
  unsure (1)..(228): unsure at all n locations; Clone ID: 701130083H1
gattcgatcgatttcgattgttgaattcatcccatcgtggagccttcaaatttgtagttgaacaacgatggtgctgccgctatttgctgctttcattctcttttttgcttttattccgaatggattgttagcagttccttccaccgtccccgcattcctttggtcatcacattatgaactggcctctgaaaatggattgaaggaatctgtaaattaccaagtcatntc

SEQ ID NO: 45254 - DNA, 74 bp, Glycine max
  unsure (1)..(74): unsure at all n locations; Clone ID: 701130084H1
cttactctctctntctctttgtgtttttgtcnnctgttttggacacaaaaaaaaagaaaagnaaaacttngnng

SEQ ID NO: 45255 - DNA, 265 bp, Glycine max
  unsure (1)..(265): unsure at all n locations; Clone ID: 701130086H1
tgaagtctgctatgtgtgcagtggtggttgtagcacttcttcttctggcggnggtggggcccatggctgaggctgtgacatgcaccccaacagagttgagtccgtgtcttccagcaatcacttccggtgctaaacctccaatgcttgttgcacnagctgaagcagcaaaaaccatgcttatgtngctacctncaaaaacgctagcttgaagcagtaatgttaactctcctaatgnncganaaacgttgcttcttgtnggnttccc

SEQ ID NO: 45256 - DNA, 267 bp, Glycine max
  Clone ID: 701130087H1
gtgccctggctaccctcttggccttaaggtcattcaagcaagtttggccaatttgttgcatggatttaactggagactgcctgataatgtcaagaatgaggatttgaatatggatgagatttttgggctctctacacctaagaaaataccactggaaactgttgttgagcctaggcttccacaccatctttattctctctgagcagtgccctgcacaaagggtttctctctaataagattgctgtaggaataaaatgggtctgtgtg

SEQ ID NO: 45257 - DNA, 271 bp, Glycine max
  unsure (1)..(271): unsure at all n locations; Clone ID: 701130089H1
gtgaaaagtagagatggaagaagaaaaagcagcggcatactacgacgagctgagccgtaagggcgagggagccgcgaggttcaagcaaggtctcggcttttcctcttccgcgccaaacgacgacnctccaaaaccctcctccttcctctccaaattcgtcaaagcctcctccactgcgccttcaaactctgagaagcaagcgcattcaatccatccaccacaagctcaagaaaaagccctcttccgagtctagggtttcgagcagcgatag

SEQ ID NO: 45258 - DNA, 271 bp, Glycine max
  unsure (1)..(271): unsure at all n locations; Clone ID: 701130090H1
caaaattagagaagttctaaacaagcacccgagcatcaatcttccggcagataaactgaagaaggtgaagagaccactgaaggcactggnttatctgcttggcgaatgtanggacaggccgcctcaagantttcaaganttttgcccgaaatttaagaacgattatcaacaaaattgcccgaatgccgcgtatgangcagtttgcccgttcctgaagcaagcgattnnntatgtgccagaaacacgcattaactctgcnagccacggtggg

SEQ ID NO: 45259 - DNA, 273 bp, Glycine max
  unsure (1)..(273): unsure at all n locations; Clone ID: 701130092H1
caacaacctatggcacgatcccaacctcgccgcctccgaacctggagtacatctcacgcgcgaanagcggatcaaggccgggctggggacgcggcggccgtggaaggcgatgttcaacttccgatcgctgaaggtcctggcggcggcgtgccggaggcataatcgcggattcggatcaacgtgtcgtatttccgcatgaactacgcaatggtgacgctgctgattctgtttctgagcctctngtggcacncgatctcctgatcgtgttcctcg

SEQ ID NO: 45260 - DNA, 275 bp, Glycine max
  unsure (1)..(275): unsure at all n locations; Clone ID: 701130093H1
cttgatccttctttttctccttgaactcaaacatggcagatgaggnggttctgctagatttctggccaagtccatttgggatgagggtcaggattgcacttgctgaaaagggtatcaaatatgagtacaaagaagaggacttgaggnacaagagtcctcttctcctccaaatgaacccggttcacaagaagattccggttctcatccacaatggcaaacccatttgtgaatccctcattgctgttcagtacattgaggaggtttggatgacagaa

SEQ ID NO: 45261 - DNA, 275 bp, Glycine max
  unsure (1)..(275): unsure at all n locations; Clone ID: 701130094H1
ctataatctcacatgggttctgcagtatatcaatcttttcatgatanatactggctacatcattttggccggttcagccttgaaagtaagagatttaggacacaanagtatatattttctttctattcaattcatattaaaattgaatctttcaaatacatgtctattgaagtatttttcttcttttctaaaccaattttttgttcatgtgattgcnggctacttatgttctattcaggatgatggtctgctgaaacttccatattgtattgcca

SEQ ID NO: 45262 - DNA, 273 bp, Glycine max
  unsure (1)..(273): unsure at all n locations; Clone ID: 701130095H1
aaagttaatgaagatggccggttcggttagaactggaggaaagggtactgtgagaagtctcatatggacatatgaatattttagcttttctccccctccccgctcttccactatgcactcggttgtgggttttcactcaatttgttggctttttagtttttttggattgaacacaaaatgcatctgttgtgttgaatgctctctttanttttgtcttatgtttgttctagaaagaagaaggctgtccacaagacaacaaccacagatgacaaa

SEQ ID NO: 45263 - DNA, 134 bp, Glycine max
  unsure (1)..(134): unsure at all n locations; Clone ID: 701130096H1
gacgtggtcagataatttgcaactnttcntgagtgcctttgaactcgaangggtagtagcaagacatggacagangnatgggacttctttgtgtnaatntacaagcactcccgactgnttncnanngangnngg

SEQ ID NO: 45264 - DNA, 201 bp, Glycine max
  unsure (1)..(201): unsure at all n locations; Clone ID: 701130101H1
tggattcatctctgatgatgttggtcttgatgctgacaaatgcaaggtgttggtcaacattgagcagcagagccctgatatcgcccagggtgtgcacggtcacttcaccaagcgcccagaggaggttggtgctggtgaccagggtcacatgtttggctatgccactgatgaaacccctgagtacatgcccctcagccatnt

SEQ ID NO: 45265 - DNA, 239 bp, Glycine max
  unsure (1)..(239): unsure at all n locations; Clone ID: 701130102H1
ggcgctgntccttctctacgaatccgcttcgggctacagcctgttcgaggttcacggcgtcgatgaaatcggccagaacaccgaagcggttcggaactccgtttcggacctcaacaggttcggcaaagtcgttaagcttcgctccttcaaccctttcacttccgctcncgatgctctcaaacagtgcaacnccgtctccgaaggcatattaactgatgagctgaggactgtcntggaga

SEQ ID NO: 45266 - DNA, 153 bp, Glycine max
  Clone ID: 701130103H1
gggatattcaatgcaattagcgaatgagagaatgaagagccggtggttcgtgtggcttttggcggtactaggcatcatcggagccacactcttcatagtgagcttgatccaaacctcggagaacaacttcctatgttccataacaagaacgat

SEQ ID NO: 45267 - DNA, 177 bp, Glycine max
  unsure (1)..(177): unsure at all n locations; Clone ID: 701130105H1
ttcgattgattctcttctctctcacacgaagtagaaacacgaaactcagaatccatggcgacaccagcgacgacgaagcgaaaaccggtgttcgtgaaggtggatcagttaaaacctggcaccaacggccacacactgacggtgaaggtggtcagttccaagccggtgnagacggtg

SEQ ID NO: 45268 - DNA, 292 bp, Glycine max
  unsure (1)..(292): unsure at all n locations; Clone ID: 701130106H1
cgaatatcttgttgtttggagcgatccgagaaaaactctgtaaacatgttggtttaccaggacctccttacaggtgatgagcttctctctgactccttccgttacaaggaaattganaatggaatgctgtgggaagttgaggggaagtgggttgttaaaggagcagttgatgtanacattggtgcaaacccttctgctgagggtggaggagaagatgangganttgatgatgcagctgttaaggttggtgacattgttgacacnttcagacttcaggagcaacccgcattcg

SEQ ID NO: 45269 - DNA, 274 bp, Glycine max
  unsure (1)..(274): unsure at all n locations; Clone ID: 701130107H1
gtttganaatanaaatctagaatnttgtgaggnaggaganntgagtttgagggcatcannnntagtcgnagangttgantctgcaacctcacccagnnggtgggttttacgtngagacattccgagaccattccgtccagnttncgacctctcagctncccctcgaatacaaagtggatcgccctgtatcgacctcnatctattttctcgttccttctgggagtgtgtctcgnctccatcgcatacnctgngntgnnccctggcntcattacat

SEQ ID NO: 45270 - DNA, 291 bp, Glycine max
  unsure (1)..(291): unsure at all n locations; Clone ID: 701130108H1
gaccattcatcggtgcagctcttgcagcactctaccaccaggtcgtaatcagggccattcccttcaagtccaagtgattcaatcaaacggttcatgcttaatcaagttgggnnnnnnnnnnnnnnnnnnnntcaagccaatgtttgtgggttttggtttcattncattaagatgatctgtttatctcttttcttctttttaaaatttaaagtctttgtattttgtatgtaaagatgtaaaattatgattattaggtggtgcatgtgtcgcgtcatgggccaatgttatcct

SEQ ID NO: 45271 - DNA, 293 bp, Glycine max
  unsure (1)..(293): unsure at all n locations; Clone ID: 701130109H1
canccttctttggctcctcttcttgcagaaccagattcgcaggtgccatccccacgttgctccgtcacaatgtattggcacgtgccgaagataaggccaganaccctacaccttcttcctttcagcctcancaaagttctcagcaacagtttcagaacttaacaccagaatctgggagttgtgatccccnatgttcactcgatgaaacaagctcacaagagtttgaagacagctaccagcccaagactgatttcctcaaagctgntgcantattagcnncagctgcnactggg

SEQ ID NO: 45272 - DNA, 201 bp, Glycine max
  unsure (1)..(201): unsure at all n locations; Clone ID: 701130110H1
acttgngaaactgaaagtntgactgtgcgcacaaaacgccaatcacgaaggantacaccattgccaatcaaaaataatgatagcatcagctccttctctgtctgatggnattggnaatcatccngagccttaaggcaaaatgagataactgtacattcgaatttaggtcagtattttctcaacagnctngtggtggggtgt

SEQ ID NO: 45273 - DNA, 291 bp, Glycine max
  unsure (1)..(291): unsure at all n locations; Clone ID: 701130112H1
anaaatactacaaatttttttcagtttctccgccgccgcacaaccaccacctcctccgttcggatctccggcggaccnactatccctactactactctactctatttacacggaagaacaaaaaactatnnnnnnnnnnnnnnnnnnnccccaaagcggctcggttagggtttagtnctgtaccatttcgtgtaatctaatttttcatccgtaaaaatctaattttgaggcggcgagatggcggagattcaggtgcagcatcagagtccggtgtcggcggctcctcctcca

SEQ ID NO: 45274 - DNA, 288 bp, Glycine max
  unsure (1)..(288): unsure at all n locations; Clone ID: 701130113H1
gagaatattgtgaaatgtgatgaagagaaagcattgaagtgcttgcttgatgcctttggctcagttttttctcttgaagagattgcttctgcctattgcaaggcgagccgcaatgcggacttggctgnngaaatgttgtatgaaatgaagggaanttcctcaggatcatctacaacccttgattcatctaatgcagatgtnatgactgaagggtcttctgagtcatcagatgcatattcccttgagaattctttccaagaaaggaaaacttcaaggcccaaaggtcgc

SEQ ID NO: 45275 - DNA, 221 bp, Glycine max
  unsure (1)..(221): unsure at all n locations; Clone ID: 701130114H1
ggctcgactttncagaaacccaagaatcaagtcaaatttgggtttcatttctctctctctangtcccaatcacactgatagaacctgcttgctagatccanttttttgcgnagaanngtgangaaaaaaatggnnacaatgntgcctccgaaccaagcagaggaagnaatagtcacaacaagccnnaacgagacagagagtgnagtnngtatgagggnagc

SEQ ID NO: 45276 - DNA, 290 bp, Glycine max
  unsure (1)..(290): unsure at all n locations; Clone ID: 701130115H1
angtctccgccgtccgattatttaacggtggcgcaactcgtanncgtcgcttcaacgtaagggcgaccctgccatttccgcagcaaaacgcaaagcattacaaagagcttcaagccgctattgacgttgttcagagggcttgccgtctctgtcttaatgtcaaatcatccttgttctcaactgatggaaaggttcttgagaaaaatgaccagactcctgttactgtggcagattttggagttcaagcancatnantttccggttaaataagctgttcccttctatacctt

SEQ ID NO: 45277 - DNA, 164 bp, Glycine max
  Clone ID: 701130120H1
aacaaactctttctggattcagtttttgatgtgaaaatggcagtgactcttacatcaacactctttctggctttgctatttgctgcttcagcttttgctgctcttcagcctagagtacctgaagcttacctccaaaatgggaactttgaggagcagccaaaccc

SEQ ID NO: 45278 - DNA, 289 bp, Glycine max
  unsure (1)..(289): unsure at all n locations; Clone ID: 701130121H1
cncagctctgtgttctagcagaagattgtgaccaacctgattatgtgaaactggtgaaggctctttgtgcanagcacaatgttagtcttttgacagttccaagtgcaaagacccttggagaatgggctggtttgtgtaagattgattcagagggaaaggctcggaaggtaactggttgctcatgtgtggttgtcaagganctcggggaggaacatgaagcatnnaatgttgttctgcagcatgtgaaagccaactgagganttgctgcagcatgcctagatttgtgggt

SEQ ID NO: 45279 - DNA, 288 bp, Glycine max
  Clone ID: 701130122H1
ttgctctgaaacacagacatggagcatgtgcagcattgctgaatctttcgtctgctgagcctcttgtatggccatcatctttgaagataatcagtgagcttaatccagacgccaaagagttattagagcgggccctgatggatgcaaacagggaaagggagaaaaacatattgaaagggagtgattactctcttccatctccatcacattctgatggggtagatgacaatatctctgaggttagtgagacagaattatgctgcatctgctttgagcaagtgtgtacaa

SEQ ID NO: 45280 - DNA, 185 bp, Glycine max
  unsure (1)..(185): unsure at all n locations; Clone ID: 701130123H1
ctgctatgccttgttgggtttgtngtgcttgtgagtactattggtggggtgnagagtgcnggtgaatgtgggaaatctacancccctgataatgnggcttataagcttgcaccatgtgcctcagcagcacnagatgagaatgctantgtttctcagagttgctgtgctcaggtgaagnaaattgg

SEQ ID NO: 45281 - DNA, 285 bp, Glycine max
  unsure (1)..(285): unsure at all n locations; Clone ID: 701130124H1
tatcacaaccttcaacggaaccggcgttggatttggtttcggcataggttgcggtttcggtatagganggggtttcggaggtctgtgccttattttcgaaccgttttagacatttctntaccttttgcaatttaatttcagtacgcaattttgatcctcgactcgttgatcttagaattgagtctttttcccctgatgtttacttgcaatctttttaagctgttgcaatcatttattatccaatttagttgttacttccaatttcttttttactttttgttctaa

SEQ ID NO: 45282 - DNA, 288 bp, Glycine max
  Clone ID: 701130127H1
tcgccatcgcagcaaaggcaaacctgacagtgacatccctaggaggctttgacacatgctacacagtcccaatagttgcacccaccataacattcatgttctcaggcatgaacgtgaccctgccagaggacaacattctcatacacagcactgcgggcagcaccacatgcttggccatggcttcggctccagataacgtgaactcagtgctcaatgtcatagccaacatgcagcaacaaaaccaccgtgtgctctatgacgtgcccaattcaaggcttggagttgctc

SEQ ID NO: 45283 - DNA, 284 bp, Glycine max
  Clone ID: 701130128H1
tatccgtggcctatttatctggtaggaagtcatccagtggtcagcagtttggaaattacactgaagatgatgttgatgcattacgcgcaattgccgaggaacctggagttgttgatttgttcttgactaacgaatggccgaatggggtcgccaatagagcagctgattcggacattcctgctggactctctgatggcagtgattcaactgtatcggaattagtacaagagatcaaaccacgttatcacattgcaggcaccaaaggcatatactatgcccgcgaa

SEQ ID NO: 45284 - DNA, 284 bp, Glycine max
  unsure (1)..(284): unsure at all n locations; Clone ID: 701130130H1
ggttaanggtngtnccagcagcacttgggtttanggngtttgcttcagngantcaggctacagagcctgatcttagtgtcactgttaatgggttgcacatgcnnaacccctttgtnattgggtcaggtccaccagggaccaattacactgtcatgaagagggcatttgatgaagganggggtgcngtgattgctaaaactgtatcacttgatgctgcaaaagctatacnatgtaactcctcgatatgcccggctacgggcagggcagntagtctcngcangggt

SEQ ID NO: 45285 - DNA, 173 bp, Glycine max
  unsure (1)..(173): unsure at all n locations; Clone ID: 701130133H1
acctagtgcaccgtaagggttgtgaagcaggcagagaagagccatggtgcacgtttctttctaccgaaactatgggaaaacgttcaagaagcctcgtcgtccctacgagaaggagcgtttggacgccgagttgaagctggtcggtgagtacgggcttcgctgcaaganggagt

SEQ ID NO: 45286 - DNA, 172 bp, Glycine max
  unsure (1)..(172): unsure at all n locations; Clone ID: 701130134H1
catgcatatgaacatgatgatgaagaaggtgtgtgggtttgcaatagtgatggtggcagtgcagcttctggtggaggtgagtcccaaggcagaggctgtgacttgtacccctgtggagctgagtcctgtttgggggcaataacttcctctcaaccaccatcaacaatngttg

SEQ ID NO: 45287 - DNA, 290 bp, Glycine max
  unsure (1)..(290): unsure at all n locations; Clone ID: 701130135H1
ccatgatcgncgcccncnccggnctcgaggcgcaggatctcttcctctggttccaggtcatgagcatccgcgtcgacgtcgcacnnancggcctcatctacttcgacgtcggcgccgcctccaagcgcttcnccctctccctcttcgaaacgccgnccgaatgcgtcgcngttagctcccaacaacaagacgccccntnncaccaccagggtcaggttcaatctggaagngtangcataagctcantcagggaacctctggaagagatgtctatanantatatggngcat

SEQ ID NO: 45288 - DNA, 286 bp, Glycine max
  unsure (1)..(286): unsure at all n locations; Clone ID: 701130138H1
gattnttggttttgttgagctcagagaagctgnggctttntgggatgcgaantatanctgtntgaacntgagtctagttcaagtcaggntgcaatgaagngttttccantctacctttggagaganganggatggtcctaagancttgcagtcnatatcgggccanncnaacagttctacttatgttgaggctgatnngataatatctggttctgaattgaactctatggatgcctcagataacancacagactcactcaggagaagtgcatttcncagtttggct

SEQ ID NO: 45289 - DNA, 285 bp, Glycine max
  unsure (1)..(285): unsure at all n locations; Clone ID: 701130139H1
tttgtgaagcttgtttcttggtacgacaacgagtggggatacnnnctcacgtgtcattgatccttcttgaattcgttgccaagaagtctctttaaggtgttacttcaaagtagcttgtcttcacattattaccgtatgtttatgtttagctgcgatttangtcttgctcgagcaaanaatgagaggtctgaataaatnggtttctganaccagtngtgttacttgttggaggagcattagctcttttntggactttngatgtggtctctngtggagggggatgag

SEQ ID NO: 45290 - DNA, 287 bp, Glycine max
  unsure (1)..(287): unsure at all n locations; Clone ID: 701130140H1
gtttggccaaagacctcgctgaaaacaacaagggtgctcgcgtgcttgtcgtttgttctgagatcaccgcagtcacattccgcggcccaactgacacccatcttgatagccttgtgggtcaagccttgtttgnagatggtgcagccgctgtcattgttggatcagaccccttaccagntgaaaagcctttgtttcagcttatctggactgcccaaacaatccttccagacagtgaaggggctattgatggccaccttcgcgnagttggactcactttccatctcctc

SEQ ID NO: 45291 - DNA, 287 bp, Glycine max
  unsure (1)..(287): unsure at all n locations; Clone ID: 701130141H1
gccagcccaganacaataaggagagcacacgcaattcatcccatcacagctgtgcaaatagagtggtctttgtggactcgtgacattgaagaagagatagtccctctctgcagggaacttggtattggaattgtaccatatagtcctcttggtcgtggcttttttggcggcaaaggagttgtggaaaatgtgcctacaaatagctccctgaaagcacatccacgctttcaagccgagaacttagacaagaacaagaatatatatgaacgaattgaaggccttgctaa

SEQ ID NO: 45292 - DNA, 160 bp, Glycine max
  unsure (1)..(160): unsure at all n locations; Clone ID: 701130142H1
cnnatagtcctccgtcaaacaccaaaactacatttttgaacccttttgatgctacacttcttggagcagtgaaagctggtgtgtttgtcgcacaggctgcaggaaatggtggtccttntcctaagtcattagtttcatatagtccatggatagnaactgt

SEQ ID NO: 45293 - DNA, 263 bp, Glycine max
  unsure (1)..(263): unsure at all n locations; Clone ID: 701130145H1
actccttactcaacaattcttgtttgtgtaatttatatcttagagatagaaattggttgtgaaaaacagaagcactttgtttctaagtaaaaggaatcttcagctgccatgtttcatcgctggagcaattctcatcaacaggntcagggaagcagcgagctttatgctgaatccaagattaaagagctgaagggtgttatcggacccttatctggacgcagtttgacgtattgcactgatgcatgttttaagagnattggaac

SEQ ID NO: 45294 - DNA, 160 bp, Glycine max
  Clone ID: 701130146H1
gaggtaacaagcctggatgcgtcgtccagcacaaggtctcctcggcgagcagtgtactacgttcagagcccttcccacgatggggagaaaacgacgacgtcgttgcactccacccctgttctcagccccatgggttcccctcctcactctcactcctcct

SEQ ID NO: 45295 - DNA, 207 bp, Glycine max
  unsure (1)..(207): unsure at all n locations; Clone ID: 701130147H1
anttcctacgatggaggactctgaaaaatttgatgcaggtagtgaccaagggaatgcattggtgactccatattataccccatatccgaagcacttgttaccgaaatctggccttcaacctgtcaatatagagttttctcctagctcaggcggtgataactctgtggcctctatgaaagagggccctggatcatcttcttcatcatc

SEQ ID NO: 45296 - DNA, 154 bp, Glycine max
  unsure (1)..(154): unsure at all n locations; Clone ID: 701130148H1
ggcaatccanaannnttattcacatcagtcagaataattnntttantaggagaacttgtgttggncntctgcaccttgtgaaaatatccttgggccaaccacagccacaatancgcgagtgtgattagtctctgatctagtggattgggggcat

SEQ ID NO: 45297 - DNA, 54 bp, Glycine max
  unsure (1)..(54): unsure at all n locations; Clone ID: 701130149H1
cntatctgccaaagcacattttatacaggcagaaagaacaattccntgatggng

SEQ ID NO: 45298 - DNA, 161 bp, Glycine max
  Clone ID: 701130150H1
cccgaccctgttcccctctcgtatccgtcatgaaaggaggaaagtccaagaccgaatctaagagagccgatcccaaacttgctgtgaataagaagggagccgccaccaaggctaggaaacccgccggcaaggggaaggcagcgaaagaccctaacaagcca

SEQ ID NO: 45299 - DNA, 286 bp, Glycine max
  unsure (1)..(286): unsure at all n locations; Clone ID: 701130153H1
ganacagcacactctcacctcactcacttgtccttgttatatttgttttatatcttgtcacaatctgtgactgtttcgagttatccgaggcccctcttttatatggtcgttgataaaatggcttcgacccttttaacaaagatgcttttnggtcaccgattgatacacccttcttcgntcctcactcancagccacngattctctcttctctattcagtanacggctgttttgtatacgagctgtcccggtctcagcctctacatcccaaaacatcagaacaactg

SEQ ID NO: 45300 - DNA, 285 bp, Glycine max
  unsure (1)..(285): unsure at all n locations; Clone ID: 701130154H1
ggaatgctgataagtccacttcttctacatgttggaatagctccagaggtgacagcagcaacatgttctttcatggttttcttctcatccaccatgtcagccttgcaatacctattattgggcatggatcacatagagactgccctcatnntggccctaatatgttttgttgcatcacttattgggttattagtggtgcagagagcaattcaaagctatggaagaccatccttaatagtattttcggttagcatagtgatgactttaagtattgttctaatgact

SEQ ID NO: 45301 - DNA, 283 bp, Glycine max
  Clone ID: 701130155H1
gggttttagcgcacttcttctagatttaaggaagatgggtaaggaaaaggttcacatcagtattgtggtcattggccatgtcgactctgggaaatccactaccactggtcacctgatttacaagcttggaggcattgacaagcgtgttattgagaggtttgagaaggaagctgctgagatgaacaagaggtctttcaagtatgcctgggtgctggacaaacttaaggctgagcgtgaaagaggaatcaccattgatattgctttgtggaagtttgaaacaaca

SEQ ID NO: 45302 - DNA, 188 bp, Glycine max
  unsure (1)..(188): unsure at all n locations; Clone ID: 701130157H1
cgctgctcaaggtacacgcacccacacccacacccacatctgactctgctcanntgcaatgtgcgctgcagtgtaagtgtggcacccancactctggcgtttcccanttcctactccatttctgcggaaagaggaagaagagaatggaattggagggtnaaatgcagcagcagcattgcgngattntt

SEQ ID NO: 45303 - DNA, 281 bp, Glycine max
  Clone ID: 701130159H1
caaactgtgtgcagattggattacctatgctcattctactggttataacacaacagtatttgaagcgccttcatcatgctgctcatcaagtacttgagaggtttgctttacttctctgcattgctgttatctgggcatttgctgctatccttactgtggctggtgcatacaatactgctaaaccacagacccaagtgagctgtcgcacagatcgctcgtaccttatgtcttctgctccttggattaaagttccatatccattccagtggggtacccccata

SEQ ID NO: 45304 - DNA, 179 bp, Glycine max
  unsure (1)..(179): unsure at all n locations; Clone ID: 701130161H1
tactttcctactccaaccgcacttctgctccgcaattatcatgggcaaggtcaagatcgggatcaacggntnnggaagaattggccgtttggtagccagantggctctgcagnganacgatgttgaanncgttgccgttaacgannnttncancaccaccgagtacatgacatntntgt

SEQ ID NO: 45305 - DNA, 181 bp, Glycine max
  unsure (1)..(181): unsure at all n locations; Clone ID: 701130162H1
gngactggaaaacagcacacgtatgttganactgngaatgtgcgctatgtttaccagccaatagaagcactgtacctggttcttgnaacaaacaaaaacagcaacatactggaagattngnanactctgagacntctctctaaacttgtacctgaatattcttacncccttgatgaagagg

SEQ ID NO: 45306 - DNA, 249 bp, Glycine max
  unsure (1)..(249): unsure at all n locations; Clone ID: 701130163H1
ttgagccttttccaattgcagaagttgaagctcgactttgtaagttggangaatttcaantttgtcgtccatcaatctgacgcatgcatatagatctgaaaaatattcagtacanaacanatcagagttggagaatttttcgcccaatactcacggnagtttctgttgcngctgnttctcaanctacccatgttgagaattcagcntttgttgatggttctgttgggcagtcaaacacttttcagtgnc

SEQ ID NO: 45307 - DNA, 123 bp, Glycine max
  unsure (1)..(123): unsure at all n locations; Clone ID: 701130166H1
tttagttgctggcactatctgggggaccgtagttgccacctggtatgatgtccctcgtgtagagngaaatgtngctcttccagggctgantanganttncaagatgatgggcaactatggttt

SEQ ID NO: 45308 - DNA, 122 bp, Glycine max
  unsure (1)..(122): unsure at all n locations; Clone ID: 701130167H1
gaaattgagccaaaaagttgaccctctttggatgaatgagaatatcatgttcctcacattaatacaacntggagattccaacaattgaaaactcctaancacccntctcttccaaccccgtt

SEQ ID NO: 45309 - DNA, 193 bp, Glycine max
  unsure (1)..(193): unsure at all n locations; Clone ID: 701130169H1
attccctgcacgancttctttatatagtaggattntgtcttccttcatcacactaaacangttaaaagaagagcatcactgnactaacaaagcaaccctatgtcganggtggtttgtgtcaccgganccagcggcgccatcggatcatgggtggtcctactcctcctccngcgtggttacaccgtcccatgcc

SEQ ID NO: 45310 - DNA, 281 bp, Glycine max
  unsure (1)..(281): unsure at all n locations; Clone ID: 701130170H1
tcttgttgtttggagcgatccgagaaaaactctgtaaacatgttggtttaccaggacctccttacaggtgatgagcttctctctgactccttccgttacaaggaaattgagaatggaatgctgtgggaagttgaggggaagtncgttgttaaaggagcagttgatgtagacattggtgcaaacccttctgctgagggtggaggagaagatgagggagttgatgatgcagctgttaaggttgttgacattgttgacacattcagacttcaggagcaacccgc

SEQ ID NO: 45311 - DNA, 282 bp, Glycine max
  unsure (1)..(282): unsure at all n locations; Clone ID: 701130171H1
ggtcnttggtncttcantancagtttcgtgatttgttcctcaagtgacaaaaaantantgtagtttacgcactgatggcntgcaggccaagcaggggcgccacnaancaaacatgatactcgattttcagctataactttnaatcccatggntcctttntaaacccagacccattcttctccnttccatcgnttcttcantattcccttntcttttgtaatttttgggaatgntcgtnggagagntagtatccanaaangggctantctccnanatntcaat

SEQ ID NO: 45312 - DNA, 266 bp, Glycine max
  unsure (1)..(266): unsure at all n locations; Clone ID: 701130172H1
ccgcaacttcttctcagacatggcatctcngggtttgtgtccttcgatannaaaanntcttctnttggactctgaagggaagcgtgtggcagtcaagtattactcagatgactggccaacaaacnatgcaaagttagcttttganaagtttgtatttactaagactgttaagacaaatgctcgtacggaagctgangtaacactacttgagaacnatatcattatttacnaatttgtacaagacctgcatttcttgtcactggtgg

SEQ ID NO: 45313 - DNA, 160 bp, Glycine max
  unsure (1)..(160): unsure at all n locations; Clone ID: 701130173H1
actctaaagagtctccgctgaactttttggtttcttnaagatgtcgttactctnngatcntatcaaccttaacctctccgacatcaccgataaggtgatcgccgagtacatatgggttggtngntctggcatggatatgangatcanagcnaggactctc

SEQ ID NO: 45314 - DNA, 281 bp, Glycine max
  unsure (1)..(281): unsure at all n locations; Clone ID: 701130174H1
taaaggcaaagacttcttgtgcattgtctcttggttttggggaggataccatcaacacatcatcggttcttgtgatgccaatgatgtcatcaagaatgactggattcagaggaaatgggcttgaaagagcaagaatattgtccatgagaaatggttggagcaagattccaatggatgaagatgctggcaaattgcttgaaactagttcagttgttcctcctagcccttagcagtggttgttagtgtcataggatgtcccacggtatcatttttancccctg

SEQ ID NO: 45315 - DNA, 279 bp, Glycine max
  Clone ID: 701130176H1
caggcatacgcacaaccggtgaatttatcagcgtcttcattttatgtacccggtaacaattccattaggtacattaattatggtgctgcagtaagtgaggtggaaatagatcttctgactggagaaaccagatgtttgcagacagatattatctatgattgtggacagagtctcaacccagctgtggatttaggacagattgaaggatcttttatccaagggttgggtttttttcatgcttgaagaatatgaaacaaatcttgacggtttgatcttggt

SEQ ID NO: 45316 - DNA, 155 bp, Glycine max
  unsure (1)..(155): unsure at all n locations; Clone ID: 701130178H1
ctctccttcctcttccttcttcttgtttcatctgccactgcttgtgatcgctgcttgtatcaatccaaggcttcctatttctccaaagcttctgctctttcatctggggcatgtgggtatggctctttggcactagacanaagnggtggacacct

SEQ ID NO: 45317 - DNA, 177 bp, Glycine max
  unsure (1)..(177): unsure at all n locations; Clone ID: 701130179H1
aatggaaagaagctgaaaatattgtgcctccatggattcagaacaagtgggagttttcttaanaagcaaatcagcaantgggatccttctatattcactcaatttgatatggttttcccagatggtaaataccctgcaggagggaagtcgacatagaaggcatcttcnctccacctt

SEQ ID NO: 45318 - DNA, 168 bp, Glycine max
  Clone ID: 701130182H1
cgaacgccgttgccaaaaaatagatacttgtttcttattcacgtagtattttaatacttagtcaaacacgatagcatgaacccaaaatttttgacaattgtttctcaacaagagagattttgattttagcagaaaagcaatggcaagtgcgttgggtagcagagttga

SEQ ID NO: 45319 - DNA, 281 bp, Glycine max
  unsure (1)..(281): unsure at all n locations; Clone ID: 701130183H1
cagtttctctgtacttcatacattttcacaaaccccaagaagaatggaacaggnnnnnnnnnnnnnnnnctcttttggtcctatgtcctcaactattccttgtcttctcctccttttgttctgtctctcaggatctgctgaggcctacaagaattacacagttggcgactctttaggatggtttgacaatactgagaaatccaatgtcaattaccagaagtgggctgacagtaaagaattcagcttaggagattncctcattttcaacacggatactaacc

SEQ ID NO: 45320 - DNA, 190 bp, Glycine max
  unsure (1)..(190): unsure at all n locations; Clone ID: 701130184H1
ctaacttgttccctcgttaaccctaatcatcaactcaagcagtgaatgaatctgtggacggacgagaactcctcggtgatggaggccttcatgtcgtcctccgatctctcctcaatctggccctcgccggcnccgccgcaatccacggcggtcttcaatcaggacaccctccagcatcgcctgcaggctt

SEQ ID NO: 45321 - DNA, 143 bp, Glycine max
  unsure (1)..(143): unsure at all n locations; Clone ID: 701130185H1
ctcttttcacgtcattatcctaaacttgcagattttcacatcccaagcaacatgaaggggaggtncatgtttctgtcggtgctcctttgtgccacctttcatgtctccttctccattactgacggntagtagcaaacgggaac

SEQ ID NO: 45322 - DNA, 273 bp, Glycine max
  unsure (1)..(273): unsure at all n locations; Clone ID: 701130187H1
tctctcccccccaaaccctagctttcaccatgcggttccaatcgctctaaccnnaactccctctctccatcaccgatcttcgatccgcaccgccgttcctttgaatcgcttcagattctccgctgcttccaccaggaggaggagnggnttcgcgattcgcgctcgaagcttccgttgccgccgatcgaagagattcgctccgaatcccaacgccctgccgtcaagtttttcgccgaagtaacaaatcctgttgttgttcttcttcgattcgat

SEQ ID NO: 45323 - DNA, 149 bp, Glycine max
  Clone ID: 701130188H1
gaaccctaatgtatcagtgtcatcatcagtgtgtagtttaagctagctttgctatggttacgttctttgagatgagagtcttgatgaacagtaccattctgatgtattgctttccttgaaagttaatgcatgcttcttatcttctgtct

SEQ ID NO: 45324 - DNA, 278 bp, Glycine max
  Clone ID: 701130190H1
aaacaatctgcttcagctgccattatgactgttaattctggcattagaaaaattcttccagattctgagatttgtgactttgactttgagccatgtggttattcaatgaactctgttgaaggtgctgctgtttctaccattcatgttaccccagaagatggtttcagttatgcaagctttgagactgttgggtatgacttcaaagtggtgaatctgaacgaaatggttaagagggtattggcatgttttctcccaactgagttctctgttgcagttca

SEQ ID NO: 45325 - DNA, 165 bp, Glycine max
  Clone ID: 701130191H1
aaagtatggcggcggagtcatcactgagggtggcgactcccactatttgcaacctcaatggttctcagagaagaccaaccactctctctccgcttcgcttcatgggttttagccctcgaccctctcactctctcacttcctcttccctttcacacttcttcggga

SEQ ID NO: 45326 - DNA, 166 bp, Glycine max
  unsure (1)..(166): unsure at all n locations; Clone ID: 701130192H1
tttctccagtgtcatgnagaagagttcttcatcatcattccagancntgggatctttcccaagtccaggggcaccctattatagggagagaaacattaggagccaanagggtnggtgctcagagagagtttcaaattcaaagctttcaactagngcnagtagcata

SEQ ID NO: 45327 - DNA, 119 bp, Glycine max
  unsure (1)..(119): unsure at all n locations; Clone ID: 701130193H1
aattgagcnanttactatangatttngatctcccancagaggagtttcncaaaattgccaagtacccttttcaggatcaaggaagagaatcaagnaccaacaaaaggtgttgttcattg

SEQ ID NO: 45328 - DNA, 223 bp, Glycine max
  Clone ID: 701130194H1
ccggctcctccgatggaggggtaggagtgaattggctctgcatgagccctaagcgagatcacaaccccgaaaactatgacgaccttcaattcgagttcaatcctaatctcttcgcctctctcgagcactatttgcctcctcatatgctcaacctctcacgcgatgttaagcttcactacatcaggaacattcttcttcgctatttgcctgagaatgacgcaat

SEQ ID NO: 45329 - DNA, 260 bp, Glycine max
  unsure (1)..(260): unsure at all n locations; Clone ID: 701130195H1
ananagcgcgtcttaataaacgctacntctctgaaaaccccacnttcttttcttctttcttacctctctttcgcttcttcgatcttcgatcttcgtcgctgaaaatgagagagtgcatttcaatccacatcggccaggccgggattcaggttggaaacgcctgctgggagctttactgcctcgaacacggcattcagcctgatgggcagatgccaagtgacaagaccgttggtggaggtgatgatgctttcaacacttct

SEQ ID NO: 45330 - DNA, 278 bp, Glycine max
  unsure (1)..(278): unsure at all n locations; Clone ID: 701130201H1
atccacaccaccaaatccaaattccaatgcttcttcttccttcttcttatttcaatttcaatcactactacttcacgcttttgtttctccatttttaaaccctaaatctatctatctaatagagataagatagggcaaaaacaaaaccctagccaaagaaaaaccttgttgnnnnnnnnnnnnnnnnnnnnnnnagagagaggaatatggaaggagtaccgcacccaatacccagaacagtcgaagaggttttcaccgnttttaagggcagacgngcc

SEQ ID NO: 45331 - DNA, 282 bp, Glycine max
  unsure (1)..(282): unsure at all n locations; Clone ID: 701130202H1
ctanaaacaaatggaaaaggtttagctggtttttcccaattcnagatacatgcagttaggaatggtatctccttcaaaacaatgatagacatattgggaaggaagtctcaactactactactacaaaggaaggaactcaaacaaggcaccaagtcatgtttctatttgagtagctccaagagttattccttcccttttctctcttctctggtgtcttcacagaaacaaccacnccatcatgatggaaagtcctcctaaatgcaaactcanattcacattaat

SEQ ID NO: 45332 - DNA, 279 bp, Glycine max
  unsure (1)..(279): unsure at all n locations; Clone ID: 701130203H1
gccccactcaaccaccacacctctcctcgttcacgctacccctttctgctcttcttctacctttcaagttttaaaagtataaagatggcagagacattcctatttacctcagagtcggtgaacgagggacaccctgacaagctctgcgaccaaatctccgatgctgtcctcgacgcttgnctcgagcaggacccagacagcaaagttgcctgcgaaacatgcaccaaaaccaacttggtcatggtcttcggagaaatcacgaccaaggccaacgttgat

SEQ ID NO: 45333 - DNA, 277 bp, Glycine max
  unsure (1)..(277): unsure at all n locations; Clone ID: 701130204H1
gcctaaaacagtacggatacttgagcaaaggaacaaatattgaagtgtccaatgcgtaccaacaataccctttagtttactctctctaaaaaaaacaaacaattctctatcctctacactctagtctctcgctgtttgttctctacttaactcacatctctaagctgtgtgcgtgaaccagcggatagcaaggatgagtaaacaagacatgntgaaaagtcagaattgccttctcaaggtcaatatccatgcgatggctgtgaacagnnagtaaana

SEQ ID NO: 45334 - DNA, 278 bp, Glycine max
  Clone ID: 701130205H1
gtgtgaataccctaaatcgggagtttcagtttcacccctcttttctcatctctaacatcatagtcctcagaggctagtcttcctattatcacaaacaatgtctgacagtcaagaatctgacaagaacattgagatatggaagatcaagaaattgatcaaggctctggaagctgctcgaggtaatggtaccagcatgatttctctgataatgcctccacgcgatcaaatttcccgggtcactaagatgttgggagatgaatttggaactgcttcaaaca

SEQ ID NO: 45335 - DNA, 280 bp, Glycine max
  unsure (1)..(280): unsure at all n locations; Clone ID: 701130206H1
aatggtgtacgtcaaggctcagaaatcaaaagcctacttcaagagntatcaagtcaagttcaagagaagaagagagggaaaaaccgattaccgtgccaggattcggttgattnatcaggacnagaacaantatnacactccggantaccggtttgttgttcgctttagcaacaaggacattgttgcacaaataatatctgctagtcattgctggcgatattgttcttgctggcagcatatgcncatgagctgccacgatatggtcntgaagtagggctta

SEQ ID NO: 45336 - DNA, 274 bp, Glycine max
  unsure (1)..(274): unsure at all n locations; Clone ID: 701130207H1
ggaaatttgcgttgtttttcgcggtacagctcacacacactgaacggtaagtatggcggacaaggntgttacaatccgaacccgaaagttcatgaccaacaggcttctttccaggaagcagtttntcgttgatgttctcatccagggagggcaaatgtttccaaggctgaacttaaggagaagctagctaggatgtatgatgtgaaagaccctaatactgtatttgtncttcaaattnccgaacacattttggaggtggcaantccactggatt

SEQ ID NO: 45337 - DNA, 280 bp, Glycine max
  unsure (1)..(280): unsure at all n locations; Clone ID: 701130209H1
gctacttggcacaaattatggaagcttgctgttagctctgaaggatgggatcgagttccataccacgtgtgcntangngggatntgnccntngatcgccactccngagtcaccannagttgaanatgctaatgnnaggnggcngtctccatgagctatganctgattggaataccaagagaggaagaagtccccatangtagactcccaagangccccatcattgangnagccattgtgatgggggcggtncatagataggtgcatgcatgaggaccacc

SEQ ID NO: 45338 - DNA, 275 bp, Glycine max
  unsure (1)..(275): unsure at all n locations; Clone ID: 701130210H1
gcagtgatctatactatccatccctcaatcctggagagcgcccatttgtggttgacttgtattaccactccacacattgaataccgttggggtggagaagggttgaggaagantttagtgcgatgggctgattcaaccactgataagaagggtgntaatgacgaacaaattgtgagtcctgctgaacagctttctaccgactattgttatgcttcaaagtgcgaaagccaggaatggctccccctgtgaaggagcttcggaagttattaaggatc

SEQ ID NO: 45339 - DNA, 259 bp, Glycine max
  Clone ID: 701130212H1
ggaaactatcccttctggcatgttcgtcaggggaacctatgcagcaagaaccaagtttgtagatgacgatgcgaaaatgctacttggatgtcagttactactttgaaattcagaagaacagaccaacacctcaatgagatttaaacttgagtaacttgttggaataattttctccttttgcatcttgtgtatctttggaacagattgaaattcaacttgtttgtcaattccagttagcacgattttacacgtgcatgct

SEQ ID NO: 45340 - DNA, 278 bp, Glycine max
  Clone ID: 701130213H1
attacctatcaaaaccagaaaaacacactgcaattgtttggactagttttaatttcttccaattccatggctgggaaagatagaatcctgattttgggacccactggagccattggaaggcacatagtctgggcaagtgtgaaggcagggaacccaacatttgtgttggtgaggaacacccctggctctaacaacagggtcaatctggtcaaagctgctaatcctgaaaccaaggaagagctcattgagagttcaaaaattcaggagtaaatctaatt

SEQ ID NO: 45341 - DNA, 278 bp, Glycine max
  unsure (1)..(278): unsure at all n locations; Clone ID: 701130214H1
tgtatcacttgtttaatttatttaggattccaagtttttntctctttttcttttttccccagcctaaataccatacgagtttatcttcaatccttgttggtggaganttgggcgaatatggcttgaactactttgatcgttgtgcctgtnagctgcattcaattttcacaccggtctttacttcgatcctcttcttctttttttgaggttttctattttggtttcaaggtgaaacggagtaattgtttctcccctgtcttggggtgttctatttttat

SEQ ID NO: 45342 - DNA, 284 bp, Glycine max
  unsure (1)..(284): unsure at all n locations; Clone ID: 701130216H1
cagcgccnaaggaatcgatgacaatgattttctctccagcatagatccttatgtgattctcacatacagggcacaggagaaaaagagcactgtgcaagaagatgctggatccaagccacaatggaatgagagctttcttttcactgtctctgacagtgcttctgaacttaatctgaagataatggataaagacaactttagtcaagatgattgtcttggcgaggcaaccattcatttagatccagtgtttgaagccggtagcattccagaaactgcttacaagg

SEQ ID NO: 45343 - DNA, 283 bp, Glycine max
  unsure (1)..(283): unsure at all n locations; Clone ID: 701130217H1
atttgattcacttggatccaaaactactcaagatgattganagtantttaattaaaattaagactgacatttttgtcaaacataaattacagaggaaataagtgccttctgatttttctgtggtggggggtctacattagaggactttgaagangcccatgccaagaatttgtgaaactgttccaactnggcaattgcttttcctgaatnaagttcaccaataatgttagtgtctgcattaatctgccatgggaaacccncccagcaccctnctttnagnttt

SEQ ID NO: 45344 - DNA, 276 bp, Glycine max
  unsure (1)..(276): unsure at all n locations; Clone ID: 701130218H1
ctcnactctctcccgcaaancattcttcttntcttctctccctctgagcntttcatngctcctcggaganatggctgcgtccgaagaatcatcanccactcagatgatnggnaatgctttgtgcagcagtnttactccatattgnntcaagagccagaccaagtccacagattttaccaggagtctagcatcctaagtcgacctgaagaagatggtaccatgacaatggtgactactactctggnaattnntnaaaagatactctctctggataca

SEQ ID NO: 45345 - DNA, 275 bp, Glycine max
  Clone ID: 701130219H1
taagtcgatctgggtcgggtggagcagcgagttcaattaatcattcagatgttttggaggctctttctcgggctttaaagaagactgaggagtcttatctcgatgtggcggataagatggtgatggagaatcctgaattggctttgatgggttcgtgtgttcttgtgatgttgatgaagggggaggatgtttatgtgatgaatgtaggggatagtcgagctgtgctggctcagaagggctgagcctgattactggcttggcaagatcaggccaga

SEQ ID NO: 45346 - DNA, 275 bp, Glycine max
  Clone ID: 701130220H1
cttgaaattcttggtagcatcaaacaccgttatctagtgaatttacgaggatattgcaattcacctacgtcaaagttgttaatatatgattacctaccaggtggtagtcttgacgaagcacttcatgaaagagctgatcaactagactgggattcgcgcttgaatataatcatgggagctgcaaaagggcttgcctacttgcaccatgattgttcccccaggatcatacaccgagacataaaatctagcaacattttacttgatggaaacttgga

SEQ ID NO: 45347 - DNA, 274 bp, Glycine max
  Clone ID: 701130221H1
gcacttcaccaatatgattgcttgcgagccaataaatcaacatttgcttggggtctagaagcccgtgtaccatttttggacaaggcgtttatcaatgctgcaatgagtattgaccctgagtggaagatgataaaaagagatgaaggacgaattgagaagtggattctgaggagagcctttgatgatgaagagcatccttatctgccaaagcacattttatacaggcagaaagaacaattcagtgatggagttggctatagttggattgatggcc

SEQ ID NO: 45348 - DNA, 273 bp, Glycine max
  Clone ID: 701130224H1
cttcagtttctcctcgttgttcttcgctttcctgttttcaatttcgattctttcgttaatttaataagatgtttgggagggcaccgaagaagagcgataatacgaggtactacgaaatcctcggcgtctccaagaacgcttcgcaggatgatctgaagaaggcttacaagaaagccgccattaagaatcaccccgacaagggcggtgatcccgagaagtttaaagagctggcgcaagttatgaggttctgagtgaccctgagaagcgtgagat

SEQ ID NO: 45349 - DNA, 274 bp, Glycine max
  unsure (1)..(274): unsure at all n locations; Clone ID: 701130225H1
attgcatccctcttgatttgtagtttgttttgtgctttagataaaagttctgccaaatcaagaggggttttaagatcatagtgtgtgttttgcaacaatggctaagttctttgctgctatgatcttggnactctttgccatttccatacttcaaacagtggtaatggctgctaatgaacaaggaggccacttgtatgacaacaagagcaaatatggaagtggaagtgtcaagagttaccaatgcccatcacaatgctcgaggagatgtagccag

SEQ ID NO: 45350 - DNA, 274 bp, Glycine max
  Clone ID: 701130226H1
cttggaggtgaagattttgataacaggatggtgaaccactttgttcaagagttcaagagaaagaacaagaaggacattagtggaaaccccagagcacttagaaggttgaggactgcttgtgagagggccaagagaacactttcatcgactgctcagaccaccattgaaattgattctctatacgagggaattgatttctactccactgttactcgtgccagatttgaggagctcaacatggatctctcaggaaatgtatggagccggtggagaa

SEQ ID NO: 45351 - DNA, 240 bp, Glycine max
  Clone ID: 701130227H1
agcatcagtccatccatcaccctcccaaaccctagtaatggagatcttgccgtgtgactttctatctgtccttttctcaccgaagatttgagtacttatccttttcctatatattctccagagtttccttcttatacttctctttctctccttattggcggagagagaaaaagagagaggtagagaaaagcgaagagtctctctcttcctatctctctctttcaatgtcagggcacaaat

SEQ ID NO: 45352 - DNA, 275 bp, Glycine max
  Clone ID: 701130228H1
ggttttggtctccgaggtttgtatcggaatccgatgtattatgcaaaagaagctgcgcatgtcgaccccattttcgtagcacatggctgccgctgataacaccaacccaaaggattattacaaagtgctggaggttgaatatgatgcaaccgatgaaaatatcaaattaaattaccgaagactcgcgttggttggtaacctacctttttattagtagcacaatttttcaaactggaaattttcttttctacaagtttgatttactaccgtgtaca

SEQ ID NO: 45353 - DNA, 223 bp, Glycine max
  unsure (1)..(223): unsure at all n locations; Clone ID: 701130229H1
aggaaaaanaagaaaactgataactgagataacaatactgtagatatagagagatagttccaagctccnattcccagaaaaaanttaaaactttgcttcttcactttttctcttaccccttctgatctcatgcaatttcccctcatggatccctttgatttgattcgcaaagggtttggctgaagctatctggaatatttctgttacagtttttaaggnctat

SEQ ID NO: 45354 - DNA, 278 bp, Glycine max
  unsure (1)..(278): unsure at all n locations; Clone ID: 701130230H1
ggcgcgtggncgtgccaccaagcacgcatcaaaatctgccgcttcaaccagcaatttgtgcagggaaattcctgtcaaaccgcagagaagaggacaaacaattagggtttttcaaattcaacatttcttcgttttccaatttagggtttttttctcctcgctctgttgctttacccttcagttgcaattcgtacaggaggttgttctattctcatgcacaattgaaattggcaaatgagtgatgcnaaagaaaacgaggtagctagccagggcatgcc

SEQ ID NO: 45355 - DNA, 278 bp, Glycine max
  Clone ID: 701130231H1
ctcgacactaccttgttcttaaactcacaacaaaaactatttgcatcaccaactactttctagcttattatatattcaaaagttgtgaagaatatgagttcaacaagccgtgcttgggcttggaccgtggcagctggtgttggagtggtggaggccatgaaggatcagggtatctgcaggtggaacagtgtgatgagatcagcacaacaacatgctaaacataatatgaggtcttgtctcaaaccaagaagctttattctcaatcatctgttatggct

SEQ ID NO: 45356 - DNA, 281 bp, Glycine max
  Clone ID: 701130232H1
gggacaacctgttcaatagacatggaatttgccagattccccaaaatcaagaaactacaaggtaattgtgtgtcatggaagaataccattcttgggcaaggaatgttgaataggttgagaacaatagttacttcacgaagcctatagccaatgtttcaggtcaggcagccagaacatgtggtggcttcaatgttgtggaaaacatgttgtggttagtaaagcaacttacaacccagttaggattttgtcatcaactgcattcaagcaatagattctttctt

SEQ ID NO: 45357 - DNA, 275 bp, Glycine max
  Clone ID: 701130234H1
atcgcatcggatcttcactctcttctccgatctcaaaatgcccgccgtttatggagctcgcttgaccaccttcgaagactccgagaaggagagtgaatacggttacgttcgcaaggtatcaggaccagtcgtcgttgcagatggcatggctggggctgctatgtatgaactcgtgcgtgttggtcatgataatctcattggtgaaattatcgtctcgaagggaattctgctaccatccaagtttatgaggaaactgctggcttgatggttaatga

SEQ ID NO: 45358 - DNA, 275 bp, Glycine max
  Clone ID: 701130235H1
cgaccctttctttaatccatggttaagttggcacaagattcttagcttctccgagtgtctctgtctgtctgcggaatccaaaccctccaaggtttctttcctgtgctcctcctcgtgtggtgcacctacgcacgaggtttttgtagctaccaccgtgcccaattcacatcgcatgtttcgaacgctttgtgctgcaactgaaatcgaaaatcagagaaagcggagaagagagagagagcatggctgatctctttgcgtggctcatctccttcttc

SEQ ID NO: 45359 - DNA, 274 bp, Glycine max
  Clone ID: 701130236H1
agaagctgcaagagcttatgatgctgaagcaaggaggatccggggcaagaaagccaaggtgaatttcccggatgagccttcaggcgctgctgcttcctcaaaacgcctcaaggtgaatccagaggctcagccaatgaaggaaaatctgaacaccgtgaagccgaaaatgaaccagatgttcaattttggtcacaatctggagggctactacagcccaatagatcaggtggaacagaaaccactggttaaccagtatgttaaccctgccccgttc

SEQ ID NO: 45360 - DNA, 272 bp, Glycine max
  unsure (1)..(272): unsure at all n locations; Clone ID: 701130237H1
ggaagcttgtggcagaacaaaattaaccttactcctccatcgttgcagcttcctggtagcngantgaaggntgctctgagtgccagggatctggagatggagatggaactgctcggtctagaaagccctgcnnnnnnnnnnnnnnnnnnnnnnnnnnnnnnnnnnnnnntgattgaagagattgctaggatctcttccccttctttccggagcaaggaattcaataggattggtgatttgaatcctactaaccttgatgactgttattagca

SEQ ID NO: 45361 - DNA, 272 bp, Glycine max
  Clone ID: 701130239H1
ctttccagttcatacttcatcctattattactttccctctttgccattccaaatggccactgttgaggttgcacagcaaacaccaacaactgtgacagagaatgaaacaacgactgaggtaaccaagattgaggaaactaccccagaacagccagccaccgaggttactgccccagaaacagtcaacgaagaagcaaaagaggaagcagcagttgagactaatgaggcaacagaagttacagaggaagggaaggctgagaaaacagaagaag

SEQ ID NO: 45362 - DNA, 270 bp, Glycine max
  Clone ID: 701130240H1
atatgaatgctatgtaccaatgaagtacaaaaaataccacaagaaaatggctaaaactgcagaatggggggaccatgttaccttacaggcagctgcggataagttttctgcaaagatatgccttctaacatcattcagagacacttgcttcatcgaaattatgccactgtaccaagcaccacagcgtgaactgtggttgagcttttggtctgaggttcattacaattcattgtatgaaatccgagatgcaccaatccagcataaaccaaa

SEQ ID NO: 45363 - DNA, 272 bp, Glycine max
  Clone ID: 701130242H1
ctttggttgcgaaatttcagaagttacatgaggacctgactaatggtttccgcaaccttgaggacgaaacccgatgattgatgattgaagatttggtagtttgctcaaatattgtgttatttccaattgtaagacgcagtctagcatgcgcagggttgcaacgtcccgagtgttctcatatttgactgttccgattcattcatatcacatttatttccttcttggtgctggtttggctttgatctagtctcatgtgtagctataatcatgtg

SEQ ID NO: 45364 - DNA, 272 bp, Glycine max
  unsure (1)..(272): unsure at all n locations; Clone ID: 701130243H1
gtttgacgttgttcacaatcactttctgcgcttcactcactcccttcntgcggttttctttctttgtcgaactcgtgcgaaaatgcgtgagattcttcacatacagggagggcaatgcggaaaccagatcggagcgaagttctgggaggtggtgtgcgcggagcacgggatcgattccacggggaggtaccagggggacaacgagttgcaactcgagcgagtcaacgtctattacaatgaagcgagttgcggaaggttcgtgccgagggcgg

SEQ ID NO: 45365 - DNA, 273 bp, Glycine max
  Clone ID: 701130244H1
aaggcaatgcaggatccagaaattcagaacatccttcaagaccctgttatgagacaggtattgattgatttccaggaaaatcccaaggctgcacaggaacacacgaagaatccaatggtgatgaataagatccaaaagctggtcagtgctggaattgtccagatgaagtaagtttgtggcaggtggcagttcgtgtgaaaaagcaatcaagcaatcgataatgatgtctcagtgtgactattttgacatttaaatagatgtgactgggaaaaa

SEQ ID NO: 45366 - DNA, 274 bp, Glycine max
  Clone ID: 701130245H1
gaggagccacacttgaccattgcatttcttggactcgcctatacaataatttatagaaacctgctgtccatatatgtttcccatgatgctgatgattttggcagttggcatgctgacaatcagggcccttaaagagcaaggccgccttggacgatcttttggtgaagtcacaatacgtgaccagccaccatccaatactatacaaaagattattgctgtaaaagatgccatgcgtgatgttgagaattttatgcagcaagtgaatgtcttcctc

SEQ ID NO: 45367 - DNA, 264 bp, Glycine max
  Clone ID: 701130246H1
ctctggatctcgtctcgatcgatagatctcgaacatgagcactggggagcttctcaacatcgaacctctcgaactcaagttcccctttgagctgaagaagcagatctcatgttctcttcaattgtccaataagaccgatagctatgtagccttcaaggtgaaaacaaccaatccgaagaagtattgtgttcgtccgaacactggggttgtcacgcctcgatctacgtgtgatgttatcgttaccatgcaagcgcaaaaagaggc

SEQ ID NO: 45368 - DNA, 276 bp, Glycine max
  Clone ID: 701130247H1
cgttcaccaactagtggagaatgcagatgagtgcatggttcttgacaatgaagcactctatgacatttgcttcaggaccttaaaactcaccactcctagttttggtgatctgaaccacctgatttctgcgacaatgagtggagtgacatgttgcttgaggttccccggacaactgaactccgacctgaggaagctagcagtgaacctgatcccattcccacgtctccacttcttcatggtggggtttgcacctctcacctcacgcgggtctcagca

SEQ ID NO: 45369 - DNA, 281 bp, Glycine max
  unsure (1)..(281): unsure at all n locations; Clone ID: 701130248H1
ggggagttgaattaccataataacccgagagacagatagagggtgaaaagaatganagctccttgggagctcagagtctagtttcttaatcaatagaagaaaatttgtaatccgagtccctccagcagcatgccaggtctcgtatcggacgcccaacccctcggaatctccgtcccggacacacccaggcaatcccagagaaccccttctccactccccaaaaaaccacccagcccattctccttntcgntcctccaaaaagaaaactcctgaaacncctc

SEQ ID NO: 45370 - DNA, 278 bp, Glycine max
  unsure (1)..(278): unsure at all n locations; Clone ID: 701130249H1
cccaaacttgctaactccgttaacctcatcggtcatntcccagtccccgattcagttccatgtctctcccaacgatggntacgtctgggcctccaccgttatcacgcgtcaagactcctctgacctctctttctcgnttccggttatatttgagggtgatctcgctcatactgccaaatttcatctcaatctaaatgattgcatccacatgctggaaaacttcaccactgattcaccccaattggaacacctnccacccccaatctaatatcaggtta

SEQ ID NO: 45371 - DNA, 274 bp, Glycine max
  Clone ID: 701130250H1
atttgggtcaagctgcataccttatggaaaaccatgctgatgctggtaatgccttttattcttctgttccaagtggtgcattctggccaactttcctcattgctaacattgctgcattaattgcaagtcgggctatgacaacagccacattttcttgtataaaacagtcagctgctcttggttgtttccctcgtcttaaaataattcatacctctcggaaattcatgggccagattctatatccctgtcataaactggtttctcttggctgttt

SEQ ID NO: 45372 - DNA, 273 bp, Glycine max
  Clone ID: 701130251H1
gttttcctaatgctctggatgctagaaatgttattgatccatataaacagagcatgtctttgcaaattaaagcagaatttatgcatgaggcatttgagttgagcaaaatatgccaactccttggacactttcattttaacgaatagcaagaaacttcgatcacaaaatactgttttctggcactagaataacagtcaaatttaattatataatacttgggtacactggtcccgtttgttttcttgttgctgcagtagttttggtagcatggcc

SEQ ID NO: 45373 - DNA, 272 bp, Glycine max
  Clone ID: 701130252H1
gtaactcatcagggaacggaaatgccttcatgatgggctttgggcccaaacacagccgacttaataaagatcaacaaagcaccaagtatctcaatgatgagattgaggaccctgcccctcacaaagaacatactaagcaacagttgaagatgcatgttgctcatgctcaaaactatgaagttgcatgtaatgcaattatcaaccactgcttcacttcttatgcattttggcattgcttctttcaggctgcggcagtatcttatgctaaacaa

SEQ ID NO: 45374 - DNA, 270 bp, Glycine max
  unsure (1)..(270): unsure at all n locations; Clone ID: 701130253H1
ccgagaagaagtgccgggtagacgtggttatcctggatatatgtatacagatcttgcaacaatttatgaacgagctgggagaattgaggggcgtaaaggctctattacacaaattccaattctaaccatgcccaatgatgatattacgcacccaactcctgatctaacaggntatatcactgaggggcagatatacatcgacaggcagctgtataatagacagatatacccaccaatcaacgtcctcccatcantatctcggttggtgag

SEQ ID NO: 45375 - DNA, 269 bp, Glycine max
  Clone ID: 701130254H1
aatatggcatttgcaggaacaacttcagaagtgcatggcttgtgacaaaacagtttatctggttgataagttgaccgcagataaccgagtgtaccataaggcttgcttcagatgccaccactgcaaaggaacactcaagctcagcaactataactcttttgaaggagttctttactgcaggccacactttgaccaactgttcaaaagaactggtagtctgacaaaagcttcgaagggacaccaaaaattgctaaaccagaaaaaaccgg

SEQ ID NO: 45376 - DNA, 267 bp, Glycine max
  unsure (1)..(267): unsure at all n locations; Clone ID: 701130255H1
gttcttctacgcggtgttcggcgntttgggagcggttgttgcagtgacggagctgagcaagagcaacaaggaccgaatcaacacctcttccgcattcaattccttcaccgaacaactacntcatacgtctattccctcatgatggctggagattggctacaaggtccatatgtctactacctttacagtacatatggatatgggaagggagacataggacaactcttcatgctggttttgggtcttccatgctctttggaacaatgt

SEQ ID NO: 45377 - DNA, 267 bp, Glycine max
  Clone ID: 701130256H1
ggggaagcagctttgtggtgggacatttttgaaccctggatcatgggatgctgcacttcttgctgctgggactacactatgctgcgatgaagcatttactgaatggggatggaaaagtttcctatgcattggttaggccccctggtcaccatgctcagccttctcaggccgatggctactgtttccttaacaatgcaggtctagctgtgcaattggctttagattccggctgcaagaaggttgcggtcatagatattgatgtgcata

SEQ ID NO: 45378 - DNA, 269 bp, Glycine max
  Clone ID: 701130258H1
gtttctctctcctctctgcactgcaccccacaactcaaactgagcagtcacagacacaggttgtgtgtctttaaaacatctatgaactgttgttggcacttggcagataattattgcatctagcaacccataaagacggtgactatgagtaatctgcaaaattttaatgctatactctgtgtctctgaatgaccatcaagtgatccggtgcggttggaaagaaccttccgaattacaaagattgactacttgttattctcattggtgga

SEQ ID NO: 45379 - DNA, 270 bp, Glycine max
  Clone ID: 701130259H1
tgcagtccaacccttccgacgatttcatgagcctccctctcgaggaaaatatatttgagtggcaatttgcgattagagggcctcgtgatacggaatttgagggtggtatttatcatggaaggatccagttgccttcagagtatccattcaaacccccttcattcatgttgttgacacctaatggtcgtttcgagactcaaaccaagatttgcttgagcatatcaaatcatcaccctgagcattggcaaccatcatggagcgtgaggactg

SEQ ID NO: 45380 - DNA, 271 bp, Glycine max
  unsure (1)..(271): unsure at all n locations; Clone ID: 701130260H1
cttccttcgtttccaagtcagcgttaagggtttagtttggcgcntgcgatgaagatcgaggaattggacgatggagagtgtagtagggaccatgaagagaagtttgagaggcagattgtgagcgttgatgccaagagagcgttggttggagcaggtgctcggatcctgttctatcccacactcttgtataatgtgcttcgtaacaagattgaagctgagttcaggtggtgggatcaaattgacgagtttttgttactgggcgctgttccgt

SEQ ID NO: 45381 - DNA, 252 bp, Glycine max
  unsure (1)..(252): unsure at all n locations; Clone ID: 701130261H1
atcttaatttgttttttggtganggctattgaatatatttggaaaaatagaaactgcaggattttcgaaaatagagtggcaggggtggtggagactctttgagcattgtgcagaataggaggcttcaattgtctccttcgatggttccttgtgagttcccaaatcctataaaatccgatgataataaccatgcaaaatggagataagtaaatccgtccttgttccggccagttgccatccctggccccaacc

SEQ ID NO: 45382 - DNA, 274 bp, Glycine max
  Clone ID: 701130262H1
gtttatcgtgaggagaatatgaagttgtttgttttctttgttgctgcagtagttttggtagcatggccatgccatggcgcaggctaccaaaggttccctctccgaatgaaaactggctatggtgagcgttcttcggaggtaaaatgcgcaagttttaggcttgctgtggaagcacacaacatccgagcctttaaaaccattcctgaagagtgcgttgaaccaacaaaggactacattaatggcgaacaatttagatcagactctaaaacagtta

SEQ ID NO: 45383 - DNA, 282 bp, Glycine max
  unsure (1)..(282): unsure at all n locations; Clone ID: 701130264H1
gcagcctccanttcgtgccactctcttcaaaatggccgttaccttctcaaatctccacacagaatcaggtctccaagtccctcgacgacttcctctctgggaaggtntacgtttctggggatcagttcacaaaggacgacatcanagtgtatggtgctgttttggagaagccaggtgactcttttcccaatgctgccaagtggtacgaggttgtctcatctcagcttggctggcaagctttccccggcaatgctcaaggggtgagattcagtggcaaagctt

SEQ ID NO: 45384 - DNA, 275 bp, Glycine max
  Clone ID: 701130265H1
ctgaaatgtgagtattgtgtgccatctccacatagctggactgaagacaatatttcgtgtgcttttgacaataagttatacaagatatatgttcctcatacagaggaaagtctctttgggcctgcatttattgaggtggagaatgaatctggtttatcaaacttcatcctgtactcattggggacaaagaaatttgtactgaaatgaagacactgcagcaaaaattagatgtttctctcctttctaaacaattcccagtctgcatctggtggttc

SEQ ID NO: 45385 - DNA, 272 bp, Glycine max
  Clone ID: 701130266H1
ggaatccagcattgagcatcctgtaaatggacagatgcttgagggaaaacatccttcaatgcctgatttcgaaggaaaacctttctttggttctgctggagtaaggctcagtgctcccttcaacatccgtaatcaggagcagaacgcccaatccaggatgttaggcaagtctgagaaaaatggtttgaaacaagtggaattgaattctttaccctcaagtaatcaaaataataatggtctggttgcaaagtttacaagtcatgctcctgcag

SEQ ID NO: 45386 - DNA, 271 bp, Glycine max
  Clone ID: 701130267H1
aagcccacaaagcccggcttggaggagccccaggagcagatccacaagataaggatcaccctttcctccaagcacgtcaaaaacctcgagaaggtttgtgcggacttggttcgcggtgcaaaggacaagcgcctcagggttaagggacctgtcaggatgcccactaaggttcttctcatcactaccaggaagtccccttgtggtgaaggtaccaacacatgggacagatttgaacttcgtgtgcacaagagagtgattgacctctacagtt

SEQ ID NO: 45387 - DNA, 270 bp, Glycine max
  Clone ID: 701130268H1
ggaacatggtaaaattatcataaatgctttgattgatatagtagacatcgtcatgaagaatttagaggctgatgttgttaaaagattggattttggtgatcttgagggctgcatatgagttttactattggtatgcaagaatcaatgggttttgtattcggaagagtaaaactgaaaaataaagtgtgaaataacacagcaaaccttgtttgttctagagaaggtcgaagagaagataggggattgacaagtgaaacaagaaagcgtgac

SEQ ID NO: 45388 - DNA, 270 bp, Glycine max
  Clone ID: 701130269H1
cagaaaaataagatcactatcaccaatgacaagggtagattgtcaaaggaagatattgagaagatggttcaagaggctgagaagtacaagtctgaggatgaagagcacaagaagaaggttgaggccaaaaacgctttggaaaactatgcatacaacatgaggaacaccgtgaaggatgacaagattggtgagaaacttgacccggctgacaagaagaagattgaggatgcaattgagcaagcaatccagtggttagacagcaaccagctt

SEQ ID NO: 45389 - DNA, 267 bp, Glycine max
  unsure (1)..(267): unsure at all n locations; Clone ID: 701130270H1
gcgagcaccaccaccgcgaccggcgagcccagccaccgtgttcgacttcgaattgagtccgagaaggctgttagataggctttggangtttaaacaattccgatcaagatccaattttgccttcccattttctcgtcgttttttttgtaacggtctttccatggcatatcccttctctgntttcaagtactcagatggcctcagtgtagtgggtatctccttctgcacagctattntctgtgaggctatctcatgggttcttatcta

SEQ ID NO: 45390 - DNA, 70 bp, Glycine max
  Clone ID: 701130272H1
gctgtctctcccatcctttcgccattctccaatacccttttgatttgtgaaaggaaagcaaacatggttg

SEQ ID NO: 45391 - DNA, 268 bp, Glycine max
  Clone ID: 701130273H1
gggagggagtgaagcttctctcttcttcctcggagtctccggtgagggatccatagtttcaagtgcttctctgtgtctgacctcaagaagaaggtgatggcagggctgtgtaaaacttgcgacaaggaagggcaatggagatacttggtgttgggtgaagcatgctgccacctaggcctaatggaggatgcaatggttcttcttcaaacagggaaacgcattgcaagcgcggcattccggcgcgagagtgtgtgctggtctgaagaca

SEQ ID NO: 45392 - DNA, 268 bp, Glycine max
  Clone ID: 701130274H1
ctcccagggctgtctttcccagtattgttggccgacctcgacacactggtgttatggttgggatgggtcaaaaggatgcctatgttggtgatgaagcccaatcaaaaagaggtattcttactctcaagtatcccattgagcatggtatagtcagcaactgggatgacatggaaaagatctggcatcacacattttataatgaacttcgtgttgctcctgaggagcacccagtgcttctcactgaggctcctctcaacccaaaggccaa

SEQ ID NO: 45393 - DNA, 266 bp, Glycine max
  unsure (1)..(266): unsure at all n locations; Clone ID: 701130275H1
tttttcatttgcagcatcaaaatgagtggtagcaacgatggnagcggcagtggagctctaggtttttgaaggtggctagtgcagctgccgctacanccgccgttgccggcggtttatatgccattctttcatcctcaacctctgctagctctgagatggaagtgccgtttggcagcgcacggcgtgagagcaaagaacgtgacgatggtggctccgggtctcatcctcgcgagggtgccaccacggtcagtcgttggaagaaacct

SEQ ID NO: 45394 - DNA, 271 bp, Glycine max
  Clone ID: 701130277H1
cagggctcaaatataacaaaacattaaggttcaataccttaactttccttcatatcctcaaactgatgcacacatatgtgcctactctatagtattcacaatatcataataatttgcttctatctgcagtgaaaatgacgcagaatgcaatagtgtccaagacaaaatccgggatcaagggggacatagccgtggcacagaagccactggcggcgcctccgccgccggggtacattcccattccgaggaggagggttttgaagaacctcga

SEQ ID NO: 45395 - DNA, 273 bp, Glycine max
  unsure (1)..(273): unsure at all n locations; Clone ID: 701130278H1
gttttgccctaacctaaacctcaagcattggcaggcagtggaaatggagcagcggttagcaaacacatggagaatgcctcttaacgacaagaaattcatagaaactgctctcctttccgacctccgactcgacggccgtcgcccctccgactaccgcaagctcaccgtcaagctggccaagcaagacggctccgcggaggttcatttgggccaaacnanacgttatgaccttcgtcaccgcccaatcgtccgcccctaccgagaccgccccaa

SEQ ID NO: 45396 - DNA, 273 bp, Glycine max
  Clone ID: 701130279H1
gtgagatccaagctttgacagaaatccgacatcgtaacattgtaaagttacatgggttttgttcacattcacaatactcatttttggtgtgtgaattcctggagaagggcgatgtcaagaagattttaaaggatgatgaacaagcaattgcattagattggaataaaagggtggatattgttaaaggtgtagcaaatgctttatgctatatgcaccatgattgctcacctccaatcgttcatcgtgatatttcaagcaagaacgttcttttgg

SEQ ID NO: 45397 - DNA, 251 bp, Glycine max
  unsure (1)..(251): unsure at all n locations; Clone ID: 701130280H1
ggntcgagggaagctctagcttanggtagcganntncantggcganaggattanngaanntctacgngaggctnnatgccccaaagcattggatgcttgacaaactgggtggtgcatttgctcctaagcnctcattctggaccacacaaatcgagggaatggcctgccactcatactccattttgcganaccggctgaagtatgctctaaacataccgtgantcattggctatttctgatgnagcgacatg

SEQ ID NO: 45398 - DNA, 229 bp, Glycine max
  unsure (1)..(229): unsure at all n locations; Clone ID: 701130282H1
aatggctgggcttcgtggcggccgtgtggattcaatgcatctccggcaacaactacactttctcaaactactccgacgccctcaaatccctcatgcacctcactcagctccaantcaacaacctctccgtncgctaaagangttggcaaagcctttgggcttctggcgggcctcgcctccgaccgcttccccacttgggctattctcctcattggctccgtcgaaggct

SEQ ID NO: 45399 - DNA, 257 bp, Glycine max
  unsure (1)..(257): unsure at all n locations; Clone ID: 701130285H1
atcgagtttctttctcttctcttcctgcaaattcaaaacccaatctcaatnttttcctttcgttccatttccttcatttgaaattgaccacacccacgcagatcccaaatttccaactcgtaaattatccgccttttttcccattccgaggaaagaagccaatccacgaccgatccaatgccgctttgaatcgcgtgccgtcctccttccctgggaacatctttttgctttttgaattcgatatttggagcagttgg

SEQ ID NO: 45400 - DNA, 263 bp, Glycine max
  Clone ID: 701130287H1
ctgagcttgagggcaagacagttggtctgtatttctgcgtgaagtcattcggatcatgcagtgactttaccccaaagcttgtggaggtttatgagaagctgaaggcccagggggagaactttgaggttgtgctgatacccctagatgatgatgaagagtcattcaaggaactattagaaagtgtgccttggttatccttgccttcaaggacaaaatctgtgggaagctagctcggtacttcgagctttcaaccctccccactt

SEQ ID NO: 45401 - DNA, 262 bp, Glycine max
  unsure (1)..(262): unsure at all n locations; Clone ID: 701130288H1
ttccccttctccttacttctcactctctttccaaaacactccanttctctttccccttacccttcttctgtgtgtgatgatgtagatagagaataaaaagagaccagtgtgcagtgagaaagaggttggtcacttcttgtgtggctttgttttgttcttgtgttggaatttgttgatgggtgaagagggagaagaggtgtnaagagataaggaacagcaacacatgggagtttatggaaatgagtggttgtttagtagttnc

SEQ ID NO: 45402 - DNA, 194 bp, Glycine max
  Clone ID: 701130289H1
tgctgacagtgccctagatcgcttgtggcagaagaagaaagttgaagttaagcaacagtagacacccatgatagtttgttactttgctatgtattaatttctacgcttgctagagatatttgagtactatgattgtcgtcttgagcaaatactcattctaaattttcgttggtatttggtaccgccagctaaat

SEQ ID NO: 45403 - DNA, 266 bp, Glycine max
  unsure (1)..(266): unsure at all n locations; Clone ID: 701130290H1
ggtgtacgtcaaggctcagaaatcaaaagcctacttcaagannatatcaagtcaagttcaagagaagaagagagggaaaaaccgattaccgtgccaggattcggttgattaatcaggacaagaacaaatataacactccgaaataccgatttgttgttcgctttagcaacaaggacattgttgcacaaataatatctgctagcattgctggcgatattgttcttgctgcagcatatgcacatgagctgccacgatatggtctgaag

SEQ ID NO: 45404 - DNA, 266 bp, Glycine max
  Clone ID: 701130291H1
gctgcattgaaatccaccactagtgtttgtgcacttgtgcagagaagccatggcctcctcccaatgaggtgcttctccactgaggcagaacagccacctctgaattcaacgccccgccctcctccgttctttgagactgaccattcaggtttgacatatggtaatctgctcggcgttcgtaaacatgcactgaaaacagatatcatcaactttcttgaaggttgtaatttgactctggaggatgttaaaatggattacgaccgcag

SEQ ID NO: 45405 - DNA, 268 bp, Glycine max
  Clone ID: 701130292H1
attggcaccgccactcctcccaactgcgtggatcagagtacctatcctgactattatttccgcatcaccaacagcgagcacatgaccgagctcaaagaaaaattcaaacgcatgtgtgataagtcgatgattaagaagcgatacatgtacttaaacgaagagatcctgaaggagaatcccagtgtttgtgcatatatggcaccttcgttggatgcaaggcaagacatggtggttatggaggtaccaaagttgggaaaagaggctgcaa

SEQ ID NO: 45406 - DNA, 270 bp, Glycine max
  Clone ID: 701130293H1
gcttcaagtcaggaggaggtgacccttttgggagctactggaagcccatttgtgtgcagggttcatattgccctcaagttgaagggagttcaatacaaatatgtcgaagaaaatttgaggaacaagagtgaactgcttctcaaatccaacccagttcacaagaaggttccagtgtttattcacaatgagaagcccatagcagagtctcttgtgattgttgaatacattgatgagacatggaagaacaaccccatcttgccttctgatcct

SEQ ID NO: 45407 - DNA, 246 bp, Glycine max
  unsure (1)..(246): unsure at all n locations; Clone ID: 701130294H1
gaaggaaggaatcgcaagtngtangtcccgcaggtgcaaacgacctgtcttcatagcnnaacaacctcaaaaacattcaacaacgttcactattaattcatcataaaataaaaacaagtttcgattttttatcttagttttgtttctgatccattcatggaggtgccgagttcctgggatgctctcgcaaacaggcgagaaaacttgaagctcagttggatgagcagatgattcttatcgtaantg

SEQ ID NO: 45408 - DNA, 272 bp, Glycine max
  unsure (1)..(272): unsure at all n locations; Clone ID: 701130296H1
ttccccttctccttacttctcactctctttccaaaacactccanttctctttccccttacccttcttctgtgtgtgatgatgtagatagagaataaaaagagaccagtgtgcagtgagaaagaggttggtcacttcttgtgtggctttgtnttgttctttgtgttggaatttgttgatgggtgaagagggagaagaggtgtcaagagataaggnacagcaacacatgggagtttatggaaatgagtggttgtttagtagtttctgtgncaaa

SEQ ID NO: 45409 - DNA, 266 bp, Glycine max
  unsure (1)..(266): unsure at all n locations; Clone ID: 701130301H1
ctttctaccacagagactagtgatcgattaagcaacttaacacanaattgcatatatgggaaacacttgtgcaccaactcaatacgcaagcaaaggcggaaaccatagttggcaatccacggtgaacatagttcacttagatggaaagttgcaacaattgaaggagtcaattaaggcatggaaagtgttgtctgagaacccaaactgctacatatgctgctcagaatccatgtatgttgggtcaccgatgcctcctttggctccaa

SEQ ID NO: 45410 - DNA, 262 bp, Glycine max
  unsure (1)..(262): unsure at all n locations; Clone ID: 701130302H1
cacaaatcntctttttaanattnatcancgtatctgaaactaccaactancgatggccccttcattcgacacaagtactcacacggtatgcgtgatggatgcttcgggtcacttgggcttcagccttgtccaaagactcctccaaagggganacactgttcatgcctccgttcaaaaatatggggaagaaaacctattcactggaatttcatccgatcccgataagcttaaggtttttcgatctgacccatttgattaccat

SEQ ID NO: 45411 - DNA, 259 bp, Glycine max
  unsure (1)..(259): unsure at all n locations; Clone ID: 701130303H1
cttatcctgtttctttcaatggaagtcanttctgcttctagcttnaatcccaacgctccgatgttcgtnccantcgcctatcggacggtggaggatttctccgaccagtggtggganctcgttcantcctccccctggttccgcgantantggctccgcgagtgcttccaaganccccagttccaaaangangacgctttcgacttcgactttgacctagatctccaagatgaagatgaaagggaacgaaaggnaggga

SEQ ID NO: 45412 - DNA, 256 bp, Glycine max
  unsure (1)..(256): unsure at all n locations; Clone ID: 701130305H1
ttggaaactcttcaatgaagccccttctttggttgaagaaggtgtggttgnatttgtcacccancaaactgctttggtggtacggctgagccctacgttgcaagtttatgctcagctctctaggccagatggagttcgggaggnttccatgccananactgcatggaaatacatgacacaaatangtagttctactgaaaanatgtctgcagaagctgttgaaagagnttcattgcttgcaattgcttgggaacgg

SEQ ID NO: 45413 - DNA, 245 bp, Glycine max
  unsure (1)..(245): unsure at all n locations; Clone ID: 701130306H1
ctccgcaccagtttcaccgcacgaatatcttgttgtttggagcgatccgagaaacactctgtaaacatgttggtttaccaggacctccttacaggtgatgagcttctctctgactccttccgttacaaggaaattgagaatggaatgctgtgggaagttgaggggaagtgggttgttaaaggagcagttgatgtagacattggtgcaaacccttctgctgagggtggagagagntgaggatttga

SEQ ID NO: 45414 - DNA, 256 bp, Glycine max
  Clone ID: 701130307H1
tacggttgggttggagagaaaatgcgtccctgctgaaaacaccaaaccctaaaacgcgaaaagggttctaagaatttgcgaaggaaagagctagcggagatggagattcactacagtaacagctatttcgagaggcgccccatcctcaagtccaaggctgccgctgtcaaatgggtcaaagaatgggttccccaagatcttgtgacaacaggagggaagtgcatgatcttaaaatgggtaacagaggataccttga

SEQ ID NO: 45415 - DNA, 257 bp, Glycine max
  Clone ID: 701130308H1
gctccaacacaggggaaaatgagggagatccttcacgtgcagggagggcaatgcgggaaccagatcggttccaagttctgggaagtggtgtgcgacgagcacggcatagatccgacggggaagtacgtcggaaactcagatctgcaactcgagcgcgtgaacgtctactacaatgaagcctcgtgcgggcgcttcgtgccacgcgcggtgctgatggacctggagcccggaaccatggacagcgtgcggaccgggcc

SEQ ID NO: 45416 - DNA, 257 bp, Glycine max
  unsure (1)..(257): unsure at all n locations; Clone ID: 701130310H1
cggggcgtgcgttcaaaacgtgctcgattccctggtaaccgcattgctggcagataagaatcgcaagttcananatgttgaanaggcatttttccagcgatggtggagggagcaaagtgatganatccagaananagtcaaggagctggtcaactctggtcaattggagttcanaaatggtggtttttgtatgcangatgaggctgctactcannacattgacatgantgatcagacaactcttggacancaattta

SEQ ID NO: 45417 - DNA, 257 bp, Glycine max
  unsure (1)..(257): unsure at all n locations; Clone ID: 701130312H1
ctcatatgcttgtctcaaagatnaagccatgcatgtgnaagtatgaactaattcagactgtgaaactgcgaatggctcattaaatcagttatagtttgtttgatggtatcnactactcggataaccgnagtaattctagagctaatacgtgcaanaaaccccgacttctggaagggatgcatttattagataaaaggtcaanacaggctctgcctgttgctttgatgattcatgataactcgtcggatcgcacggcc

SEQ ID NO: 45418 - DNA, 254 bp, Glycine max
  unsure (1)..(254): unsure at all n locations; Clone ID: 701130313H1
tcccttgacctgaanatctttttcgggattttggattgttttggggcactctgtgtctgtcttcgtggctggatttcgtagtgtttagggatttnatttttctgcttgttttcantantgtnaanatggtgccctctgattgaaacgtagttgatatattctnannaacnanttgganatcantcttcatgtcaaggggtttgatccttgcaccanaacttgtttggattcccagtttnagatggtttttcaat

SEQ ID NO: 45419 - DNA, 256 bp, Glycine max
  unsure (1)..(256): unsure at all n locations; Clone ID: 701130314H1
gcagtgataganagctagctcgctagctagggttagggttagggttagggtttctgcgtttatgcgaagatgactaagttcaggaaattgggtcgacncaccggtcaccgaatgtccatgctcagaaccatggtctcgcagttggtgaagcacgagcgcatcgaaactactgtcgccaaggcgaaagagatcagaagactcgcggataatatggtgcagcttggaaaggagggatcccaanatgctgcgagacgtg

SEQ ID NO: 45420 - DNA, 260 bp, Glycine max
  unsure (1)..(260): unsure at all n locations; Clone ID: 701130315H1
aaaaaaanaagagaaaaaaaaatgattttctgtggcaanagcactgaagagagtgaactgcatcatgctncaaattcatttgtacaaacacgtatacaactttgtgagttccatggctcttaagtctgctatggaattaggcatagcagacgtaatccatagccacggaaaacccatgactatttccgagttatcctcagctctcaaattgcacccttcaaaagtgagtgtcctccaacgctttctccgccttttaacgc

SEQ ID NO: 45421 - DNA, 260 bp, Glycine max
  Clone ID: 701130316H1
gaggcaacaattgtttgagtccaagaagtagaggcgcgaggctttgtcctatgcaaggaggttccaggaagcagtggtggtggttgtaccaccgtgagcagtgaagaaagagtgcttgggaagtgggacccactcaaaagagagagtgaagatcatggcctcatctagctactctaactctccctatgatgcctgcaagttcttgagaagaaaatgcatgctggattgcattttctccccgtatttccctccaaaagagc

SEQ ID NO: 45422 - DNA, 256 bp, Glycine max
  unsure (1)..(256): unsure at all n locations; Clone ID: 701130319H1
tgcnattgacacaagggtgtgttgttttgttttnatcatcattgagaactaattaaggtacgtgtaaatgggtaagaagcttgatgctctccttggtagaaccttcaaggctgcaaagttcaaggctattgtnaaccttgccatctcgcgccttgccgttctcaagaaccagcgccaggctcgccttaganaggcccgttctgatatccttgaactcctccaaattggtcaccttgaacgtgcttcgcttcgagtt

SEQ ID NO: 45423 - DNA, 256 bp, Glycine max
  unsure (1)..(256): unsure at all n locations; Clone ID: 701130320H1
cgnagaaattgccaccggaagcacgtcgaaganggtgaancaaacanaaaattccatccancacttctctntncaanccccaactcaaatctgtgaagaaaanctcaattnctaaattgnaattcttagcacnantgctagtagnagtaaaaaaaaacaatnagaaagtagtagagtgtttttttttctttttttcgtttgtttnacttttaagatgggtgagaagagcaacgttggcggcgacgcgattaacacg

SEQ ID NO: 45424 - DNA, 258 bp, Glycine max
  unsure (1)..(258): unsure at all n locations; Clone ID: 701130321H1
ctcanagancccaaaaccccgnaaanccaaactcaaaaccccttcttctccagnccccaanagcaanaanaancccttctccttctggttctanttcaccctctccgtctccctcctcactctcttctttgtcttgacctccagcctctncccccaagancccaagacctggttcctcancctccctccccccctccgcnannantantccaacggccgcacnatcaaggtcnaaananattccaangaagcccccat

SEQ ID NO: 45425 - DNA, 256 bp, Glycine max
  unsure (1)..(256): unsure at all n locations; Clone ID: 701130323H1
gccgtcgcactttgcgttttctgcgtcatctccgattccccganaatggccanccaaatgagcaagaagagaaagttcgtagctgatggagtgttcttcgctgaactgaacgaggttctgacaagggagttagccgaggacggatactccggcgtggaagttagggttacgccgatgcgcaccgaaatcancatcagagccannagaacccaagccgttctcggtgagaagggaaggagaatcagggaacttacct

SEQ ID NO: 45426 - DNA, 257 bp, Glycine max
  unsure (1)..(257): unsure at all n locations; Clone ID: 701130324H1
cgaaggtggctttgcccctaacatccaggaaaacaaggaaggcttggaattgctgaaaactgccancgccaaagctggttacacaggcaaagttgtcattggaatggatgttgcagcttctgaattctacaaggaagacaaaacatacgatttgaacttcaaggaagataacaatgatggctcccagaggatctctgggagatgctttgaaagatctgtacaagtcatttgtgtcagagtacccaattgtttcaatt

SEQ ID NO: 45427 - DNA, 253 bp, Glycine max
  unsure (1)..(253): unsure at all n locations; Clone ID: 701130325H1
tggcgtgcagaggctcggggagggagtgctgagggggccnctgcagaagatggtggtttcgcgcgacggcaagtngctcgcgtcgttnantcacgacgggaggctcttggtgacgacttcngacttgactggagttatcatcgagagggagtgtgagtcagctcttcctccgcagcagattgcttggtgtggaancgatgctgtgctgctgnactgggatgatatgctttnaatgatgagtcctgagggagag

SEQ ID NO: 45428 - DNA, 256 bp, Glycine max
  unsure (1)..(256): unsure at all n locations; Clone ID: 701130326H1
cgcaaatctcagnactaaatcttagacatgaaactccgtatcacgtnatgttccaagctttnagtanacttatggacttaaagcaatcaatcggttgacttcacgctcctacccctgttgatttttgtganactgnattgtttagagagaaatcaatgtcattttttggtgatcaataaaannanaaaagcaaagcttcttctggactagtggcgctttcagtggaatcaagatttcctcacctgccctanagaag

SEQ ID NO: 45429 - DNA, 254 bp, Glycine max
  unsure (1)..(254): unsure at all n locations; Clone ID: 701130327H1
attgagaggtccanaaaccttgactggtacaagggtccaactctgcttgatgcacttgaccagattagtgagcccaagaggccctctgacaagcccctcaggcttccccttcaggatgtgnanaagattggaggtattggaactgtgccagtgggacgtgttgagaccggtgtcttgaagcctggaatggtggtgacttttgcaccaactggactgacaactgaagtcaagtctgtggagatgcaccatgaatc

SEQ ID NO: 45430 - DNA, 255 bp, Glycine max
  unsure (1)..(255): unsure at all n locations; Clone ID: 701130328H1
ccctaatgtcaagacganttcacttagaagtttgattgaccgctccattattgagagttttggggagaaagggagaatttgtattaccagtagagtttatccctcgttggctantgacaaagatgcacatcttnatgttttcaacaatggaagccagagtgtggtgatctctgaactgaatgcttggagcatgaaggaagcagaatttagnnaagaagaaagcacaattaagctgnaactaaaaagattnggata

SEQ ID NO: 45431 - DNA, 255 bp, Glycine max
  unsure (1)..(255): unsure at all n locations; Clone ID: 701130329H1
cnctctttcctcccttccttccctctcaacttcattttcctttcaaatagnaanactagagaacaaaagctctggctagaacttgtaatgtanatgcaagccancatcanncagaanaatnagtgcatcatcctccttcaactgaagaactttanntaatttgctcctaaaatatnntgtcagaggatgtggtgcagnaatcctttgccannccttcttnannttnaagctnanagcatctgcaancanctctna

SEQ ID NO: 45432 - DNA, 256 bp, Glycine max
  unsure (1)..(256): unsure at all n locations; Clone ID: 701130330H1
cggagagtcctcttnattttgctgaaaggttgacggagcattacaagaggcctaatggtgaaggacctcacattnatctgaagagggaagatctcaatcacactggggctcacaaaatnaanaatgctgttgctcaagctttgcttgctaagagattgggcaaaaaacgcantattgctgaaactggagcgggtcagcatggagttgccactgctactgtatgtgctcgatttggtttagaatgcattatnnatat

SEQ ID NO: 45433 - DNA, 259 bp, Glycine max
  unsure (1)..(259): unsure at all n locations; Clone ID: 701130332H1
cggttattagggttttagagatgaaatgaganggagaatggcatcgtcggcatttatggtgatctgcatcctgcactcggtgatagcaatgacatgtggggccctgatgatgttctanatgaaggaggtctacaccttcggccacggtgtgcaggccgccancaagctcttgggatccacgccgcacgaccagcttctcatcaagacctccgattccttctccggcttgctcctcgtcgccattggcttcctcctcttc

SEQ ID NO: 45434 - DNA, 258 bp, Glycine max
  unsure (1)..(258): unsure at all n locations; Clone ID: 701130333H1
angtccctccttcctctgccttataattcttgtgacccttttngctggtagcattgaaagngcaccagcaaacgtgaagccaagccattatgctgcacccttcaataggagtgtttttccttctggttttctatttggaataggctctgcagcttaccagatagaaggagcngcagctatagatggcagaggaccaagtatatgggacacctatactaaacagcaaccagggaagatttgggatcatagtgatggaag

SEQ ID NO: 45435 - DNA, 258 bp, Glycine max
  unsure (1)..(258): unsure at all n locations; Clone ID: 701130334H1
anagaggaaaagggtcattagagaacttgttcagggtcgagattatgccactcagctcaagtttctgcttcagaagcctattggccctgacgggtctgtttcagccaaggaacttgtggccaatgtgctgagatctttcactgaaactctctctgtgttgacttcttccgaggttgcaataagtngtgatcatcatcgtgacgaagttgctcagaatcttgtaatttccggagaagatgcctcgcaggtggaaagcat

SEQ ID NO: 45436 - DNA, 255 bp, Glycine max
  Clone ID: 701130335H1
attggtaaagctagaactagaaattgcaatgaagaagaggagctgcagcagtagtagttcagtttttgaggaggcgaatggagtggaggatgaggccgaacctcaacaaccttcatcttgtgcagcagcagcacttgatgagttgcataaagagaaaaatgagaatggagaagaaaccctcgtgcctcccaatcccaatcttgacgatggcttctatgaaatcgaaacaatacgccgtaagaggctacgcaaggg

SEQ ID NO: 45437 - DNA, 254 bp, Glycine max
  unsure (1)..(254): unsure at all n locations; Clone ID: 701130336H1
caaacnagcaggatgatagtgcctccantaaacacgaaagtcgcaaagagacagtgatcttctcgttcttgtctgaagaagtcgatcatctcccaccgaagaaanagagcagaactgaactagcattgaccaaaaagaaaaatgtgcgctttgagagcgttgactaggtccgtatgcaanagcagctcctatgtnaaaacttccaaacccnatctcantctcaatctcancanccancagcannagacccgtag

SEQ ID NO: 45438 - DNA, 235 bp, Glycine max
  unsure (1)..(235): unsure at all n locations; Clone ID: 701130338H1
ctaccaccttgattcactcattgtggattgaacaataaatttncantacttacanactggaaaccttcagtaagatggtttgcagaaagttcttcttgtttatagtgtgatttagtgatgttagataattcaagtgaaggattggtaggcccantagtatgacaccgggggggtgggtgtagtattttgtnactccaatatggatgtttatctgagtgtccananattgtctgta

SEQ ID NO: 45439 - DNA, 251 bp, Glycine max
  unsure (1)..(251): unsure at all n locations; Clone ID: 701130339H1
tatttccctacctctcccttcaagatgcagatcttcgtcaagaccctcaccggcaagaccatcacccttgaggtggaaagctctgacaccatcgacaacgtcaaggccaagatccaggacaaggaaggaatccccccggaccagcaacgtctcattttcgccggaaagcaacttgaggacggncgtaccttggttgattanaantttcagaaggagantactctgaacttggtcttccgttccgnggtgga

SEQ ID NO: 45440 - DNA, 84 bp, Glycine max
  unsure (1)..(84): unsure at all n locations; Clone ID: 701130340H1
aagaagttgatcagttccttgtctctccttgaannanaaaancanncanagtcttgaanccaatttcantctttgcanctcaaa

SEQ ID NO: 45441 - DNA, 254 bp, Glycine max
  unsure (1)..(254): unsure at all n locations; Clone ID: 701130341H1
ccagagattccgtgagttgcaaaaatgaaaacaattctttctgcagagaccangaacatcccggacggcgtgagcgtncaaggttaatgccaaggtcatcgaagttgagggcccccgcggaaaattggtgcgagacttcaagcacttgaatctcgattttcagctcatcactgacgaaaacggnaaaaggaagctgaaggtggaggcctggttcggttctcggaaaacatccgccgccattcgcaccgccctga

SEQ ID NO: 45442 - DNA, 255 bp, Glycine max
  unsure (1)..(255): unsure at all n locations; Clone ID: 701130342H1
cccanctgtgcactccaatnctcanaagaaggtcctggaaatgagatgcaggggcagtganaaatccggttttgcaatcaattcagctgcctcacccgaaactcantccaaacannaanagcagcctgcccctggagtacatgtgatgtgaaggagtgatccttgttggaaatttcnctttcantgctgccctctagagtccatgnctgaaggnanttcttaannganannncatttctttggtncatggttttt

SEQ ID NO: 45443 - DNA, 258 bp, Glycine max
  unsure (1)..(258): unsure at all n locations; Clone ID: 701130344H1
cgcgagccgngattccgccggaacaacgcgncggaatccgccggaantggaaatctccggggactantccgagctcggggnccnctttccgacncagcagcgatgatgaccgaccctttactnaggttctcgtatcggagctggaacagatgatggtgatgcttnaanaacggaaanagatccagaggtttncgncctcnagnagaattnctgccagaaagaanaaanatcgnacgagcagcancaaantgnntgggg

SEQ ID NO: 45444 - DNA, 253 bp, Glycine max
  unsure (1)..(253): unsure at all n locations; Clone ID: 701130345H1
agaaggcccagcaaccanccttgccantggaactgcaaacccaccaaaccgtgttgancagagcacctatcctgattacnacttcagaatcaccaacagtgaccacatgaccgagctcaaagagaaatttcagcgcatgtgtgacaagtctangatcaagacgagananangtacctaaacgaagagatcttgaaagagaatccaaacatgtgtgcttacatggcaccttctttggatgctaggcaagacatg

SEQ ID NO: 45445 - DNA, 251 bp, Glycine max
  unsure (1)..(251): unsure at all n locations; Clone ID: 701130346H1
gttgatgaagaaaatccaagatgatcaattcttagaccttctaactgttaaaacagaagttcgtgctgtatgtaaagagccttacagtatctanaaagctgttctcaaatcaaaaagtncaatcaatgagattaaccaaattgcacagcttcgtattattatnaaaccgaagcaatgcattggggttgggcctttatgcaatccacagcagatttgctatcatgttctggggttgatccatggaatctgga

SEQ ID NO: 45446 - DNA, 255 bp, Glycine max
  unsure (1)..(255): unsure at all n locations; Clone ID: 701130347H1
agaaagnaggaanagaagagaggtctgannaatagttttctctgtgaaatcgcaaagaaacagtgacacttattagcaccgtcaactctgcaatcaccgattccgaccatgctgcccctttcccttctcaagactgcccaaggccancctatgctagtggaactgaaaaatggggagacttataacgggcacttggttaattgtganacatggatgaacattcatctccgagaagtcatntgtacctctaaagat

SEQ ID NO: 45447 - DNA, 255 bp, Glycine max
  unsure (1)..(255): unsure at all n locations; Clone ID: 701130349H1
tcgggactgtttacaagggcgtgttgccaganagcggcgacattgttgcggtgaagaggtgtaaccatagtggtcaggggaagaatgagtttttgtctgagttgtctataattggaagtctaaggcataggaatttggttcaccttcaaggttggtgccatgagaaaggtgagattttgttggtgtatgacttgatgccaaatgggagtctagataaggccttgtatgagtctagaatggctctgtcttggcctc

SEQ ID NO: 45448 - DNA, 254 bp, Glycine max
  unsure (1)..(254): unsure at all n locations; Clone ID: 701130350H1
cgaattggtcataattcataatcgagaaatcattctctcaatcagacgcaagcagcgaggtanttctcacccaattaaaaaaagagaccggaaataatgacaacgtggttcaatcttatcctantctcttgacatattcgaggttaagnanacanagcaanatnactcactaacaggtcanatanactaagtcaaagtggcatatatgctttaacttgcctctatgtgttgacaagcgaaatcaaactcatnaa

SEQ ID NO: 45449 - DNA, 232 bp, Glycine max
  unsure (1)..(232): unsure at all n locations; Clone ID: 701130351H1
tgaaaacattactgcttctccttacntgtgaaactcttctgantatgcagtgattggtgctcctcaaacttgtcctgctaacaatgaggataaatgcggcgattcagatgaatggaaaggggagtttttccctgacattcccaaaattaaatatgagggtccgtcaagtaagaatgtgctttcatttaaatggnataatgcagaggaggaaattcttgggaagaagatgaag

SEQ ID NO: 45450 - DNA, 251 bp, Glycine max
  unsure (1)..(251): unsure at all n locations; Clone ID: 701130352H1
cncgctcgatgggaattgcgcttcaaggcgtctcgtagggcnaatccgcctcacgagggtcaccaacggcacgtncctttngngggccgaggcnccctactgctggtcggnaaacggacggnnggcgcacgcgtcgcttctagcccggnttctnacttagaggcgttcagtcataanccaacgcacggtagcttcgcgnnantggcttttcaaccaagcgcgatgancaattgtgcgaatcaacggttcct

SEQ ID NO: 45451 - DNA, 248 bp, Glycine max
  unsure (1)..(248): unsure at all n locations; Clone ID: 701130354H1
tttctccgtcggcaaaccctaaagcccattcattttgttcgccggcgactaatttaccggcccggcccggcccgaaatattcgacccgaaccgcgcgtggttactgttttctctggagagagagagagaagggggtggtggtggaaatgtacaagaaccagcttcaagagctggcccagcggagtgcttcaacctgccttcgtacgcgtgcattcgagaaggtcccgatcacgcgccgaggttnaagg

SEQ ID NO: 45452 - DNA, 251 bp, Glycine max
  unsure (1)..(251): unsure at all n locations; Clone ID: 701130355H1
cggaagagctcattgagagcttcaaaaattcaggagtaaatctaattcagggagatatgaatgatcatgagagtctggttaatgcaatcaagcaagttgatgtcgtaatctgtgcatttggtagacnactaattgaagaccagttgaagatcattgcagcaataaaagaagctggaaacgtcaagagattttttccatctgaatttggattggatgtggatcgtcacgattcagttgacccagttagagaa

SEQ ID NO: 45453 - DNA, 184 bp, Glycine max
  unsure (1)..(184): unsure at all n locations; Clone ID: 701130358H1
atccaaactctccagtccacgcgctcancancgatccctcaaatcctcgctctcgaacttcgctctccgactcanccccctcaganctggttcgtcgcttggtccggcgccanttcctcttcttcttccgcnanagaggtttctcctcaatttgcggagtgtgtttcgttgccgaatcatgcta

SEQ ID NO: 45454 - DNA, 251 bp, Glycine max
  unsure (1)..(251): unsure at all n locations; Clone ID: 701130359H1
acgcccccacacacagcctcagaaccgcagcacacatatattctcaggtttgatctgctgccactggcgtncggatctgctccgtcacagatttctgccgcctgcgatcctctactcaaataggnacgacctctcttccttttttttctctgnataatgctccgacactcggttctagctgccanaatcttcgaattccctcccagcaattgacactctgctgtggctttttcttgtttgcattcttagtc

SEQ ID NO: 45455 - DNA, 251 bp, Glycine max
  unsure (1)..(251): unsure at all n locations; Clone ID: 701130360H1
ttcgaatcgaaactcagaattagaaaaaaanacaaatcacaatcanaatggcaaggtacgaccgagcaatcaccgttttctcccccgacggccacctcttccaggtcgagtatgccctcgaagccgtccgcaagggcaacgccgccgtcggctancgcggcaccganaacgtcgtcctcggcgtcgagaagaaatccancgccaagctccaagactccaggtcggtgaggaagattgtgaatctgganaac

SEQ ID NO: 45456 - DNA, 251 bp, Glycine max
  unsure (1)..(251): unsure at all n locations; Clone ID: 701130361H1
gaagccancgctgagangtcggaggacttgtcngataggagagaaggngcgagcccntgagtgactnnccgctcacggcggcttctgcnacttcaaccgatccaggnngcncagaatcangtccgctgangccanggagactttggccaanaggcagaaagggaagaagctcnanagtgttgctcatcannaggcanggcctaanacgaggcgagaatatggatctgtgacgngattctgacacggggggt

SEQ ID NO: 45457 - DNA, 250 bp, Glycine max
  unsure (1)..(250): unsure at all n locations; Clone ID: 701130362H1
gcgaggagaaagatggaggggaaggagcaggatgtgtcgttgggagcgaacaagttccccgagagacagccaattgggacggcggcgcagagccaagacgacggcaaggactancaggagccggcgccggcgccgctggttgacccgacggagtttacgtcatggtcgttttacagagcagggatagcagagtttgtggccacttttctgtttctctanatcactgtcttaaccgttatgggagtcgccg

SEQ ID NO: 45458 - DNA, 254 bp, Glycine max
  unsure (1)..(254): unsure at all n locations; Clone ID: 701130364H1
cgcaaaccctaatttcggaaagatcggcgatggctgcctccaaggatcgcgagancttcgtctacatcgccaagctcgccgaacaggccgagcgatacgaagagatggtggaatcaatgaagaacgttgcgaatctcgacgttgaactgactgtggaggancggaattnactttctgttgggtacaagaatgtgattggtgctcggaganatcgtggaggatcctgtcttccantgagcaaaaggaagaaacaa

SEQ ID NO: 45459 - DNA, 254 bp, Glycine max
  unsure (1)..(254): unsure at all n locations; Clone ID: 701130365H1
agctcgtnctcancagtcancacgcaacgccccgtcattcccttcantgcgccaaccgtggttctcagcagcatcgccanccgctcttccccctcagnangtcgtgaatccangaatccgaactttggttgccatcgtcgtttgtngttncnggttcanacgcagganacgaggctctcgttgtgggttcccgtgataactgtcactggtnagcgtgaanatccatggtttctcgtacgggcgctctccgtccg

SEQ ID NO: 45460 - DNA, 232 bp, Glycine max
  unsure (1)..(232): unsure at all n locations; Clone ID: 701130366H1
aaaaggctcttctcctgtaagnggnaanccacgccaaaccnactgctcctanaggatcttcactttnaagcgataatccaanagaagcaactgctgctgccagtactgctanatctggaaaccgtgaagttaaggcttttgatgaatttgatcctcgtggtcctcctgtatcagctgccccagctcctgctaataatgttgaaatggacttgttcggctccctatcagagtt

SEQ ID NO: 45461 - DNA, 249 bp, Glycine max
  Clone ID: 701130368H1
ctgcactggggaaaaggggattggacgatctgggaaacctttacactacaaaggttctgtatttcatcgtattattccagaatttatgtgtcagggaggagatttcacaagagggaatgggaccgggggtgagtcaatctacggttccaaatttgaagatgagaatttcaatttgaggcataccggtcctggtattctctccatggcaaatgctggagctcatactaatggttctcagttcttcatatg

SEQ ID NO: 45462 - DNA, 246 bp, Glycine max
  unsure (1)..(246): unsure at all n locations; Clone ID: 701130369H1
gctcgagcttgaaaggttctgagtgagctacaggaanatagaanaaacatacatggggctgccnctactttcttctgcattangggatccttctcataactgtgtttcctccagtgtggagttnancaggccccttctatcagcttctaagtcatattctcttggtttgaagttnaactgccaacaattttgcaagggaagatcaaaattgccaggagtttnagtttgtgccagtcgaaggcccaa

SEQ ID NO: 45463 - DNA, 248 bp, Glycine max
  unsure (1)..(248): unsure at all n locations; Clone ID: 701130370H1
ccaaattgagtttgagtttcagccatggtatctgtttctctgctcttattcctatctttctttgccttctttgcaccctctgaatctcacgacaaagtctcgttggaattgnactacgaaagcttatgcccctanagcgccaacttcancgtgaatcanctcccaaaaatctncaccccagatcttgccccaatcgnncancncaaantcgttccttggggcaatgccaaactccgngccaacgccac

SEQ ID NO: 45464 - DNA, 227 bp, Glycine max
  unsure (1)..(227): unsure at all n locations; Clone ID: 701130371H1
gcttgttacatttgttatgccttgncanngctttagtaagncctgcaagcagaagatgcgtanaagtannacacatggacggtgacttatggaactanttctccattgggtagtccccagcaggttattctnatcaatggtcagtttcctgggcctagacttgacttggtgactaatgagaatgnaattctcaacctnatcaacaagctggacgagccatttttact

SEQ ID NO: 45465 - DNA, 223 bp, Glycine max
  unsure (1)..(223): unsure at all n locations; Clone ID: 701130372H1
aaaaaanactattgggtttgattgtatttttttgttaaattattagtggctttgattgtgaaatttcanttttccattgttttgttnantgttaaagatggnatttgaaattgattccgattcatgaatcggatgtagctctgcttcagtctaggaattnagnaattaattttgaccgaggaaggatttccccaagcgtgaccanatcatttgtagttggaaa

SEQ ID NO: 45466 - DNA, 248 bp, Glycine max
  Clone ID: 701130373H1
gcaggttgccagttaatcgtcttcttctctgcatccatcagatccaaagtttctcgcgatacgagggagcaatgtcagaggctaaggttcaggatttgaagaaggaagaggaggttgctgatgattctcctaagaacgaagttgacagtggaaaatctgtggatgatctgaaagattcggataacgataaaagcgatggaaacgccatgccctcatcccatcaggaggaagcagctgttaagaaaaag

SEQ ID NO: 45467 - DNA, 241 bp, Glycine max
  unsure (1)..(241): unsure at all n locations; Clone ID: 701130374H1
cacagattcagccaactcaaccagctccccagcctcaagaacacccttcttctncaacataacagattctcctcttcttcactccctacttccccagagaataaaaacattacccgtgttcccttgccaagtccctctcactctccaaacacctcacctcccccctctcctctcgccctcanaccttcccagtcgaggagcgagaccatgatacccgaccagcccgagcccaaaancgtgc

SEQ ID NO: 45468 - DNA, 249 bp, Glycine max
  Clone ID: 701130375H1
cgacagtggatcgactacaccaaatccctcttcctcgagagatcagaatggcgttgacttcaaaaaagttgatgctcatgtgcaccagttaaagggtagcagttcaagcataggtgcacaaagggtgaaaaatgcctgcattgctttccgcaacttctgtgaggagcagaacacagatgcgtgcgtcagatgtctgcaacaagtgaaacaagagtactgccttgtcaagaataagcttgaaacaatgtt

SEQ ID NO: 45469 - DNA, 248 bp, Glycine max
  unsure (1)..(248): unsure at all n locations; Clone ID: 701130376H1
cgcgaggtggtgtccattgcagttttctaatgaaaacaacaaaatagacacctgttaagaaggaggacaacgatggtgctgccgctatttactgctttcattctctttgctttnattccgaatggattgttagcagttccttccaccgtcccggcattcctttggtcatcacattatgaactggcctctgaaaatatattgaaggaatctgtaaattaccaagtcatttctccgaaggatctagcaaa

SEQ ID NO: 45470 - DNA, 245 bp, Glycine max
  unsure (1)..(245): unsure at all n locations; Clone ID: 701130377H1
ttgaccanggcttcttcattgaggatctcaaggctcctctctcgttcttttctttctgcttccantantantcctttgttttcnagaggcggaagtggtgctcttggtgcagggctcagnaaattcagcactgctgctgccantgaagaancaatnaaaccancaatnaaagnagaananacccagctctnaattgatggaaaatttgttgatgctgctantggcaaaacttttccaacgttgga

SEQ ID NO: 45471 - DNA, 228 bp, Glycine max
  unsure (1)..(228): unsure at all n locations; Clone ID: 701130378H1
agcacattagtgaatatgctgattcccggtttgangaccttactacttggcatatcgtgaacttaatgaggaagagtanaanaaatttagtaaagagtttacagaggccaagaacttagtaagtgaagaccaggagcagattgttgaggggatagtacaaaatattgagaaggatttaattcttcttggtgctactgcagttgaagacaaactacaagatggggttcc

SEQ ID NO: 45472 - DNA, 250 bp, Glycine max
  unsure (1)..(250): unsure at all n locations; Clone ID: 701130379H1
cannnntccaatatntaacattctttattctttccaattttcatcacaaacanacacacactanagcaccaaaaaccgaagcaaagcaagcaaagcaagccaatcaagactcaccttcgtgttccaatcagaggatatagagagagaattatgagttggttgaataaaaataaaagtacttgtagtgatggtagtgccaataatgaatcttcttcaagtggaatagttggagaaagggataatcatcttg

SEQ ID NO: 45473 - DNA, 251 bp, Glycine max
  unsure (1)..(251): unsure at all n locations; Clone ID: 701130380H1
caaccttgtnccanaccccaggatccacttcangctttcttcttatgctccggttatctctgccgccaaggcctaccacgagcagttgtcggtgccagagatcacgaatgccgtgtttgagcccgcgagcatgatggccaagtgtgatcccaggcatggcaagtanatggcttgctgcttgatgtaccgtggtgatgttgttcctaaggacgtgaatgctgctgttgccannancaagantaagaggactg

SEQ ID NO: 45474 - DNA, 250 bp, Glycine max
  unsure (1)..(250): unsure at all n locations; Clone ID: 701130381H1
ctcgagccaaacgatccaaactcttttttcatntgcagcatcaaaatgagtggnagcaacgatngttgcggcagtggagctcnaggtttttgaaggtggctagtgcagctgccgctananccgccgttgccggcggtttatatgccantctttcatcctcaacctctgctagctctgagatggaagtgccgtttggcagcgcacggcgtgagagcaaagaacgtgacgatggtggctccgngtctcatcc

SEQ ID NO: 45475 - DNA, 248 bp, Glycine max
  unsure (1)..(248): unsure at all n locations; Clone ID: 701130382H1
ctttccttcttcaccgcatcaatggagttggacggcgttctcctcggcatgtgcaaccctctcctcgacatctctgccgtcgtcgacgacgctttcttgcaaaaatacggnatcaagttgaacgatgcgattctcgctgaggataagcacaaacctatgtatgaagaattggctaacaatcctaatgtggagtacattgctggaggtgctactcagaattcaatcagggttgctcagtggatgcttca

SEQ ID NO: 45476 - DNA, 247 bp, Glycine max
  unsure (1)..(247): unsure at all n locations; Clone ID: 701130383H1
ctggggctaatagnaatgacatggaattggacaagtacaaaggacacattcctgaagctantttaataaagaagagttatgaagagaagcaccaaaagaagcgtgggaagcctcgttcatggaagcttaaatcacttgagatggaggttgatgataagggaagagttgatgaagataaaatggtctcagaatatgaacaattcattcaagatctggaagaaaaccctgaaatgaggttcaacatatc

SEQ ID NO: 45477 - DNA, 220 bp, Glycine max
  Clone ID: 701130384H1
ctctgaaaaagatttttggtagcccatgaaagttgaaacacaaaaaggatcgcagatcaaacaccataaaacgtagtaggcatacgattctatgaggtgaagtgtgattctgaaaaccttgaacatcgctcctctcctgccagtgtaagctagattgtttgattttctagtccgtggaagacatccctaatttgtttcgcaccgagcaaaatacaattcg

SEQ ID NO: 45478 - DNA, 246 bp, Glycine max
  unsure (1)..(246): unsure at all n locations; Clone ID: 701130385H1
aagtcgacgaaagtttttggtgatttttttgttgccttccgcgcgttgaacttcttcccttccccgccgtccacggcggtcgccgctttactccgacggccaagactccccggaggctgttaactcgnaaataccttttcgcttctctcagcttatcacaanaatctctgattcttcttcttttctctagcattgaagaaggaggcgccttgggtttttaaattttnatagtaattcattgaagcg

SEQ ID NO: 45479 - DNA, 247 bp, Glycine max
  unsure (1)..(247): unsure at all n locations; Clone ID: 701130386H1
aaaatgctnaacttctcaattgcatatggaaagacgccagttgggctttccaaggattggaaggttactgtgacagaagctaggagaacagttgacctttggtacaatgacagaaaagaagtgctgaaatggcaaaaagancgnaaaaaagaagcttgtgaatctcaacgtgttcacacattgctagggcgagcccggcggtttcctaaaatagacctagctaacaactaccacaaaggncatattg

SEQ ID NO: 45480 - DNA, 244 bp, Glycine max
  unsure (1)..(244): unsure at all n locations; Clone ID: 701130387H1
cctttctttattctctccttcctcttccttcttcttgtttcatctgccantgcttgtgatcgctgcttgtatcaatccaaggcttccnanttctccaaagcttctgctctttcanctggggcatgtgggtatggctctttggcactagananaagtggtggacaccttgcagctggtgtggattctctcttcaaaaatggagcaggttgtggtgcctgctttcaganaagangcaagaacccaa

SEQ ID NO: 45481 - DNA, 214 bp, Glycine max
  unsure (1)..(214): unsure at all n locations; Clone ID: 701130389H1
aattgctgtggtgagtttcttttcaggcactaacctgtataggaatcagaaacctggaggcagtgccatcactagaatctgtcaggtggtaatggcatccataaganaatacaatgttgaagtacctgctgacgagtcacttttatatgagactgctgaaactgaatctgctataaaaggaagccgaaagcttgaccanacaaatgagctaaga

SEQ ID NO: 45482 - DNA, 216 bp, Glycine max
  unsure (1)..(216): unsure at all n locations; Clone ID: 701130390H1
aatttgctgtngtgagtntcttttccaggcantaacctgnataggaatcagaaacctggaggcagtgccatcannagaatctgtcaggtggtaatggcatccanaagaaaatanaatgttgaagtacctgctgacgagtcacttnnatatgagactgctgaaactgaatctgctanaaaaggaagccgaaagcttgaccanacaaatgagctaaga

SEQ ID NO: 45483 - DNA, 244 bp, Glycine max
  Clone ID: 701130391H1
gcaatgtcttccccttatctacctgccacaactgactcacttgctctcgcaactgaggccaaagacccatctgaggccatctccattctttatcgggtgcttgatgatccttcttcttcaccagatgctctgcgtatgaaagagcaagcaatcacaaacctcactaagcttctcactgatgagaataggggagaggatctgcgcagcttcttactcagttgaggccattcttctccttgatacc

SEQ ID NO: 45484 - DNA, 243 bp, Glycine max
  unsure (1)..(243): unsure at all n locations; Clone ID: 701130393H1
aacaggatgatgaagtaattgnaaaacttgaagattcagctattgaacactcaaaatctgttgattcagcagttctaggnaaatacaacatttggaggaaagaaaatgagaatgaaaatgctgattctacagtacggttgattngagaccaaatcatnatggctaaggtttacttgagtattgcaaagatgaagaacaagcttcaactgtaccaagaactggaatctcagcttaaagaaagtc

SEQ ID NO: 45485 - DNA, 245 bp, Glycine max
  Clone ID: 701130394H1
ccagcctaagcctcaaacatggcgagagggttaaagaaacacctgaagaggctcaatgctccaaaacattggatgcttgacaagcttggtggtgcctttgcacccaagccatcatctggaccccacaagtcccgggagtgtcttcctctgatcctcatcctacgaaacaggctaaagtatgctctaacatatagagaagttattgccatcttgatgcagcgccatgttcttgttgatggcaaggt

SEQ ID NO: 45486 - DNA, 266 bp, Glycine max
  unsure (1)..(266): unsure at all n locations; Clone ID: 701130395H1
gcttcgggacaatgcgatggaccaagctcatccaacagactccaagngacgaaggccgagaaagaataaaccggcgtgggttttggtgctccaaggatgccnaggttttgcntgttttttgccatanttgtgggctatgtgttttggtcttgagatggatgaggagaccagtgggagagaatagatcaggttatgaagagtgttcctcatcactttggacccgagaattgatgactancttccaattctaagccccttttnctcaa

SEQ ID NO: 45487 - DNA, 84 bp, Glycine max
  unsure (1)..(84): unsure at all n locations; Clone ID: 701130396H1
agaagtaggaggagcgngggnagagggagncgcncgnggacgggagacnaaanggggggagacgggggaccgggggagncgnct

SEQ ID NO: 45488 - DNA, 278 bp, Glycine max
  unsure (1)..(278): unsure at all n locations; Clone ID: 701130402H1
cccgnttgnaagcaatggacgccttcaattccttcttcgattcaagaaaccgatggaattacgatactctcaaaaacttccgtcagatttctccggtcgtgcagaatcacctgaagcaggtttattttactctgtgttttgccgtggttgctgcggctgtcggggctaccttcatgtcctcttgaacattgggggttttcttactacagtggcatgcatggggaagcagcttttggttactctccacacctccttttgaagagaggaagagggtgact

SEQ ID NO: 45489 - DNA, 277 bp, Glycine max
  Clone ID: 701130405H1
aggtacccgcctatgtgatagctcaggtcgttggagccacacttgctagtggaactctcagacttatattcaatggcaagagtgaccactttacaggaacactccctggcggttctgacttgcaatcttttgtggtcgaattcataatcactttttatctcatgttcgtcatttctggcgttgccaccgataacagagcgattggagagttggcaggcttgcagttgggtctacggtatgctgaatgtgatgtttgccgggccactcacaggggcat

SEQ ID NO: 45490 - DNA, 278 bp, Glycine max
  Clone ID: 701130406H1
tggaacgttcaattccagaggctgcagaatgtgatctctccattccaattccaaggggtggacccatttacgttcctaacatggtcggcccctccactagggttcctcactttcagacttgtcttctttctgaacttcggaatctcgaggctgaattgtctgaagatttttctcaccttgatatctcggtggatgaccttaaaatatttacagaggatgacttaatggatatggctctcaaagaagtatttcaaggtagggagaacgatgaaaatcat

SEQ ID NO: 45491 - DNA, 283 bp, Glycine max
  unsure (1)..(283): unsure at all n locations; Clone ID: 701130407H1
gncacccctactcttcttccagtctctanctcaatctccatcaaanttaactatggctactgaagaggttttggttgatgaaatcacttaccctaccaagatcactactaccaagcccctatctttgcttggccatggaatncaccgacatggagattcacttcatccatgtgaaattctattcaatcggggtttatttggagccagaagtagtaggccacttggnaccagttccaaaggnncatctgcaaaggcagcgggnagataatggaanagttcctcc

SEQ ID NO: 45492 - DNA, 128 bp, Glycine max
  unsure (1)..(128): unsure at all n locations; Clone ID: 701130408H1
tactcattctccatacctcaacgaagaggttaaagagacggcaanactttgctgtccgccttgaccgagcagagcttcgtacttggccctcgattttgcccnaaagtactctcagtcacaacagacac

SEQ ID NO: 45493 - DNA, 278 bp, Glycine max
  Clone ID: 701130409H1
ggttgctactggatgatgcctaatttacacagtttttcgttttgcgcagagttgatcgaaatcctttttcttcggttatgttgaatttcaacagagttttgatttaggactcgagaaaattcttcggttattttcctttttttttctcctttttcctttttgttaaattgttttccttgtgctgaaatgttagggttggaatatcaatatagattggaatacgacggtagaagttaatagcgaggtttttcatctttattgtccaaattccttcgtag

SEQ ID NO: 45494 - DNA, 275 bp, Glycine max
  unsure (1)..(275): unsure at all n locations; Clone ID: 701130411H1
aaaccctagagtcatcactctcctcgacgacatctcctttcccatcctcttcganaattcctttcatgccttccacctccttcactggcggctatcgtncgttcgtatggagcggtgaaggcgctggtggcagcactagaganacagacaatgatggcaaaggagaacacggtgtgcgcattggttcggttatcgaaanacaaggaggaagataaggtgatgataggganggtgggagcgattctgcatctaccntagcttcgttangaggggtt

SEQ ID NO: 45495 - DNA, 280 bp, Glycine max
  unsure (1)..(280): unsure at all n locations; Clone ID: 701130413H1
gntaagtccctccttcctctgccttataattcttgtgacccttttngctggtagcattgaaagtgcaccagcaaaggtgaagccnagccattatgtgcacccttcaanaggcgngttttnccntctggttttctanggngaataggctctgcagattaccagatagaangagccgcngcnancanatggtngaggagcaantatanggnacactgatantnacgagcnaccagggnangatttggnatcatagtgatggaagtctagcattgnttntcnc

SEQ ID NO: 45496 - DNA, 283 bp, Glycine max
  unsure (1)..(283): unsure at all n locations; Clone ID: 701130414H1
tgcattctntgatggctcnagaaccgataacnagtcccgtccccgattcgtggtaccccacgctctccgtcttcaccctcgccatcggcctcgtcttaaccgccttcttcttcatttatgnagcaacatcttctaggaaangtncgttcacttgttcaggagctgacaantggtgcantggctccagtcntcttgggntttgggtcntgttcctcctnatcgcttactggtgtttaagccctanttnanancattgaatnggatgaaaattctgnnaaagcag

SEQ ID NO: 45497 - DNA, 288 bp, Glycine max
  unsure (1)..(288): unsure at all n locations; Clone ID: 701130416H1
atngtccccttnccagacagatccangancncacagtgctcttttttgagccaacggtgctgattctttcccgcggaatcttgctcngcgttggggtgtaagtcatttgtcaattcccttggacaagntggctttggggaaatatncctagggtagatggtagaagatcgtcgagctggtgttcgacggtgactgttgtcgtgtntgtggctcatgcttggttggggtttgcgatgatgaccatcatcttcagttgtcccngtggcntaatggccatgaggcaccacc

SEQ ID NO: 45498 - DNA, 289 bp, Glycine max
  unsure (1)..(289): unsure at all n locations; Clone ID: 701130417H1
gcancgaccacttccaatggcttcaaatcatgaagaagtgatacttttgggcaagtgggccagcccanttagcaacagagtagacctgctacttcaagctcaatggagtnccntacaaatactccgaggnagatctgctaacaagagtgctgatcttctcaggtacaaccccgtgcacaagaaggttccggttttggtccacaatgggaacccattacccgagtcacttatcattgttgaatacatcgatgagacctggaaaaataatcccctcttgcctcgagaccct

SEQ ID NO: 45499 - DNA, 281 bp, Glycine max
  unsure (1)..(281): unsure at all n locations; Clone ID: 701130419H1
tagatggttaagatacatcattgtactttagtgatttcaaagannggnacaaaagannnnnnnnnnnnnnnnnnnnnnnnnnnncttatacacgtaggagacttgggccagtccttcatcactctcnaagcagctcnttttattttctactntcctttttctcttagcttagcacaccatatcactgaggttgcttaaatgcaaaactggctcttatttgttggcatacttgacaaactcgatggaaattcccaatngaaatntaancacgccctgttanc

SEQ ID NO: 45500 - DNA, 282 bp, Glycine max
  unsure (1)..(282): unsure at all n locations; Clone ID: 701130420H1
gatcttcatcttcatagagnaagtatgaagatctatattttgcacggtcattataacttccttcacatttggtttcattgagaaagttgtttcaaancnaagacnctcgtccatatacggcaattttcaactttggtgactctctaagtgacaccggcaatttccttgcatctggtgccattttattcccagttatcggaaagcttgcctnatggtcaaacctttnttaaacggggaaaccggtcnntgcctcagatggncgatactgattgattttntagg

SEQ ID NO: 45501 - DNA, 286 bp, Glycine max
  unsure (1)..(286): unsure at all n locations; Clone ID: 701130421H1
tgaacatagtnaagaagccagtgntaggatttgttagtgaagcaatggctcaaaccangttgnctcatgtnctagtgtctctagcagttattccgtggatttgaaaanagaccttttcctccanttgcanngtcaaagtttaaggcctaagttctctcagcnctcantgcaacccacttcncatcatgnnacnancatccttntcttgcaccccgntacatncaacnacgnnggccnngttnnaaatgtaagcccatagccgctgcnngcnaagacgagggtnncg

SEQ ID NO: 45502 - DNA, 280 bp, Glycine max
  unsure (1)..(280): unsure at all n locations; Clone ID: 701130422H1
ggctcagtctcacgaggtggagtgcggattggaaaagtgctactgttctatatgagcaggcagctnatgggtttagagttgccaaggactatgagaatgccaaaatagcatatgngaaagcttcgnaaggnncaagagatgcttcttcaccttgggatggcagctaagcncatggantcctgnnnctgctctagcgaaggatgctaagacactgcncaagaagttgtggacttctatcgaagggcatctgaattgtatntggagtgtgggagacccaacc

SEQ ID NO: 45503 - DNA, 274 bp, Glycine max
  unsure (1)..(274): unsure at all n locations; Clone ID: 701130423H1
gcttctcgaaccctactttcttccgcggtgattgcatttgaattcctgtaatggcgattgataatatttttaaaaatgaagctagtgaagaaaaaggagagcgtgccagantggcttcttttgttggagccatggctattgctgacttagtgaagacaaccttggggccaaagggnatggntaanattttgcagtcaacaggtagaggacgtgaagttactgtcacgaatgntggcgctacaatcttgaagtccctccatattgataacccagc

SEQ ID NO: 45504 - DNA, 278 bp, Glycine max
  unsure (1)..(278): unsure at all n locations; Clone ID: 701130424H1
gnttcctctctctcagtttccaagaatcttaagctatgggaaagtcttacccaaccgtgagcgctgattaccagaaggccgttgagaaggcgaagaagaagctcagaggcttcatcgctgagaagagatgcgctcctctaatgctccgtttggcatggcactctgctggaacttacgacgtgagctcgaagaccggtggtcccttcggaaccataaagcacccctccgaantcgctgcacggcgctaacaacggtcttgacntcgctgttaggcnntt

SEQ ID NO: 45505 - DNA, 277 bp, Glycine max
  unsure (1)..(277): unsure at all n locations; Clone ID: 701130425H1
tggaaattaaaattgggaacctggcttgttgttttttcctccctntctctgattggattgcgagggagggagggaattgatttaatcaggaaattttgttgctggaagaattgcttaagggcatatagctggttttgtgcacatgggatcagagagtgtggctccactgncntgagacctcgaaaaacaggtcttcttctggtaaaatgaaccaagggaaagtccccaggaaaaattcacaagggctgaaaaggagaaaatgaagcgtggacatttc

SEQ ID NO: 45506 - DNA, 280 bp, Glycine max
  unsure (1)..(280): unsure at all n locations; Clone ID: 701130428H1
cgcagcacctgagtataacccaatatttttgangaagcttatcactcttgctatggaccgcaagaacagaganaaggaaatggcntctgtagtgctatctgctcttcatatagagatcttctcaacagaggntanagttaatggntntgtcatgcttctggaaagtgctgaagatacagcactggatanattggatgcttcaaatgagtggctctgttcttagctcgggccgtgattgnacgatgtattggccccactgcatgtgngnagaaattggctc

SEQ ID NO: 45507 - DNA, 270 bp, Glycine max
  unsure (1)..(270): unsure at all n locations; Clone ID: 701130430H1
cngcctcaaggactatgttaccaggatgaaggnnggccngaatgacatctagtacattactggtgaaagcaaganagctgtcgagnattcccccntccttgaaaagcttnagaagnaagggatacgaggttctctacatggtngangctattgatgagtatgcgttggccaactaaggaattngagggcaancnagtngntntctggctancaangaaggccnanaacttnantcncaccnnanngcngagaaaangcnagacgcnacta

SEQ ID NO: 45508 - DNA, 269 bp, Glycine max
  unsure (1)..(269): unsure at all n locations; Clone ID: 701130433H1
ctcagagatcttcaacgcgaattggagnncaaagccaatgatcanngcaagcannaaaaggaaattgcgaagaatcaccaaatgagaaagaaatacacggtccagcttggcgagaangagctcgtccttaaggaactggatttattgaaagacgacgcaaatgtttataagttgattgggccagtattgttaagcnagatttgggccgangccaatgcaaatgtccggcagagnatcgaatactctcaggtgaattntaagcttttatt

SEQ ID NO: 45509 - DNA, 284 bp, Glycine max
  unsure (1)..(284): unsure at all n locations; Clone ID: 701130434H1
tggaatcgcataatatttganaagccatttggctttgatgcactttcttcccataggctgacacaatatcttctttcaaactttcaggaaaagcanatatatagaattgatcanctactaggaaggaatcncattgnaaatcttacagtttnaaggttttcaaatctagtttttgagccactttggagtcgtacttanataagataatgtagcaggncatttatcagaggncttggctgtgcatcctgggaagntattcnntggctatgggatnatccgtganc

SEQ ID NO: 45510 - DNA, 280 bp, Glycine max
  unsure (1)..(280): unsure at all n locations; Clone ID: 701130435H1
caacctcagctctcgaacccctctgctcttgctgttatgtttcaccactctcaccgaggctgtatggttaaccatccccagcaagggaaccaagtgcatgtccgaggaaatccagacacacgttgtcgttttagcagattactatgttgtagccgatgatgtccagggtcaccancttcaaactatttccgccaaggtgacatccccttatggaaataatcttcaccagaatggaaaatgttacccacggtcagtttgcatttacaactaccgagtctgg

SEQ ID NO: 45511 - DNA, 287 bp, Glycine max
  unsure (1)..(287): unsure at all n locations; Clone ID: 701130436H1
tgcnaccaaaggggggatcccccaaagctagaacanttctgtctanacctacacacagngncagccttcatttcctgcctactttgatcagaactnctgctgattcaagtgctccanttattccnagtgngaacannacaaactccattcgtgagcannctnaagccatcatccagacctgttgttttatactgccaattnctnnananngcttnagctccannggtgtccggnagaagagnaanggatngntttgcttcgaanagcaccatancnagtagcnaatg

SEQ ID NO: 45512 - DNA, 65 bp, Glycine max
  unsure (1)..(65): unsure at all n locations; Clone ID: 701130437H1
agtncttnttcttcncccagccaacatgagctcaatcgttcagggtttcaccaagtcgctggacc

SEQ ID NO: 45513 - DNA, 269 bp, Glycine max
  unsure (1)..(269): unsure at all n locations; Clone ID: 701130438H1
agagacttccattacccatcaagttcctttgatatggctcattgctccagatgcctannncccatgganagaatatggtggagtttanctccttgaaattnaccggattcttcgnccnggaggatnttgngncttgtctggngnancactcaatcataagcgcangtngcgtggatggaacacaactcttggagncananaancngattangagaagttnnnagganntggcngacttcacgtgcnttanactgtacaagnaaaaaggg

SEQ ID NO: 45514 - DNA, 83 bp, Glycine max
  unsure (1)..(83): unsure at all n locations; Clone ID: 701130439H1
tgaggctctaaaccagcgncaggnaatggttcttcaaaggaagacagangaagcaaacaatggcnacncacaangcnacaaga

SEQ ID NO: 45515 - DNA, 273 bp, Glycine max
  unsure (1)..(273): unsure at all n locations; Clone ID: 701130440H1
gtaaccatcgtcgtgagcgaagatccataataatacagttacaaattgcaataacacactcattgtggttatcgaaatttgatcgcagcgtcgagaagaatgggaagtttgggagcgattctgaaacatccagatgacttttaccctctgctgaagctgaaaatggcggcgaggaacgccnanttgcagatcccgnggagccgcactgggcgttctgtacaccaaggctcccacaaaggtttctcgaatttcgccctcgtcattcagcaaatc

SEQ ID NO: 45516 - DNA, 274 bp, Glycine max
  unsure (1)..(274): unsure at all n locations; Clone ID: 701130442H1
gttgtaccatatactaatatcagccccaatgactctcggaacctttttgcagatcttaacccattccaaataaaaggnatggggaaagcccctgtgcataacaaacctgtggaaaataaacctcctgagcttaaaagtactaaaaacaatactgtttctggtagacccccagtgccactgatgtggnagantcgtcctgcannnnatgangnccaccaggacaactaatcatcnagcctaatggttacaagcctccctnatntgtttccantgg

SEQ ID NO: 45517 - DNA, 274 bp, Glycine max
  unsure (1)..(274): unsure at all n locations; Clone ID: 701130443H1
gctcgagatcatcttctctctatctttgttgcaaacttaccaacacagtactgagtttaagtnntcaccaaaaaaaacaatggatgatgatattgtaggactcggttttcgtccaacagaacaagagcttgtcaacttttacctcaaacacaagttgctcggcgatgatccccgtgtccacgtcatccctgtcattgatctttgcgatgtggaaccttggaatgtaccagcgcctgttgatttcaatacttgaaangncaaaaggtttaacagg

SEQ ID NO: 45518 - DNA, 205 bp, Glycine max
  unsure (1)..(205): unsure at all n locations; Clone ID: 701130445H1
gcaagtctctgttctgtattctagggtttggattctgagtttcgnttcagtttnngatcaccatgagagctangtngaagaagaagcgtangagnaggcngaannggaagcggccgcaagntgaagcagcagatcgcgagtantgtancgtgnntccccagcaaactattgcnagtagtcttgngngtatttaagcaatgtgntt

SEQ ID NO: 45519 - DNA, 279 bp, Glycine max
  unsure (1)..(279): unsure at all n locations; Clone ID: 701130446H1
gtcaatntcatttctacatccctggctctgttccgtcgatgacgatggcgtttagggtgcgaaacacnganntccgnnttctcantcatctntctctcnngtccangacttccgacaaggtcttcttcgangagcggttcgatgacgnatggggaaatcgttngnttnaatcagattgggnaaagatgaaaacctgnctggggnatggnaaccacacctctngaccaatggnantggngacgactaacgccaaaggtattcanaccagtgnaggttaca

SEQ ID NO: 45520 - DNA, 287 bp, Glycine max
  unsure (1)..(287): unsure at all n locations; Clone ID: 701130448H1
gagtatatcaaggaagccactgaactgggtaaanaagctagagaactaaaganagcagctgaggcactccatgcaggaagaaagaagtggttcaaagggtagaaagtttcgtaaaaatgtganggaagtngagaaggagttgtttcaattagaagaagatgtcnagcttcttganagaggtgtatnccacaagggggncnaaggctnanacaacatggggncctaacnattcttggttaccnccacacaatttgttttgggattttagggttgattgtttcatggcc

SEQ ID NO: 45521 - DNA, 282 bp, Glycine max
  Clone ID: 701130449H1
ttcattgagaaggtgaaggatttcattcatgacattggtgagaagattgaggaagctattgggtttgggaagccaactgctgacgttactgcgattcacattccatcgattaatcttcacaaggcagatcttgttgttgatgtgctcatcaagaacccgaatccggtgccaatccctctgattgacatagattacttggttgacagtgatgaaaggaagctagtttctggaattgataccagatgcgggtaccatcggtgcacatggagagcagactgtcaa

SEQ ID NO: 45522 - DNA, 251 bp, Glycine max
  unsure (1)..(251): unsure at all n locations; Clone ID: 701130450H1
anataatagtcactactcatgccggctttggtctgcacgtgtggtgactattatctgttcttgggattgttgaatttnactgccattgatcactaggaaaaaatgagatcataggtacctcctanataaganaaatgatctcaactgggtgaagaatgaagatccattagctatgttaggaattgtgtcgacatgtaaggactaaggacccctagtgatcatggcagtcaaaananaaaananaacacacc

SEQ ID NO: 45523 - DNA, 277 bp, Glycine max
  unsure (1)..(277): unsure at all n locations; Clone ID: 701130451H1
tggcaatgccgganacaatccctcccactactcccagtgctcaagttgtcggcaacgcctttgtggagcaatattatcacattctgcaccaatccccagaattggtgcacagattttatcaggnttcaagtttcttaaccagatcagacagcaatggtgtgatgacaactgtgacaactgtacaagaaatccatgaaaagattatttccctgaaatatgaagattataacagcagnnaataaaaactgcagnngctcaggagtcacatangggaggt

SEQ ID NO: 45524 - DNA, 272 bp, Glycine max
  Clone ID: 701130454H1
tgtgttttactatgagattcttaactctcctgatcgtgcatgcagccttgcaaaacaggcttttgatgaggctattgctgaattggatacgttgggagaggaatcatacaaggatagcactttgatcatggcaacttcttcgtgataaccttaccctctggacctctgacatggcaggatgatggtgcagatgaaattaaagaagccgcacccaaaggtgacggggaacaaaattaaacataccatacttctaattagtgattgaacttccc

SEQ ID NO: 45525 - DNA, 272 bp, Glycine max
  unsure (1)..(272): unsure at all n locations; Clone ID: 701130455H1
gtgtntgcggctgaggattccgaacgagcgancttcttcgtntctccgcaaagtttaagtcatcatgggtaaggncgagactcacatcaacattgncgtcnttggacatgtcgactctgggaagncaactancactggncanttgatctncaagcntggnggtattgacangcgtgtgattgagaggttcgagaangaggctgcngagatgnaacaagaggtcntcaagtnngccctgggtgcttgacnagctcaaggctgagcgncgaaac

SEQ ID NO: 45526 - DNA, 197 bp, Glycine max
  unsure (1)..(197): unsure at all n locations; Clone ID: 701130456H1
angcactgtggcagaagtcctaggagtgtaaaacacagacgcaaaatnaagacgatctngtncgtctgagaccatgaatattcccgancggcntgagcatcanaggtncacgctanngttatcgaaggttnanggncacacgtggaaaactcatgcgagattccaccantgnaatggcnccngccannttctcactg

SEQ ID NO: 45527 - DNA, 266 bp, Glycine max
  unsure (1)..(266): unsure at all n locations; Clone ID: 701130457H1
ctttctttttctgtgagcctttctttcaggttcttaacttgatcantgtgcagtgtccaaatcataagggtagttgcaaattgcaatggctaagcatgatgttgagggtggttccttctctgcaaaggactaccatgatcctcctccagcaccgttgattgatgctgaggaactcacacagtggtcctctacagggcttgattgctgagttcatgccacaatgctctcctttacatcacagtgctcactgtgattggttacaagag

SEQ ID NO: 45528 - DNA, 271 bp, Glycine max
  Clone ID: 701130458H1
tttggttttggactctgaaagaaactcaaagtgatgcgtttcatcgttctttcgcccaaaccctaacctacgtcctcgtgcattcattccccgcgatcaggtgtgtttttatccattgcaaacagcatgaattttgcagcatcattgtgcagaagattgaatatcaaggaacttgtgacatatgttcctgtgtatagaagcaccagtggtgtttctggagaaggtttgaatttggcgttcaggcgttgggcttccaaaaagactgctggtt

SEQ ID NO: 45529 - DNA, 144 bp, Glycine max
  unsure (1)..(144): unsure at all n locations; Clone ID: 701130459H1
gaacggcacttgcacatgggttagtcgatcctaaggnacgggggaagcccgtctgatagcgctctgtgcgcgtactccgaaagggantcgggttaaaattcctganccgggactggcggctgacngcaacgtnanggattccgc

SEQ ID NO: 45530 - DNA, 269 bp, Glycine max
  unsure (1)..(269): unsure at all n locations; Clone ID: 701130460H1
tggatcccatttccatcaggtcagtgcctatgtacttttttcanaaaggttggtggtgactggtgattgttgaagagaataatggcaacttcaactatggatattcttcatttccaccacactcctttttattgtgaggagaatgtatacttgctttgcaaaaagttgtgcaatgatggaatagcaaatgctgatggatctgatctttttgttgcttcatttccaacgaaaagaaacagatcccactttggaatcaaaaggctagcana

SEQ ID NO: 45531 - DNA, 289 bp, Glycine max
  unsure (1)..(289): unsure at all n locations; Clone ID: 701130462H1
gnaagctgtgccctcagcttcagcatgttgaattgnntgganttgagggagtgacagatgcagggcntattccannccttgnnagttccgaggctggtntggtnnaagtnacccttagtggttgncacaaacattanccgacaaagnagtttcatgccttcgnccaatgctgnatggttggcactctngcagaatctaaancttgatggttgcaaaaanatgcagtgganncctagcttgatggncnatgcctgacngactgtgcancgnacatcnganctngngnccc

SEQ ID NO: 45532 - DNA, 201 bp, Glycine max
  unsure (1)..(201): unsure at all n locations; Clone ID: 701130463H1
tggctcccaaaccgcctagtacgggnctgtttgttggactnaacaagggacatgtcgtncaccaagaaggaattgcccccacgcccctncggatcgtaangggaanacaagcaanatggtgcactttgtgnagaacctcatcnagagangttcctggntttgaaccntatggnaaagcgtataactgagttgctgaaggtt

SEQ ID NO: 45533 - DNA, 281 bp, Glycine max
  unsure (1)..(281): unsure at all n locations; Clone ID: 701130465H1
gntccctcacttctcttccctttgaccattcaaccttcctcgcctttgcctccgtttccgtgactgagatggctggaggtgttattcagcagatattgaggaggaaactccaccctcggtttactaactctcccttgttgtcacccatcgtagcaaaaaaagatgatgctggctctactggcagtcagtccttaagagcacttgcattaattggagctggtttgtcaggtcttttncagttttcaacnaaggcagcagtgatgaagctgaacagggctggc

SEQ ID NO: 45534 - DNA, 277 bp, Glycine max
  Clone ID: 701130466H1
tcttgcttcaattggtaaactcatgtttgctcaattctctgagcttgtcaatgattattacaacaatggtttgccttcaaatctcactgccagcagaaaccccagcttggattatggattcaagggagctgaaattgccatggcatcttattgttctgaacttcaatatttggcgaatccggtgacaagccacgtgcaaagcgcggagcaacacaaccaagatgtgaactctctggggctgattcatcaaggaagactcatgaggctattgagatcc

SEQ ID NO: 45535 - DNA, 275 bp, Glycine max
  unsure (1)..(275): unsure at all n locations; Clone ID: 701130467H1
tgaaatctggtgcagttcctcaagtacctcaattcaggccttcaantaccctgaatgcttcagctaatacccaaaaaaactctagtatctccaactcatccactgagaatgttgtgagcagagaggtgaacaaggaagtgaagggcaaagatgaaaaggcagcatcaccttctgcaaagccagcaggggaaccccagaagtcatcaccaaatggggtcacagcagatcctcttgggagatgcacgcaacaaggttcaagatgagattctcaaaga

SEQ ID NO: 45536 - DNA, 278 bp, Glycine max
  unsure (1)..(278): unsure at all n locations; Clone ID: 701130468H1
cgtcccaagggtttaacctttctggctgtgttaatatgcgtttcagcactgtcactgagtccttctgttgcgggggaanggcaaaatnatggccttgttatgaacttctacaaggaatcatgccctcaggctgaaagacatcatcacagaacaagtcaagctctctacaagcgccannagnaacactgctttcttcctggactcagggacatgcttccntgactgnngctgtccanngnntgtgatgcntgactgttgctggaatccnnangaaggag

SEQ ID NO: 45537 - DNA, 203 bp, Glycine max
  unsure (1)..(203): unsure at all n locations; Clone ID: 701130469H1
ggagacttcttctgcctattttttatgatgttgatccatgcacaagtgcgaaaacanagtggagactatncgaaagactttgcccaacancaacanagttgccaggttccagagnacnagggaattaaaacanggcgagaagttctgaaccatgtcagcnagtctctctggtctgggctatcagagntnnnaccagcnnaanc

SEQ ID NO: 45538 - DNA, 271 bp, Glycine max
  unsure (1)..(271): unsure at all n locations; Clone ID: 701130471H1
tcgngccgcaacttcctatgttccataacaagaacgatacagcatncagcagcancagttncaangatggccccacatcnatgncaactcacagncatncctccactacgcgacctntgagattgtccctcangaatctctttccganattacaataaccttngangtgctncaaagcctccaccgcnccgcaaacttactcnngttgnnctgggcnncgantctnnccatgtgggcncagcntgaacctgacggcncacgctgttcncnc

SEQ ID NO: 45539 - DNA, 259 bp, Glycine max
  Clone ID: 701130472H1
cgcgatacctacctgaaacatatagtctgcttactcacaattgcaacaacttcagcaatgaggttgctcaatttttggttggtgcgtccattcctgaatatattctccagctccccaatgaggtgatgagcagcccaatgggagcccttatattgcctatgatacagaacttggagacacgactgaaatctggtgcagttcctcaagtacctcaattcaggccttcaactaccctgaatgcttcagctaatacccaaaa

SEQ ID NO: 45540 - DNA, 267 bp, Glycine max
  unsure (1)..(267): unsure at all n locations; Clone ID: 701130473H1
cgagccgtcctcaaccttctttcttcttatatatcgaacatggctaagtatcattcaagtaggaaaagctcttccatgactgctatngccttcctgtttatccttctaatcacttatacaggcacaacagatgcacaatccggggtatgttatggaagacttggcaacaacttaccaacccctcaagaagttgtggccctctacaatcaagccaacattcgcaggatgcgaatctacggtccaagcccagaagtcctcgaagcacta

SEQ ID NO: 45541 - DNA, 269 bp, Glycine max
  unsure (1)..(269): unsure at all n locations; Clone ID: 701130475H1
ganaacaaaggtttagatcacctctganattctgctatggcctcaaccagatcactcattctttgtctgttcattcaactgtgcttctaccttctacccctctcattcgctcaatcccccgccaccgggtctgccgaaggttacaccatttatggtcgagtgaagatccccagtgtgggaacaaaagattatattcttcctggaaaaatttcaaatgtcaaagtcatactccaatggtggtcaaagagttactttctgaggcctgatgg

SEQ ID NO: 45542 - DNA, 68 bp, Glycine max
  unsure (1)..(68): unsure at all n locations; Clone ID: 701130476H1
tccaagaaatcctagatgcnagcnacaaatttnatgngaagctacttcttggtgtcggtggtnttgga

SEQ ID NO: 45543 - DNA, 270 bp, Glycine max
  unsure (1)..(270): unsure at all n locations; Clone ID: 701130477H1
agtggtgatggtatccctcctctagggggagacaataaattgttgattgatgccattacagcccaaatgcaaagaatgttgacagaacataccgaagagctgtatgngataattgaacaactagaaaatcaagaaantggcgatgntggtagaggtagaaggaggagntggaaaaataatgnaggtgatgctagagaggacagaattgaaggantacagctanacagncccccttttcaagganagagngcacccaggaancatatttgg

SEQ ID NO: 45544 - DNA, 275 bp, Glycine max
  unsure (1)..(275): unsure at all n locations; Clone ID: 701130480H1
gnttagtgggtcttaagagaccagaaaatcatggtgtcacatactctctaacagaggaatttgtgactgtttatagaatgcactcactcctacctgataacctacagctaagagacatatccgctactccaggacccaacaaatctcctccattagtcaaaggncttctatgaagaatttgattggactgcaaggagaannancattatctganataggagttgcaagggcaacttgtgtcatgggtcaccaagcttgtggggcatagannttgg

SEQ ID NO: 45545 - DNA, 276 bp, Glycine max
  unsure (1)..(276): unsure at all n locations; Clone ID: 701130481H1
cgagccgcaactggaaggtattttctgactgatgaattataaggcaacacagatagatagcnngagatcatagaccattatatttctgaggtttgacattatacatctgttttatttcaagcggattcacaccagaaaattagataggattatcttagctactataacatgcaacgttaattcttgataaagtcctccaaggcaacaccatatgcccctgtctcctgtcggtccccatcacttatctcgttgccttccccccacaataattcatgt

SEQ ID NO: 45546 - DNA, 269 bp, Glycine max
  unsure (1)..(269): unsure at all n locations; Clone ID: 701130483H1
aggctggagctgcttcaagtcttcaactatctgaatttctgaactcatccattcgttagcgcagtagaacgaaaactgagtaatggaaagtggagggaactcccttccatcagggtcagatggtgtgaagagaaaggtttcatatttctatgatccagaggntggaaactattattatgggccaggacanccaatgaaaccacannggatnngaatgncacatgctcttttgancccatatggattgcttcancacntgcnggttctgc

SEQ ID NO: 45547 - DNA, 260 bp, Glycine max
  unsure (1)..(260): unsure at all n locations; Clone ID: 701130487H1
gctattgacacaagggtgtgttgttttgtttttatcatcattgagaactanttaaggtacgtgtaaatgggtaagaagcttgatgctctccttggtanaaccttcaaggctgcacagttcaaggctattgnnaacctgccatctcgcgccttgccgttctcnagaaccagcgccaggntcgccttagncnggcccgttctnatatcctgaactcctccaaagtggtcaccttgaacgtgcttncgctcgattgagctgtc

SEQ ID NO: 45548 - DNA, 77 bp, Glycine max
  unsure (1)..(77): unsure at all n locations; Clone ID: 701130488H1
cttagcgacagggcgaatgaattaacaaacattgngatattaaaggnaactggatggannggttgaataccaagatc

SEQ ID NO: 45549 - DNA, 263 bp, Glycine max
  unsure (1)..(263): unsure at all n locations; Clone ID: 701130489H1
gnggcagcgacggtaaccctccaacaacaacacttccgctgcgaaaaatgtctctggtggcgaacgaggatttccagcacattctgcgtgtgctgaacaccaacgtggatgggaagcagaagataatgttcgcaatgacctccatcaagggtattggaaggagattcgccaacatcgcttgcaagaaggctgatgttgacatgaacaaaagggctggtgagttgaccttgctgantngatagtgtgatgactgtggtggcgaa

SEQ ID NO: 45550 - DNA, 268 bp, Glycine max
  unsure (1)..(268): unsure at all n locations; Clone ID: 701130490H1
gctcgagcggatccctttcttctctcacaccaatttccaggatttgaaacatgggcagattcaaaangcangattgaggaaaccagtgttcatcaaggttgatcagcttcgcccggggacaagtgggcacactttaactgtgaaggtagtcaatgnctannntggtgatncantgaggtcgttctgatggtcctcaatcccggaaaatgcaaattggtgagtgtnggttcngtgantgagactgggatgatcntattnactgccngnc

SEQ ID NO: 45551 - DNA, 263 bp, Glycine max
  unsure (1)..(263): unsure at all n locations; Clone ID: 701130491H1
gtaatttgggtgacccaaacaaaccgtaaaatgactttgtgtttgtgtttgtgtttgttcccaatgtgctaataaacagcgagagacagagagaggatttgatctttctttttttaaattaataaattaactcagaaaggnttccttcacttcccttccttttccattccacgtccaanacactcncgtcttgtgattcttctcttcantctcccttttttgccctagattnagatccttctcttccaatcattaantaatag

SEQ ID NO: 45552 - DNA, 270 bp, Glycine max
  unsure (1)..(270): unsure at all n locations; Clone ID: 701130492H1
gnttctctgcctaaaaggattgaaagatgggtcaagcattcggttgctaccaagtncgatcagtcaaatgtggctatcaaggagcattttcgaaaatttgatgatgtcctagagcctggatgtcactgcctgccttggtgtcttgggtaccagattgctggtagtctgtcgctgcgagtgcagcaacttgatgttcgatgtgagacgaaaaccaaggacaatgtctttgtgcaatgtggttgcatctgtgcagtaccgagctgtgtctga

SEQ ID NO: 45553 - DNA, 270 bp, Glycine max
  unsure (1)..(270): unsure at all n locations; Clone ID: 701130495H1
aagcgatggatccgaagctaaaagaggtttctcagctcttcgatcgctttaaggcttcgtttatcaggaacgactttgatacctgttccaatctcctttctcagctaaaggtnntacttacaggtttcagaagccttccaccgttgtttgcagatacacctaatgcagttcatgaattaacaatagcaagggatatatacgagcatgctgttgtcctagtgtgaaaaatgaggatcaagatgctttgaaagggattctccagttgaagcc

SEQ ID NO: 45554 - DNA, 280 bp, Glycine max
  Clone ID: 701130501H1
atgaactaattcagactgtgaaactgcgaatggctcattaaatcagttatagtttgtttgatggtatctactactcggataaccgtagtaattctagagctaatacgtgcaacaaaccccgacttctggaagggatgcatttattagataaaaggtcaacacaggctctgcctgttgctttgatgattcatgataactcgtcggatcgcacggcctttgtgccggcgacgcatcattcaaatttctgccctatcaatttcgatggtaggatagtggccta

SEQ ID NO: 45555 - DNA, 275 bp, Glycine max
  unsure (1)..(275): unsure at all n locations; Clone ID: 701130502H1
cattcttctctcgctctctgccttccatcacactcggcatannactttcccaagatagtagaagatggcagacactgaggatattcaacctcttgtttgtgacaatggaacaggaatggttaangctggattnncnggannngangnnccangtnctgtgtttcccagcattgtnggtngnctcgtnacactggtgtgatggttggcatgggccaaanagatgcatatgttggtgatgaggcacaatctaagaggggtatttgactctcaagtac

SEQ ID NO: 45556 - DNA, 276 bp, Glycine max
  unsure (1)..(276): unsure at all n locations; Clone ID: 701130503H1
ctcttcgtcctctctctcttatcacaatttcataaaaaacctctttttaagtttcttgcttctttctctctgaaagaaaattgaagtcctaaccagttggctcttttgttttatcgttctccatggctcagaaaaccgagaaagaagaaaccgacttcaaagttccggaaacnnttacgctttgcgtcaacaactgcggcgtcaccggaaaccctgccacgaataacatgtgccagaagtgcttcactgcctctaccgccaccacttccggcgcgg

SEQ ID NO: 45557 - DNA, 275 bp, Glycine max
  unsure (1)..(275): unsure at all n locations; Clone ID: 701130504H1
gctctgcatctatgtatgctcccgagtcagggaccgaggcagcagaagaaggctatgcactanaagaagatgaagtaacatctgtctatgttagaaacttgcctgctaatnttactgaagtggagattgaccaagaatttaagaattttggcagaattaagccagatggaatattcattagggtccgaaaggnaattggagtctgctatgcatttgttgaatttgaagacattattggtgttcaaaatgcacttcagtcttctccactccaattg

SEQ ID NO: 45558 - DNA, 275 bp, Glycine max
  unsure (1)..(275): unsure at all n locations; Clone ID: 701130506H1
gagaaattcatggctgctccaccggcaagagctcgtgcggattacgnttatctcataacacttctcttgattggcgatagtggttnacggaaagagttgccttcttctacgattctctnatggttctttcacaactagtttcatcacaactataggcattgattttaagataagaaccattgagcaggatggaaaacggatcaagctccaaatttgggatactgcaggtcaggagcggttccgaacaattacaaccgcttactatcgtggtgcta

SEQ ID NO: 45559 - DNA, 275 bp, Glycine max
  unsure (1)..(275): unsure at all n locations; Clone ID: 701130507H1
gggaatcctncgtaaggtaaacggcnaaggtngtaaggaatcattgccatctttctactttactttgtgganagctnccagggacacctacactagacagcatactgaaaagatttgggatcatagcaccggtgacatgggagctgatttttatcatcgatacaagggtgacatacancaagcganaganattgggctggactctttcagattctctatctcatggtcaagaatattcccaanggcnagggagcagttaacccccttggggttaa

SEQ ID NO: 45560 - DNA, 263 bp, Glycine max
  unsure (1)..(263): unsure at all n locations; Clone ID: 701130508H1
ttccttctcttttccaattgtttgagcctgaatttttgcgttaatgaagtctgaaacctatgataaggggatatctgttgatnactggaaaatactggtaaagtggtaataggcaaagaagtgaagaatcacaattggtttggaggcccatcgcattgaggcaagtagaaaattgacccgcccaagtggagattcaagtcgggtaccgaacgtgcgactataaagggaatgaacgtggacaccccacgctttcttcacggcaa

SEQ ID NO: 45561 - DNA, 223 bp, Glycine max
  unsure (1)..(223): unsure at all n locations; Clone ID: 701130510H1
tagtgcctccttgccagaagttaaaatggcccaagaaactttcctattcacatctgaatcagtgaacgaggggcaccctgacaagctctgtgaccagatctccgacnctgtgctcgatgcatgcttggancaggaccctgacagcaaggttgcctgtgaaacctgcaccaagaccaacatggtgatggttttcggagagatcacaaccaaggccaacgtggat

SEQ ID NO: 45562 - DNA, 70 bp, Glycine max
  unsure (1)..(70): unsure at all n locations; Clone ID: 701130514H1
anagttcctagtagtancgtaccggntcatttgcttcatcgatagaaaatangagntgcnngggnggggg

SEQ ID NO: 45563 - DNA, 198 bp, Glycine max
  unsure (1)..(198): unsure at all n locations; Clone ID: 701130517H1
gcncgatggcttncgncaaggtgggtttagagaagggaccgtggangccngaggangatcngaagctcttggcttanancgangntcatggccatggcagntggcgtgctttgccngnncccngctggncttcagnggtgtggcaagagttgcnggttgagatggncnaattatctaaggcctgtcnttnagaggggt

SEQ ID NO: 45564 - DNA, 264 bp, Glycine max
  unsure (1)..(264): unsure at all n locations; Clone ID: 701130524H1
aannagccccncctctnggaggcnnagcgtnctggaagaggaaagaggnatggtcncctncngaaggtcaagcctcagaccttgagcatggtnatgcagtgccggcggnaaatgtggnattctgtagggtgctttcacntgcaaaacctgangctggaaagttggtgatcggtactgtggctctgttgattgcagccacatcangnatcttagttcaaaaatttggtgggaagataatnnacattgtctctaggganatgtanc

SEQ ID NO: 45565 - DNA, 266 bp, Glycine max
  unsure (1)..(266): unsure at all n locations; Clone ID: 701130525H1
ctggttcatgtgtatagacatttgcttatgcatcatggaaattactttacatttgcacaaatatgtgtcaaggaccctttcttgttacttgaatgctttagttttgaattgcaggccatagattactgccattctcaaggcataatgcatagagatgtcaagcctcataatgtnatgatagatcatgaattacggaaactccgcttgatagattggggtctgctgaattttatcatcctggaaaggaatacaatgttcgtgtggct

SEQ ID NO: 45566 - DNA, 161 bp, Glycine max
  unsure (1)..(161): unsure at all n locations; Clone ID: 701130532H1
gctntctctctgcttcacttgcttgaagcaatggccaaagcctnggcatcagtgctgctgtttctcctcgtaggtgtgagtaangtgtttgctgtagagcttgaacttganactcntccacacaanaaacgngggnagnagnngtgnactcgncnnannag

SEQ ID NO: 45567 - DNA, 272 bp, Glycine max
  unsure (1)..(272): unsure at all n locations; Clone ID: 701130534H1
cagaaagtnncccattgttccttcggatggtggaatttngcgaacaagggagacttcacttcctgttgtggagatcaccaaagccttggcagagaagggatatgaagttatggtatcagttgatgcaggcaggtttgtgtgcaattacgtttactatcattcccttcgcttcaccgagcaaaacgggatcaaatccctttcgtgcacgtgccgctcttcgtgacaataaatgaagagactcaaatgcaatcgcagcttccttgttagaggtg

SEQ ID NO: 45568 - DNA, 82 bp, Glycine max
  unsure (1)..(82): unsure at all n locations; Clone ID: 701130545H1
gaagtctatacgagaacagagtgacgccaacgcaagangcaggggcaggttctccacacnacatactntcnngngcncnncg

SEQ ID NO: 45569 - DNA, 237 bp, Glycine max
  unsure (1)..(237): unsure at all n locations; Clone ID: 701130547H1
ccatngcttcnagagnacaacnatccgccncnggangaganntttcgcnacganaattttcgcgacgagaattttacgagttcgagtnncngacagtcgttgtcncttcngtcgcccatgagtcgcatgtnctcgttcacgaggatgctcggcaggnaacgtaagggggacgnntcactgtcgtcatggcgngactgcatgtanctgcgccgnggncnnnttgagccagaggngacc

SEQ ID NO: 45570 - DNA, 269 bp, Glycine max
  unsure (1)..(269): unsure at all n locations; Clone ID: 701130549H1
gttgctgacgtctctnanagcaggnntgggtattnncngngggggtntatgcntccgaatggagaatctnnncaangttnatncgggagatgacangnttatccacctttnaaatgcatgcctnggggntgtnactaaggataaagaaggtctaccagtagccctgtatgtcaagtttggnanccaaaagctgtacttggaacgctttctntctgaagcttttcctgagatatctatgatttggtattgagaaggatttgagctatccc

SEQ ID NO: 45571 - DNA, 210 bp, Glycine max
  unsure (1)..(210): unsure at all n locations; Clone ID: 701130557H1
aacttntctcagtactntnatnaggatnngtgtgagcagtcgagcagagagatgatcatnaangtgaaggaatcgacggtggtgnggccggcggaggaggtggcgcggngggtggtgtggaactncaacgtggacctggtggtccccaatttngacanaanatacgacnnnnaaangnagntgattttccnttgnaanagtgtagnatgg

SEQ ID NO: 45572 - DNA, 92 bp, Glycine max
  unsure (1)..(92): unsure at all n locations; Clone ID: 701130559H1
gagnnttgnaactttaacaatcgggtggatttactgctaaatgtggganaagntagaccatggtgnggtgctgtggatatgggttggaaatg

SEQ ID NO: 45573 - DNA, 261 bp, Glycine max
  unsure (1)..(261): unsure at all n locations; Clone ID: 701130564H1
ggaacctactgagctcacanccccactttctgcagcttattgaagtnagctttagctacccaaaccgggagganatcaggctctcaaatgttgatgttggaattgatatggggactcgtgtngcgattgttgggnaaaatggagctggaaaatctacattgctgaatcttcnagctggtgatttggttccttccgagggtgaaattcgaaggagtcagaagttgaggataggaagatattcccaacactttgtggaccttc

SEQ ID NO: 45574 - DNA, 263 bp, Glycine max
  unsure (1)..(263): unsure at all n locations; Clone ID: 701130579H1
agcnanaanaganaaattcatcgtcgcanttatnatgggtaangttcatggatcacttgcangtgctggtaaggttagagggnaaaccccgnaggtgacccnnnnnnnnnnnnnnnnnnnnnccacgtggccgcgcccacaagaggatgcagtacaatcgccgattcgtcaccgccgtggtgggattcggcaagaagaggggacccaactcgtctgagaagtgaggccgacgcttgaggaatatgttgctactctatttgatt

SEQ ID NO: 45575 - DNA, 264 bp, Glycine max
  unsure (1)..(264): unsure at all n locations; Clone ID: 701130580H1
gcnnagttctatctgggaatggatgttgtttnanaagattgaagctgaaggnacacaaagtggccactcncaagagcaaggttgtgattgttgacagtggtgaactccctctataattgtacncctgattctcaatcaggnnctgttgaaggtgttcccagttttcatttcaattccatctacgagactatncncctttataagcatgttctaatagatcaatgactagttgtatgttgtgatactattagataaagtttttcc

SEQ ID NO: 45576 - DNA, 245 bp, Glycine max
  unsure (1)..(245): unsure at all n locations; Clone ID: 701130581H1
gcgtccatgncgttttggggtgttgaggtgaaaagtggagaatctcttcaaggttgatccgggagatgacaagattatccacctttcaaatgcatgcctgggggatgtcactaaggataaagaaggtctaccagtagccctgtatgtcaagtttggtaaccaaaagcttgtacttggaacgctttcttctgaagcttttcctcagatatctatgatttggtattgagaaggaattgagctatccc

SEQ ID NO: 45577 - DNA, 262 bp, Glycine max
  unsure (1)..(262): unsure at all n locations; Clone ID: 701130585H1
gntnnggnnanaggcgcntaatcanaangtnngatnnagangtaattgtgatgttattncnnnnancatangacnnacagganagttgccttcttctacgattctctnctggttctntcantactagtttcannacaactataggnattgattttaagataagaaccattgagcaggatggaaaacggatcaagccccaaatttgggatactgcaggtcaggagcggttccgaacaattacaaccgcttatatcgtggtgta

SEQ ID NO: 45578 - DNA, 261 bp, Glycine max
  Clone ID: 701130588H1
cacttggcaggctttcatcttccttcaacaagcctttacgtcctctcttcaatgctggctcagtttactacaagtcctctttgcctgctgaagctgcgtacgacaatgagaaaagctgtgatacggaattgaatgctccacttgaggttgttgatcctgagattgctgatataattgagcttgaaaaagctagacaatggaagggactggaactgataccctccgagaattcacttctgtctctgtaatgcaagctattgg

SEQ ID NO: 45579 - DNA, 260 bp, Glycine max
  unsure (1)..(260): unsure at all n locations; Clone ID: 701130589H1
gctcacagcagagttgctccngtctgtgatttcacagcagcgagtgccacacacaaaccaagccacagctctgattaatgcagtgagggctgtgggggagcagcttattgctgctaatcctgttgagctagctgtcggaaatatcgtgaggcgtgttttgcacatncaaagggaagaggatctttcccttgcaacagctgctatggatggtttgggggtatcagctgcaagtgatgatgaagatgatgcagagcgagatg

SEQ ID NO: 45580 - DNA, 99 bp, Glycine max
  unsure (1)..(99): unsure at all n locations; Clone ID: 701130590H1
aagcaccanacaccgtttcantnnatttcccactntttctagggtttccctgctatcttcctcaattcgaaccctttcgcctttcnanacaacntatna

SEQ ID NO: 45581 - DNA, 258 bp, Glycine max
  unsure (1)..(258): unsure at all n locations; Clone ID: 701130591H1
ttacccataccgtggctttnatggcatctgtgatccaactaagnnaaatncaaaggttgtgaacattgatgggttcgaggatgttccaccgtatgatgagaanngccttgaagaaagctgtcgctcatcaacccgtaagcattgctattgangcctctggcagagatttgcaactttatcaatcgggtgtatttactggtaaatgtgggacaagtttagaccatggtgtggttgttgttggatatggctctgaaaatg

SEQ ID NO: 45582 - DNA, 264 bp, Glycine max
  unsure (1)..(264): unsure at all n locations; Clone ID: 701130596H1
cggaacctactgagctcacacccccactttctggcagcttattgaagtcagctttagctacccaaaccgggaggatttcaggctctcaaatgttgatgttggaattgatatggggactcgtgtngcgattgtngggcctaatggagctggaaaatctacattgctgaatcttctagctggtgatttggttccttccgagggtgaaattcgaaggagtcagaagttgaggataggaagatattcccaacactttgtggaccttct

SEQ ID NO: 45583 - DNA, 270 bp, Glycine max
  unsure (1)..(270): unsure at all n locations; Clone ID: 701130601H1
aagaaagtagatatggaggtcataatgattctgctttgcaccacactagcatgtgtttttgtgggtttgcaactctaccatgtgaaaagaaatcctgacatgcttcccttaatctcctttgtcatgtcattgattttgactttgggaaatatggtacctcttgttctgaattttgaatccctttttgcacaaaatcatgacaagaaaagaattttgcttggnagtgaatggcctgangtgaatgaaattgctgtaaggcaattgnaatgg

SEQ ID NO: 45584 - DNA, 263 bp, Glycine max
  Clone ID: 701130605H1
agaaaactctcaaaaaactattatagcaatggcagaacaaaaccaaaaccaaacaactgaagctggaaggcaccaagaggttggtcacaagagccttctccagagtgatgctctttaccagtatattctggagacaagtgtctacccaagagaacctgaatccatgaaagaactgagagagttgacagcaaaacacccatggaacatcatgacaacctctgcagacgaagggcagttcttgaacatgctccttaagctcatca

SEQ ID NO: 45585 - DNA, 215 bp, Glycine max
  unsure (1)..(215): unsure at all n locations; Clone ID: 701130607H1
tnccccatttcacccctcgtctttcctngttnccggtgngggccaaccacaacatangttanacanggaacaacctccaaaacataacatcctacgccaaacaaaactttgacctccttcagatctataccctnnnnnnnnnnnnnnntctattttcaaattctacatcatgggcacggnggttctacggccacaagattgtttcacccaacgca

SEQ ID NO: 45586 - DNA, 268 bp, Glycine max
  Clone ID: 701130608H1
cacccatccacaaacgaacacacactttgattgagaatggggcgtgttcgcacaaagacagtgaagaagtccttcgcggcaagtgatcgagaggtactactctcgcatgacgctggacttccacacgaacaagaaggttctggaagaggtggccatcattccctccaagaggctccgcaacaagatcgcgggattctccacccacctcatgaagcggatccagaagggtcccgtacgtggaatctccctcaagctgcaggaggaggag

SEQ ID NO: 45587 - DNA, 269 bp, Glycine max
  unsure (1)..(269): unsure at all n locations; Clone ID: 701130615H1
ggtgttgttactgctgctcttttctcttttcttttctctttagttctctcttccccttncctttttctttttcttnttctncctgagcttgtttaagcttttcttccanaaaaanaataangngangtgtggnattcttgctgtnccttggttgttctgatgactcncgagccaaaagggtccgcgtgcttgagctctctcgcagattgaagnancgnggccctgactggagtgggctccatcaacatggtgacnggtttttggcacat

SEQ ID NO: 45588 - DNA, 262 bp, Glycine max
  Clone ID: 701130620H1
ctttctggctgtgttaatatgcgtttcagcactgtcactgagtccttctgttgcgggggaagggcaaaataatggccttgttatgaacttctacaaggaatcatgccctcaggctgaagacatcatcacagaacaagtcaagcttctctacaagcgccacaagaacactgctttctcctggctcaggaacatcttccatgactgtgctgttcagagttgtgatgcttcactgttgctggactccacaagaaggagcttgtct

SEQ ID NO: 45589 - DNA, 263 bp, Glycine max
  unsure (1)..(263): unsure at all n locations; Clone ID: 701130622H1
ggctagngccnatcgcactgtcacgatcacganactctgaagaatcaatggtggggaatagtgaagangaccgagatggccttcaccaatcgccgttacgaatcccggaattgctctatgnttcggtgaagatggagaatcccaatctcanctctctggggacnttctccntcacatatctggctcctgcccttactggggatccttccaaagcnctttcnatggaacgggaatcagcgtcatgtgggagttgagctttgttg

SEQ ID NO: 45590 - DNA, 263 bp, Glycine max
  unsure (1)..(263): unsure at all n locations; Clone ID: 701130623H1
cgaggctggtgattaacctctctttctgttttcttgtcaactacagtatcattcaagcacttcacaggtacttcccttagcttcttgacacattcaccaaaaaccagatgaaagaagctagctaacaccaaagttctgtcaagtcaattaagagtttatttctcattaattttttctacttacatgttgaagaattccactttttttttngttatgggaattngttcccccccccgagtngtttagggntgcagtanggttta

SEQ ID NO: 45591 - DNA, 92 bp, Glycine max
  unsure (1)..(92): unsure at all n locations; Clone ID: 701130624H1
ggancgacggttaaggntatgatttatgantncgactctaattaaggcnccaatnacnaggagacaacgcncagnctccacancaacntagg

SEQ ID NO: 45592 - DNA, 264 bp, Glycine max
  unsure (1)..(264): unsure at all n locations; Clone ID: 701130625H1
cgttcttcttcttttgttgttctgtgtttgtgtttgtnttttctctacacctgaaaatgtcttgctgcggtggtaactgtggttgcggaagctcctgcaagtgcggcaacggctgcggaggctgcaagatgtacccagacttgagctacactgagtcaaccaccaccgagaccttggtcatgggagtggcacctgttaaggctcaatttgagggtgctgaaatgggtgtgcccgctgagaacgatggctgcaaatgtggaccaa

SEQ ID NO: 45593 - DNA, 84 bp, Glycine max
  unsure (1)..(84): unsure at all n locations; Clone ID: 701130631H1
attgtttggtgtggtttggttacttgaaannactcgaatacgncttaaattttgatttagttcntccaacacaatatagngngc

SEQ ID NO: 45594 - DNA, 266 bp, Glycine max
  Clone ID: 701130633H1
ccggttcacaaggtggtggacaagagactacagcactcactgctatcactcaactggttcatcatggaatgatattcgttccaatcggttacacattcggtgccggcatgtttgagatggagaaagtgaaaggtggaagtccatatggtgctggaacttacgccggtgatggctcaagacagccaagtgagcttgagttacaacaagcattccaccaagggaagtacattgctggctcacaaagaagctcagcaagctgcataatg

SEQ ID NO: 45595 - DNA, 261 bp, Glycine max
  unsure (1)..(261): unsure at all n locations; Clone ID: 701130649H1
caaaagtgtatcgatactgcagtacaatgaaagttttaactatgcaaagactatatggagttcctcttactgacctagactccataagttcattagtttctaatccagaaaccagccttataactgctctcaatgtgtggtttggaagtttgcttgcatgtgaatcttttcatgcagatgtacatgcaggnaatctgtggctctacgtgatggccgtattgggtttctgacttcggaattgttggtcgtatatcccctaaa

SEQ ID NO: 45596 - DNA, 80 bp, Glycine max
  unsure (1)..(80): unsure at all n locations; Clone ID: 701130650H1
tcttcttcaatttattaggcagaagatgtggtgcattagattaaccttagtctttgtcctagtgtcttccacacaacana

SEQ ID NO: 45597 - DNA, 260 bp, Glycine max
  unsure (1)..(260): unsure at all n locations; Clone ID: 701130657H1
ganaagataccgtgtgaggnggatttcaggttacaagctatgaatccctatggacggaccaagcttttcctggaagaaattgcccgagatattcagaaagctgaaccagaatggaagatcatattactgaggtacttcaatccggttggggctcatgaaagtggtaaactcggtgaagatcccaagggcatcccaaataacctacatgcctacattcagcaagtagccgttggaagattgccggaactcaatgtatatgg

SEQ ID NO: 45598 - DNA, 254 bp, Glycine max
  unsure (1)..(254): unsure at all n locations; Clone ID: 701130663H1
tgcagctatttggattgctgatncttgttaactgatnttggtgcttttctttgagaaagtntgtacactttttggataagagaaaacaagagaggtgacattggaagctaactcagagagaggcaaagatgttgggnattttcaagcagaagttggttaatgcacccaaggagctgaacagtccagcttctttgaattcatgcattaagcctaagctaagtgcatgaaatcctgaaggattcatgtcctgcaat

SEQ ID NO: 45599 - DNA, 262 bp, Glycine max
  unsure (1)..(262): unsure at all n locations; Clone ID: 701130665H1
ctctctctctcctgaaggtaaggcagnnaagagaagaagagaaggaaagaggcttgtccctggagaaaagaggaggcaaatacatggagaacganggtgtaancacggtggtggtggagcaacaacctgtggcatccacgtccaagtttccgttgagcttttgggaaaccacggtggcttcaccggtggcgctggttttcgcggtgggcctctcggcgtctacctcaccatgcccgattccgattacagcttcctcaaactc

SEQ ID NO: 45600 - DNA, 255 bp, Glycine max
  unsure (1)..(255): unsure at all n locations; Clone ID: 701130677H1
cataccttaggtcttccgaattcgaagttaatttgcaagatggctaaggaaaaggctcagatcaacattntggtggttggtcatgtggaccctgaggaggcaaccaccattaacgagctgaagaagcctgttgtggagaaagaagctccagggcatgccatatgagggcatgcacgtacggcctcggaggggaaccagaaaattatgttaacaaaataatctggaaccctaatgtatcagtgtcatcatcagtgt

SEQ ID NO: 45601 - DNA, 197 bp, Glycine max
  unsure (1)..(197): unsure at all n locations; Clone ID: 701130683H1
anctcacatnnagttgnctttgtttgtctnacctggnatacgaancagcagacacgaaagaacaccaactttggccagaagnttggtgggggcattttnttttccaganaagaagggattcggtgttgatgagcaatattgatctgttgctngcagtaggggancgagtaagaatgnnaaacnagntatggtttgna

SEQ ID NO: 45602 - DNA, 215 bp, Glycine max
  unsure (1)..(215): unsure at all n locations; Clone ID: 701130685H1
cttccaaatggccactgttgcggttgcacagcaaacaccaacaactgtgacagagaatganacaacgactgaggtnaccaagattgaggaaactaccccagaacagccagccaccgaggntactgccccagaaacagtcaacgaagaagcaaaagaggaagcagcagttgagactaatgaggcaacagaagttacagaggaagggaaggctgaga

SEQ ID NO: 45603 - DNA, 263 bp, Glycine max
  unsure (1)..(263): unsure at all n locations; Clone ID: 701130686H1
gcctaccctactattancccctttccttcctgcctcncctttgcttnccctggctctttncagaagatgttgaacaagttgtnngacataagtggccaacncgattttcccaggtggcacatattacattatgccatcaacttggggnnctgccggtggtggattgaaactaggccggacaggaaantcaaactgcccagttactgttttgcaagnttactcagaaatcttccgtggcacaccagtcaaattcagcatacctg

SEQ ID NO: 45604 - DNA, 91 bp, Glycine max
  Clone ID: 701130687H1
ggagcgatcatcgtatgtgggaaggcgcactgaaaccttcacttttctggacagtaactgatcctgaacatttccaacaacaacatagcgg

SEQ ID NO: 45605 - DNA, 253 bp, Glycine max
  Clone ID: 701130692H1
gggattgatggtgacaaggagaaggatgagggtcgcactaaagcaatgaaggtgaacaaagaagtggatgacaagatgaggacaaatgctgctaatgttgctgcccgagctgctgttgggggagacgacatgctgtcaaagtggcaacttatggctgagcaagccagacagaagaaacgtggagggggaatggatgcttcatctggttctcagccagctaaagatgtgagccacagatcttcatcaacatctg

SEQ ID NO: 45606 - DNA, 253 bp, Glycine max
  unsure (1)..(253): unsure at all n locations; Clone ID: 701130693H1
gtngcatttaacatgcaggngtatggtagatctctttggttgatgcagggaatgttcaaagccaatggcggatgcggttatgttaaaaaaccagattttctattaaaggttggtcaaaataatgaggtctttgatcctaaagctcatttgccgtgaagacaaccttgaaggtgactatatatatgggggaaggatggtttcatgatttcaagcatacacactttgataaattctcacccccggacttctatgc

SEQ ID NO: 45607 - DNA, 258 bp, Glycine max
  unsure (1)..(258): unsure at all n locations; Clone ID: 701130694H1
ggttgagttggntcttgcccagttcanacgagcnaaagggangnctgatgaaccagatgtccggttgtatgaggntatgttgtctgtttacaacaacagcagtgatgcagncnncagatccatctgttctaagtcaattagctgaaaagttgaaattgatgggaatagctgatcttactcaagaatcacttgctttgcatgagatggtggcatcaagtggtggggatccaggggcacgcattgagaaaatgtcaatgt

SEQ ID NO: 45608 - DNA, 263 bp, Glycine max
  unsure (1)..(263): unsure at all n locations; Clone ID: 701130696H1
gctgnttttcgcggctgncnnccggtcaccggagattctatnccganatcgttttccgatgacnataaaanctgttaaagtcagnaacgtttccttgggagcaactgngcaagacattaaggagttcttttcattttctggtgatattgaatatgttgaactacggagccatgatgaacgatctcaaattgcttatattaccttcaaggattcacagggagctgngactgcactactgctttcaggggcaacaatagtcgata

SEQ ID NO: 45609 - DNA, 105 bp, Glycine max
  unsure (1)..(105): unsure at all n locations; Clone ID: 701130701H1
ggcntttcattttttcctgccactcttcttccttntgncnctctctcntgctccttnttgtgaanncaaaatgcatgantagaaatgcacacaataaggagganc

SEQ ID NO: 45610 - DNA, 271 bp, Glycine max
  unsure (1)..(271): unsure at all n locations; Clone ID: 701130702H1
ggctaccctaacctcgtcttcctctctactaatttcagctatggccgacgaagctgtggttgttccagatnccacccagatcgatgtcaagntctttaaccgctgnagcttcgaggatattgaggttnctgacatttcactggctgattacattggagttgcggcatccaagcacgccacatatgttcctcacaccgccggaaggtactccgtgaagcggttcaggaaggcgcatgcccnattgttgagaggctnacnaactctcatgatg

SEQ ID NO: 45611 - DNA, 265 bp, Glycine max
  unsure (1)..(265): unsure at all n locations; Clone ID: 701130704H1
tccaaacccacattctggaanttggttccaatgaaagcaatgcttcntctccggggcacttggcctagccttagacantcccacgtagaacacttcacgtgtcttgtggctccacatcaccacatgcttcccanagatcatcaattcaggggggtgaagctttttcaggggtgtgtnggaaagtatgcnatctgtttacttgaangaaatcgtacngctaaggccatattggaccttgttcatctgctgggaataactctnngta

SEQ ID NO: 45612 - DNA, 264 bp, Glycine max
  unsure (1)..(264): unsure at all n locations; Clone ID: 701130705H1
cttggccaaaatggtatccgagttaatcaatgcaaantnctataatatatgaaaagaaagagcgtcgacctgcgaactgctccatctgctccccatgatgagtatgctgtcgaactaatcgaccaacaagaggttttngatcatataagaganataanggacccngagcacccatattccttggangagctnagggtgatnacgnnggaccagtngacgttggngancacngaattnngggggggtcncttnncccnnagggga

SEQ ID NO: 45613 - DNA, 270 bp, Glycine max
  unsure (1)..(270): unsure at all n locations; Clone ID: 701130706H1
tcactctntntctccactcctcaagtanaancncttncacnctcaagaattctcttggntccctgctccccaacccaagtcaaattctgntcttttgntccaaacccattgtttcaagtntcagaaagaaccaaacttnatctcccaaaccttcatcgggcacaagctggttggctcatgctcaacagggcntagcagcttnctaatatntcnnnngnagtcaantttagcccagttttgtttaatggcaatgcattggcatgagtttgg

SEQ ID NO: 45614 - DNA, 245 bp, Glycine max
  unsure (1)..(245): unsure at all n locations; Clone ID: 701130707H1
tcagcnccacantcccatctcacacacccctcgcatncaacaatgtctctcaccattccctccaacctctccaancncgcngccctccgccccaaactaagcccaaagctaaggtncgntgccacaancaccatcgtctgcngcaccannaacaanaannaaanaacaanggtntnngntctgaaggcgttntnngtgcgtggtcttntcatatncgtngaccttgcngcggcgcgaattggtca

SEQ ID NO: 45615 - DNA, 238 bp, Glycine max
  unsure (1)..(238): unsure at all n locations; Clone ID: 701130720H1
aatccctggatttggaaatggcagcggcaggttgtcanaagcttctggaattgagcaccgaagatcgtcgntgttggcagaaactacgctgctcatgccaaccaactaggcaacgcgttcccaaggagccggtgttgtttctgaaaccgacgtcgtcttacttgagtaacggcggaaccattcaaatgcccacatnacatacaannngaantnnntcgnnnnnnnnnnnnnncggnnt

SEQ ID NO: 45616 - DNA, 266 bp, Glycine max
  unsure (1)..(266): unsure at all n locations; Clone ID: 701130723H1
agcacagattaatgctacttngaatcactacaaagatgcatttggncaagatatcaacaaggacctgaaggctgattccaaaggacgagttcctgtctttactaagagcaactgtgaagtgcttgatccgtcccgagaagtacttcgagaaggttgttcgcttggcgatcaacaagcgaggaaccgatgaaggagcccttacaagagtggtggccacaagggctgaggttgatttgaaaaacatagcagatgagtatcaggaggag

SEQ ID NO: 45617 - DNA, 265 bp, Glycine max
  unsure (1)..(265): unsure at all n locations; Clone ID: 701130724H1
aaactggcgaatngntcattaaatcagttatagtttgtttgatggtatctactactcggataaccgtagtaattctagagctaatacgtgcaacaaaccccgacttctggaagggatgcatttattntctaaaaggtnaacacaggctctgccgttgctttgatgattcatgataactcgtcggatcgnacggcctttgtgccggagnngnatnattcaatttcgccccngnaaattnngggggnaggaanngnccnnaaggggg

SEQ ID NO: 45618 - DNA, 98 bp, Glycine max
  unsure (1)..(98): unsure at all n locations; Clone ID: 701130725H1
gcagcttcacgncaactgtcttgatgaanattatgtncaaattaccggtgagnaagtagttacagctttaggaagtgaagtanataggttananaagg

SEQ ID NO: 45619 - DNA, 253 bp, Glycine max
  unsure (1)..(253): unsure at all n locations; Clone ID: 701130732H1
gcaatttggccactatgaacacagggcttgctgcaggtgcagccntgcttgcactcttggctatcaccttctccttgttgagccctcaaaccctgttttctccgcctgagattccgggctcgaaggaccaccttcacgctgctnggttactccatgtcaccggagccgtcgggccgganantcttgtnttcgacgntgnnggcggancccannangngggntngcnnnnnnngnagngggggggnncnnnanc

SEQ ID NO: 45620 - DNA, 111 bp, Glycine max
  unsure (1)..(111): unsure at all n locations; Clone ID: 701130746H1
ttgacnnancagananaggaaggagcgcgncnaagacctaaattgaccttgcgatcttgcgtgctttgcctgctcctgctnccgattgcgnttttncgttggnncttncta

SEQ ID NO: 45621 - DNA, 273 bp, Glycine max
  unsure (1)..(273): unsure at all n locations; Clone ID: 701130748H1
gcgggtgangtacaacccttccactgtgcncnntctgncgatnggtgcctacaagtatgtttncagagctatggcgcaagaagcagtctgatgtcatgcgcttcttgcancgggtgaggtgctgggagtataggcagcaaccttccattgttcgtttganaaggtctacccgccctgacaaggctcgtcgcttgggcttcaaggctaagcagggctatgtgatttaccgngttctgttaggaggggggccgaannanaccattcccaggtttc

SEQ ID NO: 45622 - DNA, 261 bp, Glycine max
  unsure (1)..(261): unsure at all n locations; Clone ID: 701130751H1
caaactngcagaaagagctgaatcgatacattcccactggccgcagcatttggaggcatctgtatnggtgccctgacagtgatggcgtcatttggtgatccagagattatggctgctcttcaagatgttatgaagaaccctgctaattttgccaagcaccaatcaaatccaaaggtagctcctgtaattgcgaaaagatgannaaacttggaggtggtcccagtganacttttagagcttgaagttttnggnnctacttcc

SEQ ID NO: 45623 - DNA, 262 bp, Glycine max
  unsure (1)..(262): unsure at all n locations; Clone ID: 701130753H1
tttctctctcaccctgcatatccatcatcttccacacaaantnagaaagnaactgagcaatcaataatcaagttacccacagaccaaccaagngtntagaaaatgacncacttgcattttttntaccacgacatcttagagggcaagaacatcacggtggtgaaatnnatcgagcnatcagngagcgaggttcgtgaatgnnagggtttggaaccatttcatgatgganttgttttgacgagggtcnagantgagtcgntgc

SEQ ID NO: 45624 - DNA, 99 bp, Glycine max
  Clone ID: 701130756H1
ctctcctttgacgacaagatgagcatcccaattccccatcggcagttattcatagaccggagactggaaagtccccgtaccttcaagaattcggattgc

SEQ ID NO: 45625 - DNA, 270 bp, Glycine max
  unsure (1)..(270): unsure at all n locations; Clone ID: 701130757H1
caaagaganagtgtgtgaaaagtgaaacaaaaaacaganncacaatgcncgacacttnnaggttcctcagcctcttcnccccgttgnagatgattgtgagcagctcccaaaagncttctcaggttggggaactaacgaggngctgattgtatcgatcttggctcataggaatgctgctcagaggaagcttatcagagaaacttatgncccagacctatggngaggntcncctaangncttgggaaananccncaggntgntttgggggcg

SEQ ID NO: 45626 - DNA, 272 bp, Glycine max
  unsure (1)..(272): unsure at all n locations; Clone ID: 701130761H1
ctcacccaccctccatacacactctctctgagtcggtcgagttgaatcggtgtgagtccagtgaccgagtcgaaccatgtcggacgaagaacaccatttcgaatccaaggccgatgctggagcctccaagacctatcctcancaagccggaaccattcgcaaaaacggttacatccgtcatcaagggtcgtccctgcaaggttgttgaagtttctacttccaagactggtaagcacggtcatgccaagtgtcatttgttgggattatatttt

SEQ ID NO: 45627 - DNA, 278 bp, Glycine max
  unsure (1)..(278): unsure at all n locations; Clone ID: 701130764H1
ggantgcgggcgagggtaacttaccaaccctaaggagttgttgagtttggtacatgggcggagaagtgttgacgatggcggacgtcacggccaacttgcaagcagcaaccaccgcatccaccccttacgcgcttcccaccaatctccctctcctctcngcttttctctccttggcttctgcgcnngttcctnaaganctncacctngtgntaanggnnagaagannggaattnaaaaaaggttccttgatnngggnggaatcccttncgnnantctgc

SEQ ID NO: 45628 - DNA, 104 bp, Glycine max
  unsure (1)..(104): unsure at all n locations; Clone ID: 701130765H1
ttttgaaaatcagatattatgaagtcaccttcctgcgagcctnttncctggtgctgatacaaagagtagaaaattcatgtgctttatggccatgcttcccagcc

SEQ ID NO: 45629 - DNA, 97 bp, Glycine max
  unsure (1)..(97): unsure at all n locations; Clone ID: 701130772H1
ctgggtttcggtttcatttcatcaancatgatcctgtttatcctttnctttttgcaatttcanttnaaagtcttccnnattntnnatgcaaagatgt

SEQ ID NO: 45630 - DNA, 107 bp, Glycine max
  unsure (1)..(107): unsure at all n locations; Clone ID: 701130777H1
agctngttaagattctnctactncgggtncatncgtcaatggtnatcctgctctgctgttgcatnccaccacctatttanccagttcnatcttttcttttnccaaag

SEQ ID NO: 45631 - DNA, 266 bp, Glycine max
  unsure (1)..(266): unsure at all n locations; Clone ID: 701130782H1
gggaagcanaatcctagaattaagaaatacgtngntccataagacagtgttgtgtctatttnctnnttttgttgntgtcatgtgctagaggggancacccttatagattctacacttggaatgttacatatggagacatttatccacttggtgttaaacaacaggggattttgataaactggcaattcccagggccacaaattgaagctgtgaccaatgacaacttgattatcaatgtttacaacagcttggatgaacntcctctt

SEQ ID NO: 45632 - DNA, 265 bp, Glycine max
  unsure (1)..(265): unsure at all n locations; Clone ID: 701130783H1
cacaacttcatcacgttcaaaatctnactgatagaattcatggaaccgagctgcatccatggtgaagactggcatcacaatgagtcggtcaagcactggacttataccatagatggcaaggntacaacttgcaaggagagtattgaatccgttgatgaagagaacaaaacaatcaactacaagctcttcgatggagacnttttaatcggtttaaggtccttaagctcatnctttcaagcgattgataaggaaaaggcatgctatt

SEQ ID NO: 45633 - DNA, 262 bp, Glycine max
  unsure (1)..(262): unsure at all n locations; Clone ID: 701130784H1
aggcctgctcttgctttgcttcctcttctatttgctttcttgttagctgccactacggaatcaagaaaagatccaggggaanattggaaaatgatcatgaaagatcaggaaatgccagaaggacttcaaggtcttgtttcatttcaatctgaaaataaccctaagactcaagagcagcttggtaaaggttccaaaaacccattgtgaagagtctctngttacaaatacacaagtnaacagtgacncgaaccccatcnagtgt

SEQ ID NO: 45634 - DNA, 101 bp, Glycine max
  unsure (1)..(101): unsure at all n locations; Clone ID: 701130785H1
attcagtgctgctagaagatgganactantgnntggcatatgcgantngaagatgctaggcttgcggtctgctgaatgcccccttagccaagagnggncag

SEQ ID NO: 45635 - DNA, 256 bp, Glycine max
  unsure (1)..(256): unsure at all n locations; Clone ID: 701130786H1
ttgagttcgaggagtcgccgccggacgatttcgatccggcgcatccgtacaaggacccggtggcgatgctggagatgagggagcacatccgtgaggnagaagtggatccaaatcgagaaggccaagatcattagggagaagctccgatggtgctaccgcatcgaaggcgtcaaccacctccagaagtgccgccacctcgtcaaccagtatctcgagttccacccgcggcatcggttggggcaaggacgtcgtcatc

SEQ ID NO: 45636 - DNA, 263 bp, Glycine max
  unsure (1)..(263): unsure at all n locations; Clone ID: 701130788H1
atcctggccagtagtcatatgcttgtctcaaagattaagccatgcatgtgtaagtatgaactaattcagactgtgaaactgcgaatggctcattaaatcagttatagtttgtttgatggtatccctactcggataaccgtagtaattctagagctaatacgtgcaacaaaccccgacttctggaagggatgcatttattagataaaaggtnaanacaggctctgccgtggcttgatnntnnaggnaacccgngggtnnangcc

SEQ ID NO: 45637 - DNA, 266 bp, Glycine max
  unsure (1)..(266): unsure at all n locations; Clone ID: 701130789H1
cacaatcaacctcatcttccaattcaattaatgnaanacagagttcntgctaaaanaaagtaattacaaaaagancgcgtaaagatcccatccacatacaaattctccaggctttcctccaatgtagccatccaccctctcttatctagacatccttggcaatgaggtcgccgttgatgagttcnctgtaggaagnaacgggcnanctgaaacccctgaagngcaancgagaggccagggacatcgatgatgatctcttatggngg

SEQ ID NO: 45638 - DNA, 269 bp, Glycine max
  unsure (1)..(269): unsure at all n locations; Clone ID: 701130790H1
gaaaatgaaggtcctngttttcttcgttgctacaatnttggtagcatggcaangccatncgtacgatatgttccctctccgaatgaacactggctatggtgcccgtactccggaggtgaaatgcgcaagtncgaggcttgctgtggaagcacacaacatctttggctttgagaccattcctgaagagtgcgttgaagcaacaaaggaatacatccatggcgaacaatatagatcagactccaaaacagttaaccaacaagctactttta

SEQ ID NO: 45639 - DNA, 268 bp, Glycine max
  unsure (1)..(268): unsure at all n locations; Clone ID: 701130791H1
gcacccccaccgtaagcacagctatgtcgttgcgcaggcgaaccttgctcaaggtcattgttcctncggcgatagggggttggaaagacctcgttgatgaatcaatacgtgcacaagaagtttagtcagcaatataaggctaccattggggctgattttgtcaccaaagagcttcagattgatgacagacttgtcactctacaaatatgggacactgctgggcaaganagattccagagtctcggggttgcattttacagatgccgat

SEQ ID NO: 45640 - DNA, 267 bp, Glycine max
  unsure (1)..(267): unsure at all n locations; Clone ID: 701130792H1
aagaggttaaagagacggcaacactttgctgtccgccttgaccgagcagagctttcgtcttggccctcgattttgccctaaagtactctcagtcacaacagacacnnnnnnnnnnnnnnnnnnnnnnaatggcaccgaagcagaccaaggctgagaagaagatcgcttacgatgcgaantgtgcgacctaatggaggagtacggccagatcctcgttgtgaactccgataacgtgggatcgaaccagctccagaaattcgaagggtc

SEQ ID NO: 45641 - DNA, 104 bp, Glycine max
  unsure (1)..(104): unsure at all n locations; Clone ID: 701130793H1
aacaagttcacttgtgccacattcaagnntggctgaaaggagngccatattaccatatcatgtgcatcctcaacaaatcaagactatcaatnntnnttcttgac

SEQ ID NO: 45642 - DNA, 101 bp, Glycine max
  unsure (1)..(101): unsure at all n locations; Clone ID: 701130794H1
attttttnccncaaaaataaaattcctaagctcattttncatttggcactnnctttttcccaccacaacatcacnaccttccaaaacaaccnnccnnactc

SEQ ID NO: 45643 - DNA, 271 bp, Glycine max
  unsure (1)..(271): unsure at all n locations; Clone ID: 701130796H1
actatacccaaaacccaaaggcatgtgatgantanataccccatccattaattatgatacccattgagtcagaatcctattaccatcctattttgatggtaaagaagaccataaagtatccaaaaaaattgtataaaagacnttancgtcaangnccacttnctccaaatcgtatacnnccagcaatttncncagaaatccttgctatggtagctatgagaccgaaataagggggggtggtgaaacaaancccntnctncancacaganag

SEQ ID NO: 45644 - DNA, 288 bp, Glycine max
  Clone ID: 701130901H1
atgatgaccagcattctgctgctgcaaataaacagagggttgcaactgtagtagctcatgaactagcacaccagtggtttggcaaccttgttacaatggagtggtggacacatttgtggctgaatgaggggtttgcaacatgggtgagctatttagccactgatagctgttttcctgagtggaaaatatggtctcaatttcttcatgaatctactgagggtcttaagctggatggacttgcggagtcccacccaattgaggtagagatcaatcatgcttgtgagattg

SEQ ID NO: 45645 - DNA, 282 bp, Glycine max
  Clone ID: 701130904H1
cgaaaacttatctcttccggttcacgacggagactctcgtcccttggaccctcaagagcaagaagagctggttcgttctcttgaaaggagtcaagctcagcagagtcgcttatggaggacggtatttgcagctctattcttctgttacatcgtgtttcttttgtactccatcttccagcaggcttcatctccatgggaactgcggtatcacgcttacttcatggaggagatctactcgtggatgattatatttgcagactgggtggctgttttagcatgctc

SEQ ID NO: 45646 - DNA, 280 bp, Glycine max
  Clone ID: 701130905H1
attcctcctgatgcttatgaacctgaatccactgcttataaaacgattgtatcactggcgaatgagttcacaaatgggaggatgccaagggaggatgaagttgctggttggcaaggtcaggagtgggagctctacttggacaacttgccaaaatccattgaagcttctcaggtcatagacttggattcacgctacaagctatctgagtcgaaagattacgaggtaaaggtgtcatttctccaaagggctatttcatgtggatgcaaaacttactataatt

SEQ ID NO: 45647 - DNA, 280 bp, Glycine max
  Clone ID: 701130906H1
ctaagattgaggaactgcttctagaagatcaaaatgttaagcgcagaagggatcgaatccagaaacaatcatcccttctctcgaaattgacacgccaattgagtattcatgacacccgagcagcagctgcctctggctggtcaaatggtagtgcagagagtagcccaagaagcagcagcggacctggtgatgactggagatctgcctttgatgcagctgccaatggccctgttagtcgaagtggttcatcaagatcgggatccaatggtcacagtcgaca

SEQ ID NO: 45648 - DNA, 279 bp, Glycine max
  unsure (1)..(279): unsure at all n locations; Clone ID: 701130907H1
ggcgttctatatattattgaattgacaatgaggcctgctcttgctttgcttcctgcttctatttgctttcttgttagctgccactacggaatcaagaaaagatccaggggaatattggaaaatgatcatgaaagatcangaaatgccagaaggacttcaaggtcttgtttcatttcaatctgaaaataaccctaagactcaagagcagcttggtaaaggttccaaaaaccattgtgaagagtctctagttacaaatacacaagttaacagtgacttcga

SEQ ID NO: 45649 - DNA, 279 bp, Glycine max
  unsure (1)..(279): unsure at all n locations; Clone ID: 701130910H1
anaagccacaaaacggagaancaaaaggaagaaancacggcctctttctgcggttacgattctcttcaccgtcttctncaaggataatccttaacccccatcacttccaggaagtcagccgtttgcttactgggcttaattgtggaaaagcacttgaagcagtttctctcccagaatctgcaacttccctctctgcggaacatggntttgacatccaggccttttcctttgtgctgacaaggaactattaagagaacctcggatagtgagagttggttt

SEQ ID NO: 45650 - DNA, 276 bp, Glycine max
  unsure (1)..(276): unsure at all n locations; Clone ID: 701130911H1
ggcgtggttttatcaagaacatgattactggtacctcccaggccgactgtgctgtccttattattgactccaccactggtggttttgaagctggtatttctaaggatggacagacccgtgagcatgctcttcttgctttcaccctaggtgtnnnagcagatgatctgttgctgtaacaagatggatgccactacccccaagtactctaaggctaggtatgatgaaatcgtgaaggaagtctcttcttacttgaagaaggttggttacaacccagac

SEQ ID NO: 45651 - DNA, 274 bp, Glycine max
  unsure (1)..(274): unsure at all n locations; Clone ID: 701130912H1
ttatcccctttctccttnctaacgagtgaggaaaaatggcgcgtaagaagatcagagagtatgactcaaagaggttgttgaaggagcactttaagagactctctggcaaggagttgccgatcaagtctgcacaaattaccgcatcaactgatttcactgagctacaagagnaggaaccctggctttcatcttctaaattggttgttaaacctgacatgttatttggaaagcgtggcaaaagtggtttggttgccttgaatttggatttgcacaa

SEQ ID NO: 45652 - DNA, 272 bp, Glycine max
  unsure (1)..(272): unsure at all n locations; Clone ID: 701130913H1
gaggccaaganactacnccgttgacatctattactcagnttgntcaccatggattnatcactgtccccantggatacacatttggnggtggcatgtttganttggagaaggtgaaaggtggctccccatatggngcaggancttatgctggagatggctcaaggcagcctagtgaattggaattggntcaagctttccatcagggnnagtactttgcgggcattgcaaagaagctcaagggatctcaatgatgtttatcctccatatatctg

SEQ ID NO: 45653 - DNA, 275 bp, Glycine max
  Clone ID: 701130915H1
aaacattattcccattgctatatattatggctagcatgaaggttacatgggtggttgtgatcatgtgcatggccgtggtgggtgcaccgatgatggcgcaagccatgaacatgcaatgatgtgacggtgaacatggcacagtgcctatcctacctgatgcagggaggaacaccttcaacactttgctgcagcggagtcaagaacattcttggctctgctgtcaccaccgttgacaaacaaactgtgtgcaatgtctcaaggcggatgctgctagg

SEQ ID NO: 45654 - DNA, 278 bp, Glycine max
  unsure (1)..(278): unsure at all n locations; Clone ID: 701130916H1
gatagatagagagcgcggcataacctaaacctatctttcttctctctctgtgtgtgcgcttcaacggcaaccagaagcagccatggccactgcaaggactgtgaaggatgtttcacctcatgagttcgttaaggcgtactcctctcacctcaagcgatccggcaagatggagctgccagagtgtncctgatattgtgaaaactgcaagatttaaggagttggctccttatgatcctgactggtactatgtcagagctgcttccatggcaagaaagatc

SEQ ID NO: 45655 - DNA, 287 bp, Glycine max
  Clone ID: 701130917H1
gtaagctctcatctgatggagacagtcattcattggagtcagactaaggaagctatctttctctcttctgccatgtcattaattttagtgggtgctaacctttggaaaccaaatggtctagtcacgttaataaagctgctcatgtttggagcacataagtaccaacactaactttaagccgagaatttttctagttcttttggcttttgatgctaaatccaaacatggttgaagtataagcatcaagaggactatataaaaaattacatgtacaggagtttcacatt

SEQ ID NO: 45656 - DNA, 284 bp, Glycine max
  Clone ID: 701130918H1
gcaggaactaaatatggctgacttgttggaatggtcaaagcaagataagaaacgaatgcttcatgtcgtctaccgtgttggtgaccttgatcgcaccatcaaattttacacagaatgtttaggaatgaagcttttgaggcaaagagatatcccagaggagaaatatgctaatgcttttcttggatttggccctgaagaatcccattttgttgttgaattaacatataattatggggttacctcgtatgacattggcgatggctttggacattttgcaattgcaa

SEQ ID NO: 45657 - DNA, 283 bp, Glycine max
  unsure (1)..(283): unsure at all n locations; Clone ID: 701130919H1
gtgagaccaanatgttcagccctgaggaaatcagtgccatgattctgactaagatgaaggaaactgcggaagcattccttggaaagaaaattaatgatgccgtggnccactgtcccagcttacttcaatgatgctcagnggcaggccaccaaggatgctggtgtcattgctggtctcaatgttgctagaattatcaatgaacccactgctgctgccattgcctatggattggacaagaaaggtggcgagaagaacattctagnccttgatcttggtggtggga

SEQ ID NO: 45658 - DNA, 280 bp, Glycine max
  unsure (1)..(280): unsure at all n locations; Clone ID: 701130920H1
tgcctcttcctcacccctttctccaatntaacgagtanngaaaaatggcgcgtaagaagatcagagagtatgactcaaagaggttgttgaaggagcactttaagagactttctggcaaggagttgccgatcaagtctgcacaaattactgcatcaactgatttcactgagctacaagagaaggaaccctggctttcatcttctaaattggttgtgaaacctgacatgttatttggaaagcgtggcaaaagtggtttggttgcctaaattggatttgcaca

SEQ ID NO: 45659 - DNA, 278 bp, Glycine max
  Clone ID: 701130921H1
gttcttcgtcgcaaatccgaagtaggatctctcttgttttttctctaggtttttcgcgatggcgtcgaagcgaattttgaaggagcttaaggatttgcagaaggatcctccaacatcttgcagtgccggtcctgttcatgaagatatgtttcattggcaagctacaattatgggtcctccagacagtccctatgctggaggtgttttcctagtgactattcatttccctccagattatcccttaagccacccaaggttgcattcaggacgaaggtgtt

SEQ ID NO: 45660 - DNA, 280 bp, Glycine max
  Clone ID: 701130922H1
gggcacctttaagaaaaacatattcttcgagtaagtctcatgatgggaaggaaaatggtttcatctcagctgacagtgatgagcaatcaaacatctccaatactgaatctgaatctctgagtctaacaactggcaacaaagaacaagagggaacatcctgtggtgagtcatctttacaacttgttttaactaacgaaagctgtttgagttgtgaacccatcgagaaggcttctcttataaaacccaaccaagttgtaagagtctttcttgactggactga

SEQ ID NO: 45661 - DNA, 278 bp, Glycine max
  unsure (1)..(278): unsure at all n locations; Clone ID: 701130923H1
caccattctagatatcaganaactntgcagctctcttaggtttttaaaaaacaccacgcaaacagcaagatggccacttccgacagtaacatgctacaccnattatgttccagtttatgtgatgctcccactcggagttgtcaatgttgacaatgtttttgaagacccagatggccttaaagaacagctcttgcagcttcgagctgcgggtgtngacggggttatggttgatgtgtggtgggggatcatagaactgaaggggcctaagcagtatgatt

SEQ ID NO: 45662 - DNA, 279 bp, Glycine max
  unsure (1)..(279): unsure at all n locations; Clone ID: 701130924H1
ctcattctagcacaagggtacctcttgagacagattcaaatgtgtcttccactgtcacttgccactcnatgtggagagcaattcaacaaatgggaagctgctgaagctcatcatctctccaagcatgctgttactgaacttgtggaaggtgattcatcaaggaaaatagtggagataatatgcaggantagctggttgaagtctgagaaccaatgcggtagaattgagagagttttgaaagtgcataacatgcaaaagacactggctaggtttgaggag

SEQ ID NO: 45663 - DNA, 274 bp, Glycine max
  Clone ID: 701130926H1
ctggctgtgttaatatgcgtttcagcactgtcactgagtccttctgttgcgggggaagggcaaaataatggccttgttatgaacttctacaaggaatcatgccctcaggctgaagacatcatcacagaacaagtcaagcttctctacaagcgccacaagaacactgctttctcctggctcaggaacatcttccatgactgtgctgttcagagttgtgatgcttcactgttgctggactccacaagaaggagcttgtctgagaaggaaacagata

SEQ ID NO: 45664 - DNA, 273 bp, Glycine max
  Clone ID: 701130927H1
tattatttctgcccccagtaaggatgcccccatgtttgttgttggtgttaacgagcacgagtacaagccagagcttgacattatttccaatgctagctgcacaaccaactgccttgccccgctcgccaaggttatcaatgacaggtttggcattgttgagggtttgatgaccactgttcattccatcactgctacccagaagactgttgatgggccatcagccaaagactggagaggtggaagagctgcttcatttaacatcattcctagcag

SEQ ID NO: 45665 - DNA, 277 bp, Glycine max
  unsure (1)..(277): unsure at all n locations; Clone ID: 701130928H1
caaaccatggcttccaggaaattcgacaaccctcactccggcgnccggcgccagtcccaggcaaaatcttcatacggagggttagccaaagacaccaccctagagacgttcgtgaagtactttgagaagtacggggagataacggactccgttataatgaaagaccgtcacacgggtcggccaaggggattcggcttcatcacctacgccgatccctccgtcgttgaccaagtcattcaggagaaccacgtcgtcaacggcaagcaggtcgagatta

SEQ ID NO: 45666 - DNA, 237 bp, Glycine max
  Clone ID: 701130930H1
attaaccgaacatgaattcctattgggacaccggcgccggcggtggcggtggcgcgacgctcatcccgggtctcccaaacgacgtcgcggcgtcgatcctctcgatggtcccctactcccaccacgggaggctcaaagccacatgcaaatcatggaaactgcttctctcctcgaaatttttcttagcctcgctgaacggaaagaaccaccttctctgcatcttcccgcaagatcctt

SEQ ID NO: 45667 - DNA, 277 bp, Glycine max
  unsure (1)..(277): unsure at all n locations; Clone ID: 701130931H1
gcttcagattatnctagctcttcatttctccatgttccaatattatgatgtaaatttctcaaactccactgtttcagccacattttggtctaaagatccgtgctttgacccttggcaggttcagcttttgaaggggttggagtttttcttcctcatangccattgatgcngtccatgtttttctttttctctctctaaagttcaaagtttttgttgttttccccccgtgtctttctctctcttgtggtggacttgaggaatgctggggtcagaggtt

SEQ ID NO: 45668 - DNA, 283 bp, Glycine max
  unsure (1)..(283): unsure at all n locations; Clone ID: 701130932H1
cggcgttngaatncncnaatgattagaanatcatcagcattcacataggtcaggccgggatccaggttgggcaactcctgctgggaacttctactgcctggaacatggcatccagcccgatggcatgatgccaantgactcctccttcggtgtagcccacgacgcttcaaacaccttcttcagcgaaaccggatccggcaagcacgtccctcgcggccgtcttcgtcgatctcgagcccaccgtcatcgacgaatccgttgtggcactaccgtcaactcttcc

SEQ ID NO: 45669 - DNA, 280 bp, Glycine max
  unsure (1)..(280): unsure at all n locations; Clone ID: 701130933H1
ancaaacccttcactactccaaattccaaaacttcttcacactccttctttnccctcttctgttgcccgatcttcaaggcctcttggctggttatatatatccaggtcacaacatcgtaatatggaagcaaataaaggcttaagtccctctaagcaccgcancatgatatcttttgcaaatcagaacactccatacttttaacnatttccaantccaggggnncattcccaataccaaaatcttggaggnagaagacgggnacagaagagggaaagangg

SEQ ID NO: 45670 - DNA, 285 bp, Glycine max
  unsure (1)..(285): unsure at all n locations; Clone ID: 701130934H1
aagaaaccaaacaaaaacgaaacgaaacgaaacgaaacgaaacgaaaccactncactcgtgtgtgntggtgggtagtgtgcttgctactataccatggattcccattcccctgttctcacctcaacgacgtcgttgtcgtcaatgtcgaagcgtccgtgtccgtcccaaaaccctagagcggagaacctgggagaggtggagcgtcggcttgaggcgtttntctccctcttcggacgtggcttctctctcccttgatctctccttcgagaggctcctccaatcgg

SEQ ID NO: 45671 - DNA, 278 bp, Glycine max
  Clone ID: 701130937H1
caaagctcgaaggtgaacagtgagtgagtgagttattcagaacccaggatttggcgaaagtgaagcgatgagcagtgataggaatattggggttgccttggacttttccaaaggaagcaaaatcgctctcaaatgggctattgacaatcttctccgcaacggtgacatactctacatcgtccacatcaagccttccggaggaagtgaattccgaaatcttctctggtccaccactggttcacctctgattccgttgtcggagtttcgtgagaaggagg

SEQ ID NO: 45672 - DNA, 275 bp, Glycine max
  Clone ID: 701130940H1
gaagcacaaaatgaagtgaaggttaaagagcaagaggaaaaggatgtagttgcacaacagaacatgtatgctcaattgttgcctcttgctttgcctgcaccaccaatgcctggaatgggaggcccaggaggtatgggaggaggctttgctcctccccctccaatgggtggactggggatgcccccaatgcctccttatggcatgcctcccatgggcagcagtttttgacaagtttagcatgaacttggcccctgtgaagagcaatgtaggaactt

SEQ ID NO: 45673 - DNA, 276 bp, Glycine max
  unsure (1)..(276): unsure at all n locations; Clone ID: 701130941H1
gaaaccctatatagtatatggtccttgttaatgctattaatattaattgtgatttggccttgttggatctgagttatggaaatggagaagaggaagaacaagagggtcatgagagaggaagaagagagtgaaagagtgaagaacaagagacncaaagggtgtagaagaagaagatggtagtgatggtggtgttcccacnnnnnnnnnnnnnnnnnnnttttttgccatactaagaaggatgagggtggcggtgaagtactttgatgacaaagggag

SEQ ID NO: 45674 - DNA, 272 bp, Glycine max
  Clone ID: 701130943H1
ggatgtccaggcaatgaaagccgtggtcggagaagaagcactttcatctgaggacctgctgtatttggaatttttggagaagtttgagaggaagtttgttgcccaaggagcatacgatacacgcaatatcttccagtcactagatcttgcatggactttgcttcggattttccctcgcgagcttctccaccgtattcctgcaaagactcttgatcagttctacagccgagatgccagtaactgaggatataataatagcaaggtcttataag

SEQ ID NO: 45675 - DNA, 270 bp, Glycine max
  unsure (1)..(270): unsure at all n locations; Clone ID: 701130945H1
tccccgaaactggactaaaaccagctgcatttgcggcacttgttccgaacagtgctaataaaccactggaggagttgatagatgaaataatgggagaccatgagatgttgactggagaacagctatgaagagattggaaaagagatctgatctgattganaccaacaattttttgcagtatcagggcatcaaactatgcattataaaatataaatcccaatctactgaggattttaagtatatganatactgtcttttgtgacgcaagtt

SEQ ID NO: 45676 - DNA, 272 bp, Glycine max
  Clone ID: 701130946H1
gcttcttgctgcttcactctcagatggctcgtgctgccacctacacagttggagattctgggggttggacctttaacactgttgcctggcccaaaggaaagctctttcgggctggtgacacacttgctttcaattatagccctgggactcacaatgtggtggccgtgaacaaggctggatatgatagctgcaagactccaagaggagccaaagtgtataagtcagggacggatcagatcagacttgccaagggacagaactacttcatctgt

SEQ ID NO: 45677 - DNA, 282 bp, Glycine max
  unsure (1)..(282): unsure at all n locations; Clone ID: 701130949H1
ggatgnccaggcaatgaaagncngtggtnggagaagaagcantcncnatctgaggacctgntgtatntggaatttnggngagaagtttgagaggaagtttgttgcccaaggagcntacgatacacgcaatatcttccagtnactagatcttgcatggantttgcttcggattntccctcgcgagcntntccancgtnttcctgcaaagactcttgatcagttctacagccgagatgccagtaactgagganataataatagcaggtnttatagtttacctag

SEQ ID NO: 45678 - DNA, 282 bp, Glycine max
  Clone ID: 701130950H1
gctgtacctacctccaaagggcaagcacttgctgatgagtatggtatcaagttctttgaaactagtgcaaaaaccaacatgaacgtggaagaggtcttcttttcaatagcaagagatattaagcaaaggcttgcagacacagattcaagagctgagcctcagactatcaagattaaccaacctgaccaggcaaccagtggtggtcaacctgcgcaaaagtcggcttgctgtggttcatgaaaagaatcagtatctgtagaaagaggtgcacaggtttctgca

SEQ ID NO: 45679 - DNA, 284 bp, Glycine max
  unsure (1)..(284): unsure at all n locations; Clone ID: 701130951H1
canactccnatnaaggnggacttacacnacntatcaaaccttccctagcaagctcgccccctatcaccagtggtcaaggaaatttttcgaactgatggcgaacagttcctcaagtatccaccanncaaagtgatgcaggtggataagtctgcatggatgactgatgaagaatttgctagagaaacgattgctggtgttaatccanatgtcattaagattcttgaggagttccnaccacgtagcaagctagatcctcaagcctacggtgatcatacctctataat

SEQ ID NO: 45680 - DNA, 242 bp, Glycine max
  unsure (1)..(242): unsure at all n locations; Clone ID: 701130953H1
agctattgttgcattggctgtgttactgcttnttacagggacctcttcagctaacctctcaaagaacttctattccaagacatgtcccaacgttttcaacactgtaaaatctgtcagttaaatctgctgttgtcagagaacctcgcattggggcatctattgttcgtctcttcttccatgactgctttgttcaaggctgtgatgggtcaatactacttgatgacactccaaccttccagggg

SEQ ID NO: 45681 - DNA, 278 bp, Glycine max
  Clone ID: 701130954H1
ctgagtttccacactgcataccttaaagtcttccgaattcgaagttaatttgcaagatggctaaggaaaaggctcagatcaacattgtggtggttggtcatgtggaccctgaggaggcaaccaccattaacgagctgaagaagcctgttgtggagaaagaagctccagggcatgccatatgagggcatgcacgtacggcctcggaggggaaccagaaaattatgttaacaaaataatctggaaccctaatgtatcagtgtcatcatcagtgtgtagtt

SEQ ID NO: 45682 - DNA, 276 bp, Glycine max
  unsure (1)..(276): unsure at all n locations; Clone ID: 701130955H1
caagtcgtttgtcccgcaggtgcagacgacctgtcttcatagccaaacaacctcaaaaacattcaacaacgttcattnttaattcatcataaaataaaaacaagtttcgattttttatctttgttttgtttctgatccattcatggaggtgccgagttcctgggatgctcttcgcnaacaggcgagaaaacttgaagctcagttggatgagcagatgaattcttatcgtaaattggtttctgctaatgtttctacaaaagctgacattnccagaga

SEQ ID NO: 45683 - DNA, 277 bp, Glycine max
  unsure (1)..(277): unsure at all n locations; Clone ID: 701130956H1
ggnatgcttcaagcaccaggtgccacaagttatataggttgcataggaaaggacaaatttggagaggagatgaagaagaaatgtacactagatggtgtaaaggttaactattatgaaatcgacaatacacctacaggaacttgtgctgtttgtgtggttggtggtgaaaggtcccttgttgccaanctatcagctgcaaattgctacaagtctgagcatttgacgagaccggaaaattgggcattagttgaaaaggccaagtattactacatttctg

SEQ ID NO: 45684 - DNA, 273 bp, Glycine max
  unsure (1)..(273): unsure at all n locations; Clone ID: 701130957H1
gtagaggcttatgtttatgacacgagaaacaagcttaatgacaaataccaagagtttgtcgttgattcagagagggaatcatttactgctaaacttcaggaggtagaagactggctatatgaggatggtgaagatgaaactaaaggtgtatacattgccnagctagaagaactcaagaagcaaggtgatccaattgaagagcgttacaaagaatacatggagaggggtacagtaatagatcaacttgtctattgtataaatagttatagagaa

SEQ ID NO: 45685 - DNA, 271 bp, Glycine max
  unsure (1)..(271): unsure at all n locations; Clone ID: 701130958H1
ggcaggtggaatccaattctcaanccccaatcgttagactaagcaagaggtcgttcagtgtaagtactccttgttcttgtttctgtttcatcatttttgatcttatgctagtcgaatcaattgtgatgcttagaattagtcaatgaagncccctgtgcgttacttgattgttattttgaccttcgtctgcacctcggtttgctacatcgaacgagttgggttttccatcgcgtacacagttgctgctgacggtgccggagtgaatcaatcg

SEQ ID NO: 45686 - DNA, 269 bp, Glycine max
  unsure (1)..(269): unsure at all n locations; Clone ID: 701130960H1
ggagtcggncagatgtaggaaggaccctagacctatcgctgtttggttcttatgaagatctgtataggagacttgccatcatgtttgggatgaaaggtctganattttgaaccatgtgctctaccatgatgcagctggtgctgctaagaaaaccggagaagaaccctcagtgacttcatgaagacagcaaaaagattgacaattctgacggattcaagcagcaaaaacattaaaagggcctttattacaggaactcgtaatggtgaaca

SEQ ID NO: 45687 - DNA, 271 bp, Glycine max
  unsure (1)..(271): unsure at all n locations; Clone ID: 701130962H1
atcagccttatccagtttagggtttcggttccttaccctacctttnangtatcgaaaccttaaatttgggattaggtctgagcaatctggttggtagaacctttggtcttagagagtcaagttttatgtctggattagacgatcaaattcctactgccttcgatccttttgctgatgcaaatgctgatgactcgggtgctgggtcaaaggagtatgtgcatattcgcgttcagcagcgaaatggtaggaaaagcctgacaaccgttcaggg

SEQ ID NO: 45688 - DNA, 283 bp, Glycine max
  unsure (1)..(283): unsure at all n locations; Clone ID: 701130965H1
aaaacgcaccggtttgttcctgttctcgttncaaaagaaaactgacacaagtgaggnttggtgcataaacagcaatggcagaaaaaccccaaccggttcgggttctctactgcggcgtgtgcagtttgccccccgaatactgcgaattcggatccgatttcgagaaatgcaaaccctggttgatccaaaacgtccctgacctataccctgatcttctcaaagagaaggaagctgataaagttgctgacaaactacaaagtacgggtatatctggagctggtga

SEQ ID NO: 45689 - DNA, 234 bp, Glycine max
  Clone ID: 701130968H1
atgtctgtctctggtgttgcagagagtgtttgattgtgaatcgagatgctctgcccccaaggtgctcctttctgatacgagttaccttgtccttctaacatgcacactctggcaccacaaattcctgcaaagcttctggcagcacctgctcccctgctctctactacttacacccagaaaagcaagaacaaaaacatgtttattagagaaacactatgcagaagcagtgatggt

SEQ ID NO: 45690 - DNA, 271 bp, Glycine max
  Clone ID: 701130972H1
cttgcttctttcatgtcctcttcaaggctgcagccttggcattttacattctctcggccctctttattgataactttgtcatcattttcgtggtgactgtccttcttgccgcccttgatttttgggtagtcaagaatgtcagtgggcgaattttagttggattgaggtggtggaatgaaattaatgatctgggtgagagtgtttggaaatttgaatgtcttgaccacgagtcattggctcggatgaacaagaaggactcatggcttttctt

SEQ ID NO: 45691 - DNA, 271 bp, Glycine max
  unsure (1)..(271): unsure at all n locations; Clone ID: 701130974H1
gggcgtcgtttcttcaatcgtttctggatccgaagaagaactggttcgccgctcagcacatgaaatccctctccaaacgcctccgcaaatatgggctccgatacgacgatttgtacgatccttactacgatctggatgtgaaggaggcgctgaatcggcttccgaaagaggtggtggacgctcgccacgcgcgtcttnaacgcgccatcgatctttccatgaagcacgagtacctccctgacaatctgcagtcaatgcaaacaccattcag

SEQ ID NO: 45692 - DNA, 238 bp, Glycine max
  unsure (1)..(238): unsure at all n locations; Clone ID: 701130975H1
gcgtggagctggcagctgttgttgttgagacctcatancgaacngaccactgaaggactgcatgatgataacacacatgctgaagaaaggatgctcaaagtgcttgacagatgaaagatgcttgtgcagttcaggagaaaatgaagcttctgattgcactactgttatacttccaggtggtgtacatggttcaccaaacaaaggtgaacctacacctttgatctatcgatggaaaacc

SEQ ID NO: 45693 - DNA, 225 bp, Glycine max
  Clone ID: 701130976H1
tgagtagcgtgttggagcatggtgttgtgggatgttgcaaatcagggccaggctatgctaccccactggaagccatgtctggtccaagagagtctcttatttatgtaactgctgtctacacagggacaggaatagagaagccggactatttggccacagtggacatagatccaaactctccaacttattccaaagtcatccataggcttcgtgttcctatttagg

SEQ ID NO: 45694 - DNA, 244 bp, Glycine max
  unsure (1)..(244): unsure at all n locations; Clone ID: 701130977H1
gaagccctgaaagcaaaggtggctgaggcaatggacgtcctaaggaatgttgctcagcagcaggctggcggtactgctgatcagctggcttccttatctcttaatgacaaccttgtttcttaaggtttatattttggagtttacntagtgatgatggnttgntattttctgcactggctttgatacagatttcaggttgagnttgtttcgttatctcttaatgacaaccttgtttcttaaggtt

SEQ ID NO: 45695 - DNA, 272 bp, Glycine max
  unsure (1)..(272): unsure at all n locations; Clone ID: 701130980H1
aatcgatgtcttactccattttaaggaacaaaacaagagaacaatagcctgacaaagggtttagccataaaatcgaatccatcattgatttgagatattgataaggtgaatactcatttctcgtcaatgctaggcataatgcgggtatagggacctaaaaaagattatcttttcttccnntcttatgaactttaaggtgtatgaagtgtcatttcctatcttagattttaattttagtaggtagataaagagtccatttaacttaagttgat

SEQ ID NO: 45696 - DNA, 281 bp, Glycine max
  unsure (1)..(281): unsure at all n locations; Clone ID: 701130981H1
aggactacgtagaccctccgccagcccccctcatcgacttggccgagattaagctctggtccttctacaganccctcatcgccgagtttatcgccacactcctcttcctctacgtcaccgtcgccaccgtcattggccacaaaaaacagaccggaccatgtgacggcgttggccttctcggcatcgcatgggccttcggtggcatgatctttgtcctcgtctactgcaccgccggcatttctggtggacacatcaaccctgcggtgacttttggcctgttt

SEQ ID NO: 45697 - DNA, 270 bp, Glycine max
  unsure (1)..(270): unsure at all n locations; Clone ID: 701130982H1
cacaacaggagacttccgtaagctcatactacctctggttagttcttatcgatntgaaggagatgaggtcaacttgaccctggcaaaaactgaggcaaaattgctgcatgagaagatttcaaacaaggcttataatgatgacgacttcatcaggattttggccacaaggagcagagcacngattaatgctactttgaatcactacaaagatgcatttggacaagatatcaacaaggacctgaaggctgatccaaaggacgagttcctgtc

SEQ ID NO: 45698 - DNA, 278 bp, Glycine max
  Clone ID: 701130983H1
cgaaaatgaacgacgcagatgtctcaaagcaaatccagcagatggtgcagttcatccgccaggaagctgaggaaaaggccaacgagatctctgtctccgccgaagaggaattcaatatcgagaagctgcagttggtcgaagccgacaagaagaagatcaggcaagaatacgaacgcaaagagcgccaagttgaaattcgcaagaagattgagtactcgatgcagctaaatgcttctcggattaaagttcttcaagctcaagatgacgtgatcagttcc

SEQ ID NO: 45699 - DNA, 273 bp, Glycine max
  Clone ID: 701130984H1
gtttgtatagatgatttacgaaagtatcagtgataccaatgaaaatttgttagttactgggggatacagagctagatttctgggtttgtgtagataatttacgaaagtatcagttataccaatgaaaattaaaataatatattcatgtgcacgttttctgtaagaccagctaaatcttaaacctgttccctaactttctatgttctgatatactagtttctgtttggtctgaatgggttggatatttgaccatatcagtatattggcaatgag

SEQ ID NO: 45700 - DNA, 274 bp, Glycine max
  unsure (1)..(274): unsure at all n locations; Clone ID: 701130986H1
cgcaatcttcactattttcaccgagcatttgcattccacattgaatatggctccnggctacacaatctaatgctgagttattggagtggcctaagaaagataagcgccgcttcctgcatgttgtgtatcgtgttggtgatcttgatcgcaccattaagttttatactgaatgttttgggatgaagcttttgaggaaaagagatattccagaagagaaatatgccaatgcttttcttggatttggccctgaacaatcccattttgttgtggaatt

SEQ ID NO: 45701 - DNA, 274 bp, Glycine max
  unsure (1)..(274): unsure at all n locations; Clone ID: 701130988H1
gagagttcaagtttccttttctttcctacaaatccaaaataatagttttagtttacaaaatggctgtggaactcatggggttcccaaaactagacgaacaaaaggccattcaagaagccgcatcagaaggcctcaagggcatgaaacacctgatccgaaccctttccanacaacnntcnnnnnncaacaccgaacttaccgacgttaccgtttcaaagttcaagaaacttatttcactcttaaatcgaaccggccacgcccggttcagacgcgc

SEQ ID NO: 45702 - DNA, 267 bp, Glycine max
  unsure (1)..(267): unsure at all n locations; Clone ID: 701130990H1
agctagctaggttgaaaatagtttggttttgtagtaagtgaggtgaggtgccaaaatggtgaagataactcttggtactttcgatgactcttttggtgttgcctctcttaaggcttatttggcagagttccatgcaactctgntcnnnacgttcgctggtgttggttcagccatcgcttacaacgagctacaaaagatgcagccttggatccaacggggctggtggcagtagctgtggcccatgcatttgcactgtttgtnggtgtc

SEQ ID NO: 45703 - DNA, 270 bp, Glycine max
  unsure (1)..(270): unsure at all n locations; Clone ID: 701130991H1
aantagcaaagatgtttcctttcgggcnaaannggtcaaaagataaaggggactatggtggttatgcagaagaatgtgttggatatcaacagcatcaccagtgttggagggatcgttgaccaaggcttaggcttcataggcagtgcagtcgatgcacttacttttgcagccaccaaaatctccatccagttgattagtgctaccaaggctgatggtgggaaaggaaaaattggaaagagtacaaatttaagaggaaagataacattacca

SEQ ID NO: 45704 - DNA, 114 bp, Glycine max
  unsure (1)..(114): unsure at all n locations; Clone ID: 701130993H1
gtgcttctctcctctgtctttttctctctcttgctatccttttgngctagtggcactgctggcaantgnaactccaagnngncgcagtgccaagccaccatgnttcaacattca

SEQ ID NO: 45705 - DNA, 103 bp, Glycine max
  unsure (1)..(103): unsure at all n locations; Clone ID: 701130996H1
tatctctgaagccattctcgttcancttgtttttttatcttctctttatctccctcaacaanattcctataaagttcgtagcggcttccacacaacatacgac

SEQ ID NO: 45706 - DNA, 245 bp, Glycine max
  unsure (1)..(245): unsure at all n locations; Clone ID: 701131001H1
atttgattgatggctgtaaactgtacttcctcaantcgaatcccaattcagaaatatggatcatttctcaagtaccccaacaaaaaattgatgtccaaacgcagctatgtcccaatgaaaaaggcatcggtactgaggatcacagcatccatcaagaacaaggtttatgaagatcactcccagggcataatctgctaccaagatgagtttggagaaatagtttgtgaagggtatgatgaagggcc

SEQ ID NO: 45707 - DNA, 265 bp, Glycine max
  unsure (1)..(265): unsure at all n locations; Clone ID: 701131002H1
gaggatatatggagtatggatgtcagcattaccggagaagatgccgtatcagggccccatgttgcaatgagatttttgattgccgccattgtcataatgaggcaaaagcaagccagactcatatgagttatgactcataatgtaccagaatgatatcaacattgatcagaancatagacatgatattccacgacaccaagtcaancaggtgatttgttcactttgtgggactgaacaagaggttcagcaaaactgtataaattgt

SEQ ID NO: 45708 - DNA, 259 bp, Glycine max
  unsure (1)..(259): unsure at all n locations; Clone ID: 701131003H1
caaaaaccctaaccccgattcactntctccgacctcttacattcggattcgtaaccgaaaatcggatggagagaagtgttnattacagttcagaggagnaatgcacggaggattatcggcgtggaggataccacgcggttcgagtcggcgacgctttcaacaatggccgttacatcgtgcagtccaaactcggttngggccatttttccaccgtctngctcactncngacatctcaattcgcatatgtagccctaaaat

SEQ ID NO: 45709 - DNA, 262 bp, Glycine max
  unsure (1)..(262): unsure at all n locations; Clone ID: 701131004H1
gcttagcaaccgcatatggcagagganagctttgatctccgcncggaccttattttctggctactgcttctcactcttcatcatcttcccatgcgatctcgcttcgcttcgccaaagctaatgctccttcttcttcacatgtcattttcnattttgcacgtgtggacagatattggttttctactcaacccgccctntcgcttcccgcgagcaagatcgtggacgtgccgttggcacaaactggtgaaggcatcgcagaatg

SEQ ID NO: 45710 - DNA, 266 bp, Glycine max
  Clone ID: 701131007H1
aaccacataagcttcaacaaagatggatgtagaaaagttgaagaagatggccagttctgttcgaactggtgggaagggtactatgagaaggaagaagaaagctgtccacaagactactactacagatgacaaaaggcttcaaagcaccctgaagaggataggagtgaatgctatccctgcaattgaagaagtcaacatctttaaggatgaaatagttatccagtttttaaaccccaaagtacaagcatctattgctgccaacactt

SEQ ID NO: 45711 - DNA, 269 bp, Glycine max
  unsure (1)..(269): unsure at all n locations; Clone ID: 701131008H1
tctactcgcngctcgatgggtattgcncttcaaggcgtctcgtanggctaatcngcctcacgngggtcancaacggcangnnccctttggnggnccnaggccccctanntgctggtcggcanacggacggngggcgcacgcgttcgcttctagcccggattctgacttagaggcgttcagtcataatccaacgcacggtagcttcgcgccacnggcttttcaaccaagcgcgatgaccaattgtgcgaatcaacggttcctctcgtact

SEQ ID NO: 45712 - DNA, 268 bp, Glycine max
  unsure (1)..(268): unsure at all n locations; Clone ID: 701131009H1
gagaatatgaagttgtttgttttctttgttgctgcagtagttttggtagcatggccatgccatggcgcaggctaccaaaggttccctctccgaatgaaaactggctatggtgagcgttcttcggaggtaaaatgcgcaagttttaggcttgctntggaagcacacaacatccgagcgncttaaaaccattcctgaagagtgcgttgaaccaacaaaggactacattaatggcgaacatttagatcagactctaaaacagttanccaac

SEQ ID NO: 45713 - DNA, 266 bp, Glycine max
  Clone ID: 701131011H1
caacgaaggatatggcgattcttccttctcttgcagttccttcaactcccatttctcgggtaaagctgtttcagtgccaaccctgtcaattccatagatgcacagaactatatcttccccatcaaacatattatactcgaactagatcaattaaagtatcaatggcagaccataatgagccgagtgaggttaagatgcagattgggatcatgagggagaaacttaaagaagcaatgccagtctcagttcaagaatttccttggaaa

SEQ ID NO: 45714 - DNA, 264 bp, Glycine max
  unsure (1)..(264): unsure at all n locations; Clone ID: 701131013H1
gagtgttgagttgtgtgacatgtaanaccaaactcactcaaacctacctttgtttttctccttctttttcttctcagtttcattctcttgctcatggacatggatgtttgccgaaatatatcagtttcttcaagtgagtgtcagcaagagcttcccacccttgatgaccttttctgtcatcagaacacggaagtggattttggcatggaatggntatcagtgtttgtggaagactgtttctctagtaggccaagttgcctcttg

SEQ ID NO: 45715 - DNA, 270 bp, Glycine max
  unsure (1)..(270): unsure at all n locations; Clone ID: 701131015H1
caaaaagtttggagagagaanngaaganaaccaaaaaaagaaaaaagtgttcattttttttttaccattaagcaaaggtattaggcaaggcaagcacactacttattgttgtncattgtgaaatcntcatcatcangggttgctcagcctcannnnccatcaccatagtggccaacaacaataaccaagnggatccatctccttctgcttctcttgcttntnncttcttcttccttctcttcctcttctgcttnacacaaatccntnnng

SEQ ID NO: 45716 - DNA, 267 bp, Glycine max
  Clone ID: 701131016H1
tagaaacagtgtgatgaaaatgaaggtccttgttttcttcgttgctacaattttggtagcatggcaatgccatgcgtacgatatgttccctctccgaatgaacactggctatggtgcccgtactccggaggtgaaatgcgcaagttggaggcttgctgtggaagcacacaacatctttggctttgagaccattcctgaagagtgcgttgaagcaacaaaggaatacatccatggcgaacaatatagatcagactccaaaacagttaa

SEQ ID NO: 45717 - DNA, 269 bp, Glycine max
  Clone ID: 701131017H1
ggacgaccctgccaaggaagctgccaacttcacatcccaagtcattatcatgaaccatcctggccagattggtaatggatacgcaccagtccttgactgccacacttctcacattgctgtgaagttttctgaaatcttgaccaagattgacaggcgatctggtaaggagcttgagaaggagcccaaatttttgaagaatggtgatgctggtatggttaagatggttccaaccaagcccatggtggttgaaactttctctgagtatcctc

SEQ ID NO: 45718 - DNA, 263 bp, Glycine max
  Clone ID: 701131018H1
ggtaccccactatacaacatcaaggcatacctccctgtcatcgagtcctttggtttctcgagcacattgagggctgcaacatcaggccaggccttcccacaatgtgtgtttgatcactgggacatgatgtcttctgacccattggaggctggatcacaagctgcacagcttgtcactgacattcgcaagaggaagggcttgaaggaacagatgactcctctctccgagtttgaagacaagctttaaatttgtttcatgaatta

SEQ ID NO: 45719 - DNA, 262 bp, Glycine max
  unsure (1)..(262): unsure at all n locations; Clone ID: 701131019H1
aatttctacaagaacccatcaatctcctacaaaaaacgtttaancatctcctccgttcttcagaacctccatggtccattccctttcctctttcaaactctctctatctcattcgatgctctaacttaatcaattttcaaattccagcttacancatcgnncnccggcaatgttcctcccgccgatccaccgcaagcgacttccaccgccaatgttcnnccggcaatccaccgcatctcactccctccgccagactcaaacg

SEQ ID NO: 45720 - DNA, 262 bp, Glycine max
  Clone ID: 701131021H1
ggaggccaagaaactaccccgttgacatctattactcagcttgttcaccatggattgatctttgtccccattggatacacatttggcggtggcatgtttgagttggagaaggtgaaaggtggctccccatatggtgcaggaacttatgctggagatggctcaaggcagcctagtgaattggaattggctcaagctttccatcagggaaagtactttgcgggcattgcaaagaagctcaagggatctcaatgatttttatcct

SEQ ID NO: 45721 - DNA, 265 bp, Glycine max
  Clone ID: 701131022H1
gtcttcataaacgcctttcttctccgtttccgtttcctcgttcgaattcgctttttgatctgcgaaaatgagagagtgcatctcgatccacattggtcaggctggtatccaggtcggaaatgcttgctgggagctctactgcctcgagcacggcatcgggcctgatgggcaaatgccaagtgacaagacagttggcggtggtgatgatgctttcaatactttcttcagcgagactggtgctggaaagcacgtgccacgtgcagtg

SEQ ID NO: 45722 - DNA, 268 bp, Glycine max
  unsure (1)..(268): unsure at all n locations; Clone ID: 701131023H1
gggangttttgnngtttgaatctatagaatagaatcaaaccaaattgaaagaagatcgatcgatccgatcgatggctctggtcggagttgaagtgaancatgcggcggagggcgcaccggaggagaattgctccgccaagcccaccaagcagggcgagggcctccgccactactattctcacaacatccacgagtctcagctccttctccgtcaaaagacgcataacctcaaccgtcttgaggctcagagaaacgagctcaattccag

SEQ ID NO: 45723 - DNA, 259 bp, Glycine max
  unsure (1)..(259): unsure at all n locations; Clone ID: 701131024H1
catgttttattacagagatctctaatctagtttggactcaaattaaatacaataaatggaaaataaatacgtttgagacactttatttcaggataacctcaattttatcataagacggatgcagagcatcacaaagctacactcttaacatgacctagtccccggcgacattcaccatccaattcatggttctgtgcgcanaaacaggaaattttatactaatcagctctggattggccagcacgtgaagagaggatga

SEQ ID NO: 45724 - DNA, 267 bp, Glycine max
  unsure (1)..(267): unsure at all n locations; Clone ID: 701131026H1
tggaagttgatagtaggtttctgaacactggcctcctccttgtggccacaatccttgtggtcaagctcatctcagccttcntagttcnccaaatccagaaagagggtacccccaattgtgaaggggtggcccttaattggaggactcatccgtttcctcnaaggtccaatctttatgctccgtgacgagtaccctaagcttggaagtgtcttcactctcaaactcttccacaagaacatcaantncncacattggccctgaggtttc

SEQ ID NO: 45725 - DNA, 259 bp, Glycine max
  Clone ID: 701131027H1
caaccaacaatggcaatggcaacccaagcctctctcttcaccccacccctctccggtctcaaacccagcgaccgagccaccgcgccatggaaacaatcctccaccctctccttctccacctcgaagcccctcaagttctcgcgaacaatcagagcagcagccaccgaccagaccacagaggcaccggttgggttcaccccaccggaactggacccaaacaccccttccccgatcttcggaggcagcaccggcgggctcc

SEQ ID NO: 45726 - DNA, 266 bp, Glycine max
  Clone ID: 701131028H1
taaattttgatcttccaaatgacattgacgattatgtgcaccggataggaagaacgggacgagctggtaaaatgggattagcaacggccttcttcaacgaaggtaatttgaacttggctaaatcattggctgatttgatgcaagaggcaaatcaagaagtacctgcctggctcagccgatatgcagcaagggctatttacagtggtggcaacagaaataggaagtctgggggatctcgttttggtggccgcgattttaggaaagag

SEQ ID NO: 45727 - DNA, 239 bp, Glycine max
  unsure (1)..(239): unsure at all n locations; Clone ID: 701131030H1
aattgttagacgagtgcngctggaaatggctgaaganggtgacctgtttggaaaatctnncccgcagacactatctacacctttcatactcgggacctcagatctatgtgccatgcaacaggactgttctggcgatttacatgcagttgggtctctcctctacgataaagcaggggttgaatccaatttaagtgaaagagaaacagttttggaggtttgtgagactattgtaaagcgag

SEQ ID NO: 45728 - DNA, 266 bp, Glycine max
  unsure (1)..(266): unsure at all n locations; Clone ID: 701131031H1
atttattatggntcataggttacgttgttttgtgacaatacccaaaattccttttctattgctactttactctgattntcgtcttcagttacgttaacgcagccttcgacctcgctactatacccttcaacgatggctattctccgctcttcggagatagcaacgttgttcgctccgaggatggcaacggcgtacaactccgcctcgatcgctacacaggttcgggtttcatttcctccagtatgtaccagtatggattcttcagc

SEQ ID NO: 45729 - DNA, 268 bp, Glycine max
  unsure (1)..(268): unsure at all n locations; Clone ID: 701131033H1
ctctctctctctctgattgcttccttttcccttttattttgctcncttctctgcacaacaattccttctcattccagatattccaaccatcgaccgatctcaattctcaaccttaacctctcagaatgtcttacgcttatctcttcaaatacatcatcatcggtgacaccggagttgggaagtcttgtcttctacttcaattcacagacaagcgctttcagcccgtccatgacttgaccatcggtgttgaatttggtgccaggatgat

SEQ ID NO: 45730 - DNA, 242 bp, Glycine max
  unsure (1)..(242): unsure at all n locations; Clone ID: 701131035H1
caaganggaagtgttgtgggaggaaanaggcagagctgcaatacaccagagtggaagcgcgaaacggtcctccccggctttccattttttctcttctgatgaactttagcctcatgctcaactccgttggattctaccaaatatcaaaactgagcatgattcctgtggtttgtgtgatggaatggatacttcacaacaaacactcactcaagggaagtgaaaatgtcagtggtggttgtggt

SEQ ID NO: 45731 - DNA, 258 bp, Glycine max
  unsure (1)..(258): unsure at all n locations; Clone ID: 701131036H1
gttgcatcatagtaanagaangaaancctnnanganangatggttnagatggatggcgttngcngtaagtntcancaaccaacacttnactactcnancgacattcatcaacnaggaatctctaactgtttcgacgacgatggtcgccccaaacgaaccgggacggtgtggactgcaagtgcacacataataactgcagtgattgggtctggggtgctgtctctggcttgggctatagctcagcttggatggatgctg

SEQ ID NO: 45732 - DNA, 264 bp, Glycine max
  unsure (1)..(264): unsure at all n locations; Clone ID: 701131040H1
cgangtcgtttaacgctaaacgacattacctccgcaaccggtgaacggcagaagaagtaaagcgagaaaaccgatattcgcactttaccgcacccagcgactccgcgtggttttggcgaaaacttctagaacattcttccatggaggttatcagggttctagcggcggcgatcgtggtagcggtgcttgcggcggctcttccggcggacgccgacgacgacaaccgagtattcgcgccgtgcacggacacgcgagtgcagagat

SEQ ID NO: 45733 - DNA, 248 bp, Glycine max
  unsure (1)..(248): unsure at all n locations; Clone ID: 701131041H1
gcaagaaacacgggctgcacgtctggctccaagaggcccaagagaaggcagagnctggcggggcttcagttgaaaacctcttgaacaaggcaaaagactttggtgcagggttttcctgggaaaagttgagctcacagattactacttcaatccaaaagcctgatgaggatgagaaaccaaaggtgcagctagccactgtaaggggacaggccaaggctcggaatctcgcgcctaacaaagcagtggtc

SEQ ID NO: 45734 - DNA, 264 bp, Glycine max
  unsure (1)..(264): unsure at all n locations; Clone ID: 701131043H1
tttctttgttgctgcagtagttttggtagcatggccatgccatggcgcaggctaccaaaggttccctctccgaatgaaaactggctatggtgagcgttcttcggaggtaaaatgcgcaagttttaggcttgctgtggaagcacacaacatccgagcntttaaaaccattcctgaagagtgcgttgaaccaacaaaggactacattaatggcgaacaatttagatcagactctaaaacagttaaccaacaagctttcttttatgc

SEQ ID NO: 45735 - DNA, 264 bp, Glycine max
  unsure (1)..(264): unsure at all n locations; Clone ID: 701131045H1
gaaacatcgccatcggaaggcctgaagaggctactcaccccgacacgttgaaggcggggttggctgagttcatctccaccttgatcttcgtgttcgccggttcaggttccggcatcgcctacaacaagctcaccgacaacggcgccgccactcccgccggcctcatctccgcttccatcgcccatgctttcgccctcttcgtcgccgtctccgtcggcgccaacatnntggcggccacgtcaaccccgccgtcaccttcggcgc

SEQ ID NO: 45736 - DNA, 267 bp, Glycine max
  unsure (1)..(267): unsure at all n locations; Clone ID: 701131047H1
ggggtctcnaatggcctctgccacattgactcttgtattggcaatngtgtctctaagcttgncgtctcanatttcagctccataactacttgtaactcatcacctccaccacccaagaagcnagaaccggtgtctcacccacaccctcancctcancctccntatgtctaccactctcctccaccacctcctaagaagccatactngnaccattcnccaccanntccagtnnnncancacnntnnncnnnatcatgnntaccattca

SEQ ID NO: 45737 - DNA, 264 bp, Glycine max
  Clone ID: 701131048H1
atgcctcgtcatctaattagtgacgtttatagctatggtgttgtcttgctggaactgcttactggcaggaagcctgtggatatgtcacagccaactggacaagagaatcttgttacttgggctaggccaatccttagagataaggaccggttggaagagattgctgatccaagacttggcggaaagtatccaaaggaagattttgtacgtgtttgcactattgctgcagcctgtgttgctctagaagcaaaccaacgacccaca

SEQ ID NO: 45738 - DNA, 265 bp, Glycine max
  unsure (1)..(265): unsure at all n locations; Clone ID: 701131049H1
gacgcttcgcaaatctcaatcgaatctcagaaaaatgagagaaatcatcagcattcacataggtcaggccgggntccaggtcggaaactcctgctgggaactctactgcctcgaacatggcatccagcccgacggcatgatgccttctgactccaccttcggtgtagcccacgacgccttcaacaccttctncagcgaaaccggatctggcaagcacgtcccccgtgctgtcttcgtcgacctcgaacccaccgtcatcgacgag

SEQ ID NO: 45739 - DNA, 258 bp, Glycine max
  unsure (1)..(258): unsure at all n locations; Clone ID: 701131051H1
ctccgcaccagtttcaccgcacgaatatcttgttgtttggagcgatccgagaaaaactctgtaaacatgttggtttaccaggacctccttacaggtgatgagcttctctctgactccttccgttacaaggaaattgagaatggaatgctgtgggaagttgaggggaagtgggttgttaaaggagcagttgatgtngacattggtgcaaacccttctgctgagggtggaggagaagatgagggagttgatgatgcagct

SEQ ID NO: 45740 - DNA, 265 bp, Glycine max
  unsure (1)..(265): unsure at all n locations; Clone ID: 701131052H1
ctcacccccacactcccatctcacacacccctcgcatcccaacaatgtctctacaccattccctaccaacctctccaancccgccgccctccgccccaaactaagcccaaagctaaggtncgctgccacanccaccatcgtctgcngcaccnnnnnnnnnnnnnnnnnnnnnnnngtgtcctccgacctgaaggcgttctccgccgcgctggccctctcctccatcctcctctccgcccctctccccgccggcgccgacatctcg

SEQ ID NO: 45741 - DNA, 260 bp, Glycine max
  unsure (1)..(260): unsure at all n locations; Clone ID: 701131053H1
ctctctcaacaacttcaccttcttcctcctcnatcatgtcttacttcaagggcaagtaccatgatgagcttatcgccaatgctgcgtacattggcactcctggaaagggtattcttgctgctgatgagtcaacagggacaattggcaagcgtttggccagcatcagtgtagagaacattgaatccaacaggcgagctcttagggagctgcttttcactgctcctggtgttcttcaatatctcagtggtgtcatcctcttt

SEQ ID NO: 45742 - DNA, 262 bp, Glycine max
  unsure (1)..(262): unsure at all n locations; Clone ID: 701131054H1
gtttgttgtgagctataagctagtttatcgtgaggagaatatgaagttgtttgttttctttgttgctgcagtagttttggtagcatggccatgccatggcgcaggctaccaaaggttccctctccgaatgaaaactggctatggtgagcgttcttcggaggtaaaatgcgcaagttttaggcttgctgtggaagcacacaacatccgagcncttaaaaccattcctgaagagtgcgttgaaccaacaaaggactacattaat

SEQ ID NO: 45743 - DNA, 264 bp, Glycine max
  Clone ID: 701131055H1
tggtgatgtccctttctgttctcttcactcttggtcttgcgagagaaagccatgccagagacgaagatttttggcatgctgtttggccaaacactcccattccaagttcattgcgagatcttctaaagcctggccctgcaagtgttgaaatcgatgatcaccctatgcaaattgaagaaacacagtacccgaaaaccttcttctataaagaagaccttcatccaggcaaaacaatgaaagtacaattcagcaagcctccctttc

SEQ ID NO: 45744 - DNA, 265 bp, Glycine max
  unsure (1)..(265): unsure at all n locations; Clone ID: 701131058H1
ttcgccaagctggaaagaaaacgctccatttctgcgccactctctgccttatcgccccatttccgttccacaaaagannnaaaannnaanagattagtcgtagcagtgagaggcatcggagggggnataanacatggtttcaacagcaacagaaacannngcaagattagaaagcgccaggggtgcgcacgttagcaccgaaccccgtgggttcctctcccctaatcgcttcgcccccacggcattcctacgtgatccacacaac

SEQ ID NO: 45745 - DNA, 265 bp, Glycine max
  unsure (1)..(265): unsure at all n locations; Clone ID: 701131060H1
ggaaactgagttaaggcttggactgcctggaaacggaggcactgaagaagtgctcatacaggaagaggggtttctctgagactgaaactggtcatgaagatgagtctgccaccactgtggatttgatgcttaatctttcttctaaggagnnnnnnnnnnnnnnnnnnnnnnnnnnnnnnnnnnnngataagcacaagactttgcctaaggagnagacccttctgccagcagatcctgctaagcctccagccaagacgcaggtggt

SEQ ID NO: 45746 - DNA, 263 bp, Glycine max
  unsure (1)..(263): unsure at all n locations; Clone ID: 701131061H1
gttggagacttcacaaattgatttttatgaaattaatgaagcctttgcggttgtngctctcgcaaatcagaaacttcttggncttaactcggaaaaagtaaacgtacatggtggagctgttgcactgggtcatcctcttggttgcagtggtgctcgcattctggtgacacttttgggggtactgaagcagaagaatgggaagtacggagttggtggcatttgcaatggaggaggtggtgcatctgcccttgttgttgagcttc

SEQ ID NO: 45747 - DNA, 266 bp, Glycine max
  Clone ID: 701131064H1
cagagacgcagccatggggcggagacctgcgaggtgttataggcaaattaagaacaagccataccccaagtcacgtttctgccgtggtgttcctgatcccaagatcaggatttatgatgttggtatgaagaagaagggtgttgatgagtttcctttctgtgtccatctggttagttgggagaaggaaaatgtttcaagtgaggccctggaagctgctcgcattgcttgcaacaagtacatggccaaatttgctggaaaggatgctt

SEQ ID NO: 45748 - DNA, 266 bp, Glycine max
  Clone ID: 701131065H1
cttcaccgttcgctctttctttctcccctacacaaaacatggctttgcccaatcagcaaaccgtcgattaccccagcttcaagcttgtcatcgtcggcgacggtggcacaggaaagacaaccttcgtgaagaggcatctcactggtgaattcgagaagaaatatgaaccgaccattggtgtggaggttcatccgttggattttttcacgaactgtggaaagattcgcttctattgttgggatactgctgggcaagagaagtttggt

SEQ ID NO: 45749 - DNA, 263 bp, Glycine max
  unsure (1)..(263): unsure at all n locations; Clone ID: 701131066H1
tgggaaggcgagggattgcgctgcgtctcttcctcttctctttcgattcatccctacattcataatcttccaataccaacaacctcancctcacactcacacatacacacatctgaacgcgtatcgtccctcccatggcttcaaagcgcatcctcaaggagctcaaggacttgcagaaagacccaccaacttcttgcagcgctggtccagtagctgaggacatgttccattggcaagcaacgattatgggtcctgctgatagt

SEQ ID NO: 45750 - DNA, 257 bp, Glycine max
  Clone ID: 701131067H1
aaagaaagacccagagaagcctaaagcagaccctcccaaagccgaaaagcccaagaccgagcccgagaaaaagaaggacggtggtggcgagaagcccaaggaagagcccgaaaaaaagaaaggacggtggggagaagcctaagcccgggcccgagaagcccaaggataagccaacacccgcgccgttacctgtgcagccacatatagcggcaccgatggcggtcccagttgggatgctctatgctcctcctccgtgc

SEQ ID NO: 45751 - DNA, 260 bp, Glycine max
  unsure (1)..(260): unsure at all n locations; Clone ID: 701131068H1
ttcaanttctcgtcgtccctcatcatggctcgtctcgncgatcgctgtcgccgccgtgctcctcgtggccctctccgcctccaccgcgacggcgcgtccctgcaggaccttcataatctcctcctactcgttccgcaaccctaactccaacaccttcgccaccatcaccgagatccgatccttcacccctctctacatcaccgacaaacccaccggcaaaccctcctcctcctacgacctcttcttcccccacgcgactt

SEQ ID NO: 45752 - DNA, 256 bp, Glycine max
  Clone ID: 701131069H1
ctaaagttagttggaccaggtggatttgtagttactgaagctggttttggtgctgatattggagctgaaaagtttatgaacattaagtgtcgttatagtggtttgacacctcaatgtgcgattattgtggcaactataagagcactaaaaatgcatggtggagggcctgcagttgttgctggaaaacctcttgaccatgcatatttgactgaaaatgttgccctggttgaggctggttgtgtgaatatggcacgac

SEQ ID NO: 45753 - DNA, 261 bp, Glycine max
  unsure (1)..(261): unsure at all n locations; Clone ID: 701131070H1
cttcacttcactaatacatcatggcagacgagacccagaacaagtatgagagctctgaggttgaggtccaggatcgtggtgtttttgactttctcggtaagaaaaaggatgaagaagacaagcctcatcctcaggaggnggtcatcgccaccgagtttcaaaaagtcactgtctcagaccaaggagagaacaagcacagcctcttagaaaagcttcaccgatctgacagcagctctagctcttcaagtgaggaggaaggag

SEQ ID NO: 45754 - DNA, 264 bp, Glycine max
  unsure (1)..(264): unsure at all n locations; Clone ID: 701131071H1
ctcctaacaatttctctctgtttccttcttcaccgcatcaatgnncnttggacggcgttctcctcggcatgtgcaaccctactcctcgacatctctgccgtcgtcgacgacgctttcttgcaaaaatacggtatccaagttgaacgatgcgattctcgctgaggataagcacaaacctatgtatgaagaattggctaacaatcctaatgtggagtacattgctggaggtgctactcagaattcaatcagggttgctcagtggat

SEQ ID NO: 45755 - DNA, 262 bp, Glycine max
  unsure (1)..(262): unsure at all n locations; Clone ID: 701131072H1
gttgtaacagtggaatgggcnatctcagagctattgagaaggccagagattttcaagaaggcaacagaggagctagacagggtgataggtagananagatgggttgaagagaaggacattgtgaatttgccttatgttaatgccattgtcaaggaagcaatgaggctgcacccagtggcaccaatgttggttccaagactagccagagaggactgcaatcttggagggtatgacatccccaaagggacacaagtgcttgtga

SEQ ID NO: 45756 - DNA, 263 bp, Glycine max
  Clone ID: 701131073H1
aaggaactgcaagaacagccccaaaaaaattgagcacaaggcgaggacggagttattacacggtcaccagtcaggtcacattcacctcgtcgtggcagaagccgtgatcgcagttacagccgagatcgcagctacaggtaagatgattttatagttcggaattcttatgcatgcgatgtagtgatgcagcaaggtttcacattttttgtttgtaaagtcttatcctgtatgctgagttttgggtgccttcggccttgctagtc

SEQ ID NO: 45757 - DNA, 271 bp, Glycine max
  unsure (1)..(271): unsure at all n locations; Clone ID: 701131075H1
ctccataaccncaacngaagaaggttaaancccaccggaaacantnccatgcnaagcntngancagacccanngctncgtcncaggnacnatgattntgccatnncgtactctcagtcanaacngacaccgtcgncgncgtagtngtantcaatggnaccgaagcagaccanngntgagnagaagatcgcttacgatgcgaagtgtgcganctaatggaggagtacggccagatcctcgttgtgaactccgatanngtgggatcgaaccag

SEQ ID NO: 45758 - DNA, 264 bp, Glycine max
  unsure (1)..(264): unsure at all n locations; Clone ID: 701131076H1
gtctatcctctttctccctctccaatttctcngcanntcttcccatttcnatttgttcttcatcanccacctaccaaacnanatgaanacnangcaaacccaccaaacgtagcaaancaaaacgncaccacgtttcgaaagtgacatgcaacagtaaccaaaacacccnaacaccaaacccagaagaagaaagaccatcatncaacattctaggaaaatatagaagggatgtttcccttggcattgggggcctttacggtgcat

SEQ ID NO: 45759 - DNA, 242 bp, Glycine max
  unsure (1)..(242): unsure at all n locations; Clone ID: 701131079H1
gtgaggagaatatgaagttgtttnctttctttgttgctgacgtagttttggtagcatggaccatgccatggcgcaggctaccaaaggttccctctccgaatgaaaactggctatggtgagcgttcttcggaggtaaaatgcgcaagttttaggcttgctgtggaagcacacaacatccgagcntttaaaaccattcctgaagagtgcgttgaaccaacaaaggactacattaatggcgaaca

SEQ ID NO: 45760 - DNA, 261 bp, Glycine max
  unsure (1)..(261): unsure at all n locations; Clone ID: 701131082H1
atgctatncnaggactcagagtaagatnncttgaagcnncactgantcagtgatctntctnctctagnctttnnacctcaaacactgaccgtggncntngtgaagagncaagaaattgaangggatgttnatgatgagaanaagactagcatgctgcacaanggnaaggaaatttagcatcgatcatgatgagcnagagaggattatgacatataatggccncgagagttgcatgctgaacaaccagtcttacgaagatga

SEQ ID NO: 45761 - DNA, 257 bp, Glycine max
  Clone ID: 701131083H1
aagtaaacactgcaatagcaagagttttcaaatggcagagggaaaaggtagagtttgtgtcacgggaggcactgggttccttggttcatggatcatcaagagactccttgaagatggatatgctgttaataccactattagatctgacccaggacgcaagagagatgttagcttcctcacaaacctacctggttgcatcagaaaagctaaaaattttcaatgctgatctcagcgacccagagagttttggtccagcc

SEQ ID NO: 45762 - DNA, 257 bp, Glycine max
  Clone ID: 701131084H1
caggttcttaacttgatcagtgtgcagtgtccaaatcataagggtagttgcaaattgcaatggctaagcatgatgttgagggtggttccttctctgcaaaggactaccatgatcctcctccagcaccgttgattgatgctgaggaactcacacagtggtccttctacagggctttgattgctgagttcattgccacaatgctcttcctttacatcacagtgctcactgtgattggttacaagagccagagtgatgtt

SEQ ID NO: 45763 - DNA, 260 bp, Glycine max
  unsure (1)..(260): unsure at all n locations; Clone ID: 701131085H1
gctcgcagtcacccaagaggcgaatccttaccattgctcgagatgggtgaagaagtgaaggccgtggttccagagtctgttttgaagaagcagaagagagaggaggaatgggcgttggccaagaagcaagacctcgaggctgcgaagaagaagagagccgagagccgcaaactcatctacaacagagctaagcagtacgctaaggagtacgatcaccaggaganggaattgattcggttgaaacgcgaggccaagctgaa

SEQ ID NO: 45764 - DNA, 261 bp, Glycine max
  Clone ID: 701131087H1
ggcggacatcatcttaagaggatactctggttggaattcaaggcgggctttggaggttttggatgaaattttccccaaggatgcttatgtgcaaccatcattggtaattgtgtattttggtggcaatgattctattgatcctcacccatctggccttggtcctcatgtaccccttgaagaatatgttgaaaacatgaggaaaattgctaatcatcttaagagcctctcggaccatattcgcattatatttctcacttctcc

SEQ ID NO: 45765 - DNA, 243 bp, Glycine max
  unsure (1)..(243): unsure at all n locations; Clone ID: 701131088H1
aggggtgtttccaccaaccggggnacctncaggaggctcacaagcgaacaagttcagttccntgaaaggaactttgaggtagagaacaagcttgaacccgaaaggaaagtccaacttgcaaaagancttggcttgcagccaaggcaagttgctatatggttcncaaaccgaaggcaaggttcaagaccaagcagctagaaaaagatatggcgtgttgaaagctagttatgacagactcaaaag

SEQ ID NO: 45766 - DNA, 263 bp, Glycine max
  unsure (1)..(263): unsure at all n locations; Clone ID: 701131089H1
cttctctcctctgtctttttctctctcttgctatccttttggctantngcactgctgcaagtgcaactcccaagaagcgcagtgccaagccaccatgtttcaacattcaacagaagccttttnccttccacttttctctttggngttggttcttctgcttaccaggcagaaggagcagcaagtgtagatgggagaggaccaagcatatgggacacctacactagacagcatactgaaaagatttgggatcatagcaccggtga

SEQ ID NO: 45767 - DNA, 262 bp, Glycine max
  unsure (1)..(262): unsure at all n locations; Clone ID: 701131090H1
cacatgcaatccacaaaattantcaacncagttcgtctattatcccccttattattgattcagattactaattnttnagtccncctcaatntaagttgttagatcctttcagtttatgtnattcttnttatgaatcttagcanatggangagcagtncaagactttgatatttgataaaactaataaaactnaagaatctcacaacttaaggttttgtggaattttgatttncttttagtnttnctttttatgaancttagc

SEQ ID NO: 45768 - DNA, 261 bp, Glycine max
  unsure (1)..(261): unsure at all n locations; Clone ID: 701131091H1
ttntctacttgctatctttctatttttcnttccctttgnatctatagncactaaaaaacactttaacccctgggagtgagaatctgcatcatcgaattttacaagcacaagccacaatcctcgcnaggnacagaaccgatnaattctcatcaacatgttcggngtagttttcccgaacnggngcttccccatggacatctcanggnttcgctcaaatcgacaccttccacacaacanagannttngaanaaaaggannnca

SEQ ID NO: 45769 - DNA, 264 bp, Glycine max
  unsure (1)..(264): unsure at all n locations; Clone ID: 701131092H1
cttcaaacttgacanaaatggcaacannattggcatcatctcccaattgggttccaagcgnagccaacatgtttggcagcctttgccgccctccttctcctcttnnnnnnnnnnnnnnnnnnnnnnnnatacaacctccccccaggcccaaagccctggcccatcataggcaacctaaacttaattgggtcccttccacatcggtcgatccgcacgcttagcaaaaaatacgggcccatcatgcacgtatggttcgggtcgagc

SEQ ID NO: 45770 - DNA, 263 bp, Glycine max
  unsure (1)..(263): unsure at all n locations; Clone ID: 701131093H1
gtgccaaaggacgaagttgagaacaggatagaacagatnanagaggtgntcnagccaaaaattagaaaaacttgaagaggaganagaatctgtgcttgctcagatggctgaactcaagaaaattttatatgcgaagttcaatgactcgntcaatcttgaggnggattagtaacttcttgttgatagatttctagttgttgttttcttgttaatatgacctaatggacctttggcatttttgagtcactgcctattttctttca

SEQ ID NO: 45771 - DNA, 262 bp, Glycine max
  unsure (1)..(262): unsure at all n locations; Clone ID: 701131095H1
gtttgctctgagaaccgaaatgggtgacgaacaaccgtcganccaccgccgtctccggtctccgtcgngtcatcnngctcatctcttccttgatctccctctccctctcgatcagagtcttcgccggaaagtggcaacttatccggagcaggctggaggantccactcggccctcgtcgccggagatgccacgtcactctccggcgagctcccggcgataacgggcacggcggaggagtgccacgagctggcgcggcggtgc

SEQ ID NO: 45772 - DNA, 266 bp, Glycine max
  unsure (1)..(266): unsure at all n locations; Clone ID: 701131096H1
gatggaggatgcattgggaaagcgaagaattgaaaatcatgtgaagaatgcagcgttcttcatcagtgccggtacgaatgacttcgttcttaattattttgctctaccagtacgaagaaagagccncagtatcctggcgtaccaacagttcttaatccaacacgtgaaacaatttatacaggatttgttggtagaaggtgctcgaaaaattgcaataactggagtacctccaatgggatgcctaccgttgatgatcaccttgaatt

SEQ ID NO: 45773 - DNA, 294 bp, Glycine max
  unsure (1)..(294): unsure at all n locations; Clone ID: 701131101H1
tgaaggtccttgttttcttcgttgctacaattttngtagcatggcaatgccatgcgtacgatatgttccctctccgaatgaacactggctatggtgcccgtactccggaggtgaaatncgcaagttggaggcttgctgtggaagcacacaacatctttggctttgagaccattcctgaagagtgcgttgaagcaacaaaggaatacatccatggcgaacaatatagatcagactccaaaacagttaaccaacaagcttacttttatgccagagacctcgaagtccatcccaagg

SEQ ID NO: 45774 - DNA, 289 bp, Glycine max
  unsure (1)..(289): unsure at all n locations; Clone ID: 701131102H1
cgaaacggnggcactgaagaagtgctcatcaggaagaggggtttctctgagactgaaactggtcatgaagatgagtctgccaccactgtggatttgatgcttaatctttcttctaaggagnnnnnnnnnnnnnnnnnnnnnnnnnnnnnnnnnnnngataagcacaagactttgcctaaggagaagacccttctgccagcagatcctgctaagcctccagccaagacgcaggtggtgggttggccacctgtgcggtccttccggaagaacatgttggctgtgcaaaaga

SEQ ID NO: 45775 - DNA, 286 bp, Glycine max
  Clone ID: 701131103H1
acttgccaaacggtgttggaatttgtgatctggtgaatcatgaatgctaggagagatggtcgtaacaacagagttgctctttttgatggtattgaggagggtggcatcagagcatcgtctctttactcctcaacttcttcccatgaaattgatgaacatgataatgaacaagcattggatggattgcaagatagagttaatctgctgaaaagattgtcaggtgatataaatgaggaagtggatagtcataaccggatgctggatcgtatgggaaacgatatggatt

SEQ ID NO: 45776 - DNA, 287 bp, Glycine max
  unsure (1)..(287): unsure at all n locations; Clone ID: 701131106H1
cttttcgcctttgtctgcncaatggcgntcgttcgatcaggcacctcccggcgatgtcaaatccggtgacaaaatcttcaggaccaagtgcgctcagtgccacaccgtcgaaaaaggtgccggtcacaagcaaggacccaatctgaatggtttgtttggaaggcaatctggcacaactcccggatattcctactcttcagctaacaagaacatggctgtgacttgggaagaaaagacactatacgattacttgcttaaccccaaaaagtatattccagggacaaaga

SEQ ID NO: 45777 - DNA, 281 bp, Glycine max
  unsure (1)..(281): unsure at all n locations; Clone ID: 701131108H1
caaaaaagaagaaggcaaatcaaagttttgaaccttggttcaatatctagagtccctgcaagctncaacacattcagagatnatccaaaatgcatcctgcgcagatcgttttgtatggatcaactttatgtgtcatgataacagtgcacttctccatgaagctactcgctgaacatgttttgaactggaagaaaccaaaggagcaaaaggccatagtaattataatcctatggccccattgtacgcgtggactcctatgttggtttgataaattctttggg

SEQ ID NO: 45778 - DNA, 277 bp, Glycine max
  Clone ID: 701131109H1
tcttacaccccttcttcagtttttctcattttctggttctgttctgttgttgcagacgctgacatgacaaaacaagcttcttcctaagcaatcctctttgctgctttgactcaccaatataaatatcaattgccgtatcctttgcttcacttcactccttctcttctcatattgcttcctttctttctcttcttcaaatggagaaaaaggtccccttttttttctccattctcttattcattgctctgctatttcatggaggaaaggtgttagcttt

SEQ ID NO: 45779 - DNA, 262 bp, Glycine max
  unsure (1)..(262): unsure at all n locations; Clone ID: 701131110H1
acnaaacactgaacgtgaatggnataaacatgcacatagccgagaagggtgaaggcccattgatcctcttcatccatggcttccccgacctatggtactcctggcgccaccagatcacagctcttgcctccctaggttaccgctgcgtggcgccggaccttcgtgggtacggcgacactgacgtgccggccaaccccacagcctacaccagcctccacgtcgtcggcgacctcgttgggcttctcgacgcgatcgtcggcga

SEQ ID NO: 45780 - DNA, 177 bp, Glycine max
  unsure (1)..(177): unsure at all n locations; Clone ID: 701131112H1
cganntggggctnttagattggtatcagggggctanatgtgcaagttatttatatagcttaccatgntgttctataatgtaccaatgaatttatgggtttagggngacattggaggtattgtcaatgattntnttgttttttagtccttttttcttgaattatgatggtttgtgtat

SEQ ID NO: 45781 - DNA, 268 bp, Glycine max
  Clone ID: 701131114H1
agaggctctagatggtcccttaagggaaccactgctctcgttactggaggaacgcgtggaattgggcacgctgtggtggaggaactagcggagtttggtgccacagtgtacacttgttcgaggaatgaagaagagctgaatgcatgcttgaaggagtggaaagagaagggattttcggtttctgggttggtttgtgatgcgtcttctccaccccatagagagaacctcattcaataagtggcctctgctttcaacggcaagctcaaca

SEQ ID NO: 45782 - DNA, 273 bp, Glycine max
  unsure (1)..(273): unsure at all n locations; Clone ID: 701131115H1
cacttcactaatacatcatggcagacgagacncagaacaagtatgagagctctgaggttgaggtccaggatcgtggtgtttttgactttctcggtaagaaaaaggatgaagaagacaagcctcatcctcaggaggaggtcatcgccaccgagtttcaaaaagtcactgtctcagaccaaggagagaacaagcacagcctcttagaaaagcttcaccgatctgacagcagtctagctcttcaagtgaggaggaaggagaagatggagagaaaag

SEQ ID NO: 45783 - DNA, 287 bp, Glycine max
  unsure (1)..(287): unsure at all n locations; Clone ID: 701131118H1
ccgtaccgcacgcgaatcgcaattattagggtttacnccaccctcacaattggtttgagatttgcgaattcggcgacgatgatgggggaaggagcgagcaatggagggatgctgtaccacgaggtgcaggagtcgaagctctgcgcggtgcattgcgtgaacacggtgctgcagggcccgttcttctcggagttcgatttggccgcgctcgcctccgatctcgaccgcaaggagcgccaggtcatgctccccgcgctctcctcggcggatttcgaatcgcacaatgt

SEQ ID NO: 45784 - DNA, 278 bp, Glycine max
  unsure (1)..(278): unsure at all n locations; Clone ID: 701131120H1
aaagaatagagaagagagtgaggtttggtggtgtggtttagtgtcaaaatggcggcgagtagaagcactttacctctgatgaagtacttgagagtgcgcgtggacgctcttccccgcaacactcccttgaccctcncttccaacttgttgattcgccgcttctccgaagaggttaggggttgttttctcgacaagtccgaggtcacagatcgcgtcatttcctgcgtcaaaaacttccagaaagtcgatccttctaaggttaaccctaatgctcattc

SEQ ID NO: 45785 - DNA, 258 bp, Glycine max
  unsure (1)..(258): unsure at all n locations; Clone ID: 701131123H1
tcgagngcgaaaatttgtgctnccaacacaaaaaaancgnaacctacaatcaccaacctcttgttgtctctactacttctcataacttcaccctccttggcaacccgacccgcatccaaccctgatcaagtcaagcacaacaaaaacaacaaccaaggtggtggtgctggtgctggtgctggcgggttctttggccctggaggagggttcagcatacccggttttggaaacgggtttggaaatggcatcataggagga

SEQ ID NO: 45786 - DNA, 271 bp, Glycine max
  unsure (1)..(271): unsure at all n locations; Clone ID: 701131125H1
ggaaggtatggnngtnatntctgaagctgnnaagangaaggnatcnggatatgaaattgttggctttcaggttatcccttgcagtgtnaagcnngatcctgaagtcatgacaaaactccacatgtatgacaatatctcttcaacaaactgcccatctgagctagacaagtaccaaccgattaaagagcaagagagaatatcatttacatatgaagttgagttcgtgaaaagtgatatnagatggccatcgcgttgggatgctatttaaaga

SEQ ID NO: 45787 - DNA, 269 bp, Glycine max
  unsure (1)..(269): unsure at all n locations; Clone ID: 701131126H1
gcaagattttgatcataggaggcaccggctacatcggcaaacatatagtggaagcaagcgcaaaggctggaaatcccacttttgctttggtgagggaatccacactctctgacccctccaaggcacaactcatccacaattttgaggctttgggcgttaatttggtccgcggggatctgtacgatcatgagaagttggtgaaancctatcaagcaagtagatgtcgtcatatccacgctgggtcacctgcagcttgccgatcagctcaa

SEQ ID NO: 45788 - DNA, 212 bp, Glycine max
  unsure (1)..(212): unsure at all n locations; Clone ID: 701131127H1
gtcncttgtctggtctggtgtgcaattctccccatacaataacaatacacccactttnnnnnnnnnnnnnnnnnnataccnagtagtgattagatttagtgatcgatcctctcctttcgttctcaaaccgtagatttagattttagggtttctctcttaatataatcttttgacacttccgtaacaaacaaaaaaattacataaattttccc

SEQ ID NO: 45789 - DNA, 114 bp, Glycine max
  unsure (1)..(114): unsure at all n locations; Clone ID: 701131129H1
atttcngctcgattngagcgtttcnaggccganaaaatccttctctggagncgaattctaaagctaancttgaagactttgaagaaggtaactcaaaatctggaattaggtcag

SEQ ID NO: 45790 - DNA, 268 bp, Glycine max
  Clone ID: 701131130H1
gcgaggagaaagatggaggggaaggagcaggatgtgtcgttgggagcgaacaagttccccgagagacagccgattgggacggcggcgcagagccaagacgacggcaaggactaccaggagccggcgccggcgccgctggttgacccgacggagtttacgtcatggtcgttttacagagcagggatagcagagtttgtggccacttttctgtttctctacatcaccgtcttaaccgttatgggagtcgccggggctaagtctaagtgta

SEQ ID NO: 45791 - DNA, 272 bp, Glycine max
  unsure (1)..(272): unsure at all n locations; Clone ID: 701131131H1
cagaaattcaagcactagagaaggatggagacaagatggctattgccaaggcatcaatgcaaagtgtccaccttcagatatctgaaggtgctgcacaactcactgcgtatagagggagctctcatcaggcatttgctctgattattgatggaaaatcacttgtttatgcattagaagataatatgaagaacttgtttctggancttgcgattcgttgtgcatctgttatttgctgtcgctcatcaccaaaagcagaaggcactggtcgctag

SEQ ID NO: 45792 - DNA, 277 bp, Glycine max
  unsure (1)..(277): unsure at all n locations; Clone ID: 701131132H1
ctttttctctgccgccactggtttcgatcccacacccacaaaacgnnagncctccatcctttgaatgctcttgcgttttcctttcactacctcattcctaactcacacacacacaacgggtgatatcaatgtcgactcctggctaggaagaggctcatgagagatctcaagaggctgcaacaagacccgcctgcaggantcagcggggcacctcaggataacaacataatgctgtggaagctgtcatatttggtcctgatgatactccatgggatgg

SEQ ID NO: 45793 - DNA, 285 bp, Glycine max
  unsure (1)..(285): unsure at all n locations; Clone ID: 701131134H1
tagatgggagtgggaactatgctaagatcatggacgcggtgcttgcggcaccggattacagcatgaagcgtttnctgatttnggtaaagaagggtgtttatgntgagaacgtngagatcaagaggaagaagtggaatattatgatggttngagaggggatggattccaccattatctccggtaaccggagtgtcgtcgacggttggaccacattccggtcagctacattcgctgtgagtggcanaggattcatagcaagagacatatcctttcagaacaccgcag

SEQ ID NO: 45794 - DNA, 279 bp, Glycine max
  unsure (1)..(279): unsure at all n locations; Clone ID: 701131137H1
ccacccttgntttccaggctgctatttggagatggatgacaccaatgaaaaagtcacagccctctgcgcatgatgcctttgtcggcaactggaancctagcaagaatgatactatggagaatcgtcttcctggatttggcactacaatgaacattctctatggggatggtgtttgtggacaaggtgatgtggactcgatgaacaatatcgtttcccattaccagtattatcttgaccttctaggtgttggtcgagaacaggctgggccccatgaaatcc

SEQ ID NO: 45795 - DNA, 281 bp, Glycine max
  unsure (1)..(281): unsure at all n locations; Clone ID: 701131139H1
cccatccattcttcaaatggaaaagctccatgcttctgtgctcgcccttgtattccttgcttgtcatactatttcaggaaggattggtaacatgtatnaagaatgaagacggatcagaagaatggggatatgtgcaagtnagaccaaaagcccacttgttctggtggctttacagaagtccatacagagtggagaatccctccaagccttggccaatcattctctggcttcagggaggaccaggctcttcaggagttgggtttggaaattttggagaggtt

SEQ ID NO: 45796 - DNA, 261 bp, Glycine max
  unsure (1)..(261): unsure at all n locations; Clone ID: 701131142H1
tacgacttgggtgttggatttcattaanttgtgataaacatggganaagactcaaagccaaaggagtccggaggcaagggnccaggggaaacaggctgcaagtggaagtgatgagaatgcttctaaggganaaggaaaaggtgggaaacngtggagatnggcttggtacttgcacctatgtcaaagctaggcatancctatgtgagaaacnangtaagatcaatgaagcctacaagaagctgcaggatggttggcttggca

SEQ ID NO: 45797 - DNA, 270 bp, Glycine max
  unsure (1)..(270): unsure at all n locations; Clone ID: 701131143H1
atgggaattttgnnncaatttatgctttttgatanttgcagcttttgcttggatnncttactannnaaattgcgggctttggtcaactgaattagccaagaaactaggcaatcacagtacaatgataacgatgttgaatcgctcaaaataaactaggattctaacaattctgtagtataggaataaccaaggtcanctcanagacacaatccanttaggtntcaacttcaattcacttataantcanagtaagggatttcatcgagcagt

SEQ ID NO: 45798 - DNA, 272 bp, Glycine max
  unsure (1)..(272): unsure at all n locations; Clone ID: 701131144H1
cngcgttcttcccaccaacatcgaaacaatgtancancgacttgcacctccacaacgacntgccccagctccgaatcgcntcnnnnnnnnnnnnnnnnnnnnnnnntcaaaaccgangacctcccctccgacgatgacgaccgcaacgccgtctcttccgtcatcactcaaaccgagaccgancactgacggagccaccatcgtcgacgtcgccgtcgccgtcaacgtcaacgtcaacgtcaacgacgagaattaccgtactccgacttcga

SEQ ID NO: 45799 - DNA, 87 bp, Glycine max
  unsure (1)..(87): unsure at all n locations; Clone ID: 701131145H1
angatattaaatatttcatttcctacatatggtncatttgcaagctcatgaattgagtattattanaacgncacagcnacatatntt

SEQ ID NO: 45800 - DNA, 261 bp, Glycine max
  unsure (1)..(261): unsure at all n locations; Clone ID: 701131149H1
tccaaaccagacgggactacactctagctccgtccacgtgccgtcgtacgctctacnatcttccgtcgtctctggcatctccgctgccagccttctgatctgtcataccaaatggccaacagggttcaaattcctaccaacaattcagcnctcattgctatgattgcaatgaggatactgtagttggatttttgttggctggagtgggaaatgttgacatacgtaggaagaccaattacctcattgtggatcaaaaacaac

SEQ ID NO: 45801 - DNA, 274 bp, Glycine max
  Clone ID: 701131150H1
gatcgcagcaaaccagagattgaactccgacgatgcctcccgtcgctcctcgatccggcgatgccatattcgccaacgtcgaacgcgtcaatgcggagtgtttactttgacgtatggcgcaattgtgcgtcaattgctcacggatctggaagaggttgaggaggttaacgagcagcttgatcaaatgggttacaatattggaatccgattgattgatgagtttttagctaagtctaatgtctcaagatgcaacgatttcagagagactactgat

SEQ ID NO: 45802 - DNA, 279 bp, Glycine max
  Clone ID: 701131152H1
acttgctatagcagtaagctataactcatttgaggctctgtgagaattgagaaatggctaaagatgttgaggttcaagagcaaggaggagagtactctgccaaagactaccatgaccctcctccagcacctttgttcgacccagaggagctcacacagtggtccttctatagagccctcatcgctgagttcatagcaacccttctcttcctttatgtcactgtgctcaccattattggctacaaaaggcagactgatacaacggtaggtggcaccgact

SEQ ID NO: 45803 - DNA, 279 bp, Glycine max
  unsure (1)..(279): unsure at all n locations; Clone ID: 701131154H1
tctcacacatgtctcgctccgtgcctttggtttcaaccatttttntcttgcttctgcttctggtggccactgagatgatggggccaacaatggtggcagaagcaagaacttgtgagtctcagagccaccgtttcaaggggccatgtttgagtgacaccaactgtggctctgtttgccgaaccgaacgtttcactggaggacactgccgtggcttccgntcgcagatgcttctgcaccaaacattgttaattttaaaaaattaattaagagtgctttgat

SEQ ID NO: 45804 - DNA, 277 bp, Glycine max
  unsure (1)..(277): unsure at all n locations; Clone ID: 701131155H1
attagcgtcaaaatgttgggtgtgttcagcagctccatagtgtcgccgncggacgagctcgtggccgccggcngccgtactccgtcgccgaagatgacggcggcggcgctgcggaagcggttcgaggagaagaacccctccgccgtgtcggtggaggtcggagagcatgtccagctcgcttatacccaccacaacgagtngccgtttcagcccagatcctttgctgtcaaggatgaggtgttctgcttgtttnagggagcccttgacaatttgggaa

SEQ ID NO: 45805 - DNA, 275 bp, Glycine max
  unsure (1)..(275): unsure at all n locations; Clone ID: 701131156H1
aggtctttgtccaaaagattaggattggcatgtgcattttgaagatttaatttgnagtgttcctctactattcttctctggtttcttcctaaccaagttgaagctagacatggagaaggaaatggaggctgctttagttcatgtggagacgacccagcaacacatgaatccacatgtactaaggcgcaagggtggcttcattaccatgcctttcattatagcaaatgaggcactagctaagctggctagtgttggacttatgccaaacatggtat

SEQ ID NO: 45806 - DNA, 119 bp, Glycine max
  unsure (1)..(119): unsure at all n locations; Clone ID: 701131161H1
gcttgatcnncggattctcgctctcaantcagataccaantcggagncctcggantcntcgcctccgnttcnaaaccctaactcggacctcaaactcaatcgattccacanaacanang

SEQ ID NO: 45807 - DNA, 286 bp, Glycine max
  unsure (1)..(286): unsure at all n locations; Clone ID: 701131165H1
gcgacaggncttnttggaaaattccgaccatctattcctcttagtctggaagaacttgaaaganaaggaatatgggactttaatcgcctaagtcgcccatatattaagcgggaattattgcaggaaaaatttggtgatgcntggacttttgttgcaacaacttttctaaatgaaattgacacgaacttctatgagttcaaggaggattgcaacacagagaaaaaaatagcttccaaactgaaaatttgtgcagaaagttctcnacngtggngagtgtagacaaatt

SEQ ID NO: 45808 - DNA, 253 bp, Glycine max
  unsure (1)..(253): unsure at all n locations; Clone ID: 701131167H1
catccaggaacacaccccttttgcctattacanctttacnngctcactcttcaactgtgtctctgataaggttcaacccttttntnnctctctatgccattncaacagatctgttggctttttnaggatgggcaagtncaagggttgtggaaagttaggaagaatgaggccaagtcatatgagtgcttatgaattttctctgatgctggctcctgttgtttctgtttgggattgcatagttcgcaaaatgagg

SEQ ID NO: 45809 - DNA, 275 bp, Glycine max
  Clone ID: 701131171H1
tgatctctctgctgttgtgttttgttaatctcattcagacaatcacagttatactctctctctctcactttgatcactgatctcatctcaattttcagatatgtcgacatctgataagccagaagaggtggaaaggggtagcaaggatgaaaagcacaaggaagatgatcaagaggaggggaagggtggattcattgagaaggtgaaggatttcattcatgacattggtgagaagattgaggaagctattgggtttgggaagccgagtgccgatt

SEQ ID NO: 45810 - DNA, 264 bp, Glycine max
  Clone ID: 701131175H1
ggcttcttccgccactcagcacttcgctccctctgtgcttcaccaaccatggccgaaatcgaagctaccgttccagatccctctcaaatcgacgtcaaacttttcaaccgctggagcttcgacgacgttgaggttactgatatgtctctggctgattacattggagtgtccccgtcaaagcatgctacatatgttcctcacactgctggtaggtactcagtgaagaggttcaggaaggcgcagtgccccattgttgagagactc

SEQ ID NO: 45811 - DNA, 266 bp, Glycine max
  unsure (1)..(266): unsure at all n locations; Clone ID: 701131179H1
aatcgatgtcttactccnttntaaggaacaaancaagagaacaatagcctgacaaagggtttagccatanaatcgaatccatcattgatttgagatattgataaggtgaatactcanttctcgtcaatgcnaggcataatgcgggtatagggacctanaaaagattatcttttcttcctatcttatgaactttaaggtgtatgaagtgtcatttcctatcttagatttaattttagtaggtagatnaagagtccattaacttaagt

SEQ ID NO: 45812 - DNA, 270 bp, Glycine max
  unsure (1)..(270): unsure at all n locations; Clone ID: 701131180H1
gacctaccagttcgagaatnccttctccaagcggaactcgnncgtggnncacgccgtcggattttgggactaccactcgttcatcgccgctgccgcgcttttcgagccgcaagggttcggcaccaccgggaacaagacgatgcagatgatggagattgcggcgttcctcggacacgtcggcagcaagacctcttgtggttatggagtggctaccggaggacctttggcctggggtctttgttacaaccatgaaatgagtcctatgcagtc

SEQ ID NO: 45813 - DNA, 283 bp, Glycine max
  unsure (1)..(283): unsure at all n locations; Clone ID: 701131181H1
caaaccctagcccctctgaatcttccaattcncaatcttcttctgtntctcttaaccactacttcactgacntcttcgaattcgactccaaaccccaaataatcgacctccaaactcccaaaacactaacttcagctcagaagaaacctcaattgaatcggaaaccgtcgctgctaatcgctgttccaaagaagaccgagtgnatccagttcgggagcccggatccgaacccggtgatggctgcgccggagaacctgccgcagaagaatcactacagaggtgt

SEQ ID NO: 45814 - DNA, 278 bp, Glycine max
  unsure (1)..(278): unsure at all n locations; Clone ID: 701131182H1
ttttaaantcctcacggggctgggatntgncagacnccggtnatgnctttggtgatcaatccactaggnnaggtggtacaaattttaaaactggcaacagctggtctcgancagcaggtaaaagcagtggcgatgattggctaattggaggtggtagacgatcaagcaggccttcatcatcagacagatttggagggacctgttttaattgcggggaatctgggcatcgtgcatcagattgtccaaacgtttcaaacagacgaagctttttttaagtt

SEQ ID NO: 45815 - DNA, 280 bp, Glycine max
  unsure (1)..(280): unsure at all n locations; Clone ID: 701131183H1
gacaggtagagtttcaacaatgggctcctaaagttgataagaagaatgatccaaaggcccagngccttgaagactgctaaggcagttaagtcaggtgctacctttaagaagaangtaaagaagatccgaacttctgtcactttccacaggccgaagaccttgaagaaggacaggaaccccaagtaccctcgcattagcgccccgccgaggaacaagcttgatcattatcagatcctgaaataccccctcaccactgagtctgccatgaagaagattgagg

SEQ ID NO: 45816 - DNA, 277 bp, Glycine max
  unsure (1)..(277): unsure at all n locations; Clone ID: 701131185H1
atactcataaatcacatagctagttgtttaaagtaaganagaagaaagaagcaaatggcaaactttccagttgttgacatggggaagcttaacaccgaagagagacctgcagccatggagattataaaagatgcctgtgagaactggggtttctttgagttggtgaaccatgggatatccattgagcttatggacacagtggagaagctcacaaaagagcattacaagaagactatggagcaaaggttcaaagaaatggtgaccagcaaaggtcttg

SEQ ID NO: 45817 - DNA, 247 bp, Glycine max
  unsure (1)..(247): unsure at all n locations; Clone ID: 701131186H1
gccattgcccctactccctatggttccaacggatttcaaggtgcaaggnctagacagatnccatcatcttaagattaaccatgccacccctctttctctccctcaaatttccaccaccagaagctcggttacacgttcatttgggcatgtaaattgcatgctcgaaagattcatctctatgccctccgagaatgagggaagtggcaacagaattttgagaggagtggcagcagcttctctggttctg

SEQ ID NO: 45818 - DNA, 89 bp, Glycine max
  unsure (1)..(89): unsure at all n locations; Clone ID: 701131188H1
agaaacaccatttgtggcttntgtggtgaaccttccggaactaaacttncccaattgcttctcattcnatgcttccacacaacntagcg

SEQ ID NO: 45819 - DNA, 262 bp, Glycine max
  unsure (1)..(262): unsure at all n locations; Clone ID: 701131192H1
tgccaaaggacnaagttgagaacaggntagaacagancaaaanangtgacaagccanaaatcananaaacttgaagaggagaaagaatctgtgcttgctcagatggctgaactcaagaaaattttatatgcgaagttcaatgactcgatcaatcttgaggaggattagtaacttcttgttgatagatttctagttgttgttttcttgttaatatgacctaatggacctttggcatttttgagtcactgcctattttctttca

SEQ ID NO: 45820 - DNA, 264 bp, Glycine max
  unsure (1)..(264): unsure at all n locations; Clone ID: 701131193H1
ggcggatccaatcgcgaaggttctgatcgcgtttgcgctncttagcttccctcttgctgtgttcgcacgcttcctccgacgttcccttcatcgttgctcacaagaaggcctccctcaacncgactcangtccggcgccgaaagggtctccgtcaccatcgacatcttcaaccaaggaacctcgacggcctatgatgtaagcttatcagacgatagctggccaagtgatgcttttgatgtaatcagcggtagcacttcaaagtca

SEQ ID NO: 45821 - DNA, 265 bp, Glycine max
  unsure (1)..(265): unsure at all n locations; Clone ID: 701131195H1
aaactttgcagacaattctgagacccagttgccggaagtggcggttcccagtgggaatggaggtggagactgaaaaatcagggtctgatgggaagggttggagtttttgtagaatgccattttggcaaacaactcacactcctcttcttctactacttccatgtcttacatgcacaatgttcatccgcaaaatcagnataactttcaatctgttgatagnnncagtcntcattcttcaaccacagtttcatcctatggccagtct

SEQ ID NO: 45822 - DNA, 272 bp, Glycine max
  unsure (1)..(272): unsure at all n locations; Clone ID: 701131196H1
gagaagcaggctgaaaaaactgctgaaaacaaaagganaagagaagaggcctttatcccacccaaggagcctgcaaacctggtggataaatctgaggatgctaacagtaatgtagctgacatggcaatgtccttaaagaaaaaaacaaagaagtttgggaagcgtaaatctgaagaaaatataaatgccgagacatatattataggatcatcagaacaagcatcgggaaagaaatccaagaagcaaaggtcttaaacataatctcattttgg

SEQ ID NO: 45823 - DNA, 269 bp, Glycine max
  unsure (1)..(269): unsure at all n locations; Clone ID: 701131201H1
tcagancttggttgagttctttccatttgtttctctcgtgtatcgtgctgtgctttattctctgcctctctcaatcgttctacttcgcttcgctctctcactctctctgtttgattctctccctgatttcgctgtaaatagctgaatctagcttctctcaatatctaagcagcagtataattgtagtgagtgagatggatcattatggttcttctggaggaagctggacgatgatcccaacccacaatcaagtattcaatcccaatccc

SEQ ID NO: 45824 - DNA, 134 bp, Glycine max
  unsure (1)..(134): unsure at all n locations; Clone ID: 701131202H1
gggttgtcattgttggcatagcaacaagttgacactaatctaatcacctcntntgcctctactttgtattctacgatggacacgcgcggccncgangangaggagccancgaaacctgtngttctgatganagg

SEQ ID NO: 45825 - DNA, 267 bp, Glycine max
  unsure (1)..(267): unsure at all n locations; Clone ID: 701131203H1
ccaagattccttctcttgggttagggacttggcaagctgaacctggtgttgtagctgaagctctcaccacagccattcaggttngatacaggcntattgactgtgctagtgcgtataagnatcaagcagagattggttctgctctnaanaagctttttgatgatggtgtngtgaagcgtgaggactnatggatcacttccaaactctggtgttcagatcatgcaccagaagatgtgccaaaagcttggatacaacattacnggnatc

SEQ ID NO: 45826 - DNA, 256 bp, Glycine max
  unsure (1)..(256): unsure at all n locations; Clone ID: 701131205H1
ttcgatcgccatctttccttaaaaaatgtccagagngttgtcactgaagctnntgggtatcagccccatctgattgccccagagcagggttatagaagactcattgaagggtctattggctatttcaaaggcccagctgaagcctctgtggatgctgtccactttgntttaaaagaacttgtgcggaagtcaatttcagaaactgaggaactanaaagatntccgacactttcaaatgatatagctactgngcnaa

SEQ ID NO: 45827 - DNA, 263 bp, Glycine max
  unsure (1)..(263): unsure at all n locations; Clone ID: 701131206H1
cccagcccgtttcggagcgccccggatccggatccggatctgcgttctctattttgaatgcacgagcctgaggaaggtttttgagtcgctggtgttttatgtgtgcttcgtgtatctatatntattaatattgagaaacagatcgccatagtacttgaattggcatcgggtttgggttaacaacccgttttgtctatgtagtcttcaataataattggccctatctgtatggcctcgatgatctggatatgacagtactacta

SEQ ID NO: 45828 - DNA, 263 bp, Glycine max
  unsure (1)..(263): unsure at all n locations; Clone ID: 701131208H1
aanggtcntgcccattggantaacanatcgcatttcgattctcancacggaanaagcgtagccttcatnacaaacnnatggaagcacnaagcttcccagcatacccaagttattgagatcagtggtgactttcctgatggtggaangaagatttntgcggaagcaccatgggggtttgcagatgctggatccatctctaaggncccngaagaangntccanttcaangnnagacttccaggacagggggcctgggggnaannc

SEQ ID NO: 45829 - DNA, 138 bp, Glycine max
  unsure (1)..(138): unsure at all n locations; Clone ID: 701131213H1
ctaagattnaggaactgcttctagaagatcaaaatgttaagngntaaagggatcgaattccagaaacaatcatcccttctctcgaaattgacacgccaattgagtattcatgacacccgagcagcagctgcctctggc

SEQ ID NO: 45830 - DNA, 266 bp, Glycine max
  unsure (1)..(266): unsure at all n locations; Clone ID: 701131214H1
tncanttnnngcttatgttgtattaacattattatcatttttgggaagaaaaactccttaattaagagtgccactccaaccaaaaatgataataatgttaatacaacataagccaaaaatgcataatttcatttaaaanaaaaaactcttccatattaccaatatataattaaatgttggtgtanttccgaattttgggaatagaaaaaccctaagcaaagcaaagcggtaaggatggggaacacggagaagctgatgaaccagat

SEQ ID NO: 45831 - DNA, 265 bp, Glycine max
  unsure (1)..(265): unsure at all n locations; Clone ID: 701131215H1
agaccccattaacacactcaagaaaaatgancctctttttgtgtcaggaagcattgtggagaagaggttcactttccctactcttgctgcttcttcagaatcatctatagaagaacttggtcaccatgcaggctattatcgccttcctcgttccaaagctgcaaggatgttctactttttctttgaatctcgaagcagtaagaatgatccgttgncatatggctgactggnnggnccaggtgcngcagnaaactagttttttaac

SEQ ID NO: 45832 - DNA, 266 bp, Glycine max
  unsure (1)..(266): unsure at all n locations; Clone ID: 701131219H1
cgaaatcgcaatcgcaatccagcgaatntgnaggtcgtcgctgcatacttgctcncagtgttgggagggaatccttccccttctgccgatgacatcaaaganatcctcggcgcaggnccntcctttatcctaactactctatctttttctcccttttntaatatattatgattatgattattantnttgagcgnntttnatttatgggttatnggttgaatgctgaactgggttcgcaatagcattcnttatgtggtcaatgcagg

SEQ ID NO: 45833 - DNA, 247 bp, Glycine max
  Clone ID: 701131220H1
ttctcactgtacagagtgcagagctgtcttcatattacgtgcaaatgtcccacccagattcggtggtggttgagattaaaatttcagttccttgttgctagagatcatgcattcattttcataattgttcagctggttgttgctttcttgggagtgctgtgtacaaattttatggagatgaactgagggaaatgtttggttatgaagaacatccatatggattttatacaatggctgttctagccat

SEQ ID NO: 45834 - DNA, 245 bp, Glycine max
  unsure (1)..(245): unsure at all n locations; Clone ID: 701131221H1
atctacatctgtactagctataccgttccttctgccacaaattaactggaaagnntggtgctgcccaagttctctccgttctcacggcttctcctttcttcccttgtgattctcttaataagctatccagttaaatgtgacgatgatgaggaagacaatctttatcagggtatcaacaagtatcgagcatcgttaaacttgaaagctctaacaaggaatgacaatgcagattgcctgctgaaaaa

SEQ ID NO: 45835 - DNA, 246 bp, Glycine max
  unsure (1)..(246): unsure at all n locations; Clone ID: 701131222H1
atctttcgaagttcgtttgcgtgtgttgtgtcngtcagtcaccgatggcagcaccacctgcgagggcacgtgccgattacgattacctcntcaagcttcttcttattggcgatagcggtgtgggaaagagttgtctgcttttgcgattttctgatggttccttcacaaccagttttatcaccaccattggcattgattttaagataagaaccattgaacttgatggcaaacgcattaagttacaaa

SEQ ID NO: 45836 - DNA, 261 bp, Glycine max
  Clone ID: 701131223H1
ctcggagccttgggctgcgtcttcccggagttgctgtcccgcaacggggtgaagttcggagaagccgtgtggttcaaggccgggtcccagatcttcagcgagggtgggctcgactacttgggcaacccaagcctgatccacgcccagagcatcctcgccatctgggccacacaagttatcctaatgggtgccgttgaaggttaccgtattgctggtggccccctcggtgaggtcactgacccaatctacccaggtggcagt

SEQ ID NO: 45837 - DNA, 263 bp, Glycine max
  unsure (1)..(263): unsure at all n locations; Clone ID: 701131224H1
gcaccatttcgagtccaaggcagacgccggtgcctccaaaacctaccctcagcaagccggtaccattcgcaagancggctacatcgtcatcaaaggacgcccctgcaaggttgtggaagtntcgacttccaaaactggaaancacggtcacgccaagtnncactttnttggaattgatattttcactgccangnnacttgaggatattgtgccctcttctcacaactggggtgttcccccacgggnatcggacggnnaacncc

SEQ ID NO: 45838 - DNA, 262 bp, Glycine max
  unsure (1)..(262): unsure at all n locations; Clone ID: 701131225H1
cagcnatggtgtacgtcaaggctcagaaatcaaaagcctacttcaagagatatcaagtcaagttcaagagnagnagagagggaaaaaccgattaccgtgccaggattcggttgattaatcaggacaagaacaantataacactccgaaataccgatttgttgttcgctttagcaacaaggacattgttgcacaaataatatctgctagcattgctggcgatattgttcttgcnggcagcatatgcacatgagctgccacgat

SEQ ID NO: 45839 - DNA, 259 bp, Glycine max
  Clone ID: 701131226H1
agaggttaagcttccaacagatgtaggttgggattaacatgaactatcaaaatattgtcactattcatccaattaattgaggagcgcagtgtggctattatgtcactggattctctctccttgtgtggaagattttctgttagaaaactaatggctcaagatctcctacaaggtgagcttcgcattctcaaatctgcttctgcctggctagagaactactgtttttccatgacttgatggtcagtaactggctgcagcc

SEQ ID NO: 45840 - DNA, 261 bp, Glycine max
  unsure (1)..(261): unsure at all n locations; Clone ID: 701131227H1
ggagtgccactctccctttttaaatggaaacaaagctgaagacaccatcaagaagaaaccaatagataacanactagagatagagtgagagtgagagtgagagtgagagacatgtataggttcagcaacacagtgatcgggttcttgaacttgttcacacttttagcatccataccantaattggagcaggtctatggatggcaaggagcaggcacaacctgtgaaaattttctcaaacccctctttggttataggatngt

SEQ ID NO: 45841 - DNA, 274 bp, Glycine max
  unsure (1)..(274): unsure at all n locations; Clone ID: 701131229H1
ttgagnaacaattggagggcgcaattngcngcaacgatgcnaaattccaatntgaagcaagtagaacatgaananacaaccaaaactttccagtgcactattccgtcctcatagcacgatagaggggtctgtacccaaagaacatatganagggggaanacccaagtagaccatattaacccgcaaggncanngattttaacaccgccgcctctgatccaacagacagtcacagcaactacnttaaaaactaggcagagacaattcctaaccac

SEQ ID NO: 45842 - DNA, 266 bp, Glycine max
  unsure (1)..(266): unsure at all n locations; Clone ID: 701131230H1
aaccaccaacgcaccatcggccacgccgcgcgatcttctctatcgacgcagacaacatctggctcngcctcccgctgcttcaagtgcagccttcaacgctaatgcgtaacccaagaagatgaaggtggcttgcgattagccaagatttgaaccaaaaatttccctttgaagaggcgaggaggtgccttgtgcggttacggcgtggcgttgccgaagtggtggcagcagcagcaagtgtttcatttctcttatgtcaaggtgtccag

SEQ ID NO: 45843 - DNA, 263 bp, Glycine max
  unsure (1)..(263): unsure at all n locations; Clone ID: 701131231H1
tgtacttgtgttaattgtgttgttgttgtaggaaatttaagtgaagagagaatgatgatgaagtcngctatgtgnccattggtgctgtnncactggttgtggttgaagtggggcccntggctgaggctgcggtgacttgcaacccaacacagttgactccttgtcttccggcaattaattcaggttctgcaccttcgagtgcttgttgccagaagctgaaggagcaaaagccatgcttctgtggctactcaaaaacctagctg

SEQ ID NO: 45844 - DNA, 269 bp, Glycine max
  unsure (1)..(269): unsure at all n locations; Clone ID: 701131233H1
ggaaccccttggagttacagctcaaatganatagttgcagctgctatggttgctgcccatgtttctgaactatttagaaggtcaaaagcttgcatgcatgctctgtctgttctgattcgttgcaaatgggacaatgaaattcactccagggcatcatcattgtataatctcatagatattcacagcaaagctgttgcatctatagtgaacaaggcagagccattagaagcaaccttaattcatgcacctattcggaaggattcccttgt

SEQ ID NO: 45845 - DNA, 267 bp, Glycine max
  unsure (1)..(267): unsure at all n locations; Clone ID: 701131234H1
gtaggttcagtctcttctgtgtgctgaccgttttatgtatctctttatgtgttagaagttccaatatgaacaagtgcgtggagacagacaacnaagcgcttctcaagttaaaacatggntttgttgatggaagtcacattctatcttcgtggagcggtgaagactgtngcaaatggaaagganttgcatggcaataatttaactggccgggtaaacagattggatctccaatttnctgatatncgncacaattggaaggaaagatag

SEQ ID NO: 45846 - DNA, 262 bp, Glycine max
  unsure (1)..(262): unsure at all n locations; Clone ID: 701131238H1
caacttcaaacctacactgcagcttttcttgggcattattatttgtntgatgtctctacacatgtattttgccccaccaaatatgctcttagatatgccattaacagttaagccagatgaagagaagctcattgaagtttctgttgatcgaagaacactttcatgatgttgtattgacatctgaatacaatgcttgggtagcagaaatgctgaatattattccatgctgctgcattgattcagtgactttgtaggcatcgtt

SEQ ID NO: 45847 - DNA, 262 bp, Glycine max
  unsure (1)..(262): unsure at all n locations; Clone ID: 701131239H1
ttctgcttgcttcttcacttttttttttcctctgtctcctcctcaatcttcattgtcctgttntttcccttggtgacaaaccaagactaacacacacagaacatagcttgtgttggtgaggtgagaagataaagaaagaatggcatttgcaggaacaacacagaagtgtatggcctgtgacaaaaccgtttatctggttgataagttgaccgcggataaccgagttttccacaaagcttgcttcagatgccatcactgcaaa

SEQ ID NO: 45848 - DNA, 258 bp, Glycine max
  unsure (1)..(258): unsure at all n locations; Clone ID: 701131241H1
ggcctgcaaggtgttaccggcagataaaaaacaagccataccccaaatcacgtttctgccgtggtgttcctgatcctaagatcagaatttatgatgttggtatgaagaagaaagntgttgatgagtttcccttctgcgttcatctggttagctgggaaaaagaaaatgtttcaagtgaagcattggaagctgctagaattgcatgcnacaaatatatggcgaaatttgctggaaaggatgctttccacttgagagtca

SEQ ID NO: 45849 - DNA, 266 bp, Glycine max
  unsure (1)..(266): unsure at all n locations; Clone ID: 701131250H1
gggcacgttgtgggaattcatcatgttccagcacaggaagacttccccataatgccattattgagcactgcattcgtcctcaggccaaccaatttcttcgagaggaatccggttcttaaaacactttctcccccggatgtccaatggcctggttgccccaagtaaaantagctagccagccatttccattatatnagngtgttcgagngctacaacctagatgtgtncctggatnatgtgaaatgcgatctgcttattgcatgtgc

SEQ ID NO: 45850 - DNA, 138 bp, Glycine max
  unsure (1)..(138): unsure at all n locations; Clone ID: 701131251H1
gaaaagtcaaagacaatgtcaggncttcattcacaagattacngagacccttcatgtgggacggccacaagaaggaggaggagcacnngggtgagcaggcaccatggtgnanaatacnaaggggagcatcntggtgnc

SEQ ID NO: 45851 - DNA, 262 bp, Glycine max
  unsure (1)..(262): unsure at all n locations; Clone ID: 701131252H1
cgacgagntttggttccatagcggcccacgatnggaaggaggcagaggagaagacagggttcgcattcgtaggatgcaaggtgacaggaacgggtccgttatatgtggggcnagcaatgggacagtattccagaattgtttactcttacacatatttcgatgatatcgttgcacatgggcggttgngatgattggnaccatgnagtcaatacanagcaagactnctncttcngagtgnacaagtnctggtnnccnggnccag

SEQ ID NO: 45852 - DNA, 257 bp, Glycine max
  unsure (1)..(257): unsure at all n locations; Clone ID: 701131255H1
cgcacgaatatcttgttgtttggagcgatccgagaaaaactctgtaaacatgttggtttaccaggacctccttacaggtgatgagcttctctctgactccttccgttacaaggaaattgagaatggaatgctgtgggaagttgaggggaagtgggttgttnaaggagcagttgatgtanacattggtgccaaccctctgcngagggtggaggngaagatnaggganttgatgatgcagctgttaagttgttgacatc

SEQ ID NO: 45853 - DNA, 257 bp, Glycine max
  unsure (1)..(257): unsure at all n locations; Clone ID: 701131256H1
gtccaatcccacctgggaggancctnacntatnctatccaggtaanagancagatccggtagctatntctacttnncttcncttggaangcannaagctgccggagcatttggtggcatcagaatttggagncgncctntnattnctgtnccntttcctcctcctgccggggantttaccatacttgctggagattggttcaagntcgaccacngaaggctganangangctagngatggtctaatcnccccttccc

SEQ ID NO: 45854 - DNA, 123 bp, Glycine max
  unsure (1)..(123): unsure at all n locations; Clone ID: 701131257H1
ttgcattacctaaacaaggaagaccggttactgcgttggcttttggttaagcagcgtaatacaaaatttgggcttgactcctatggtgatgaaggtagatatgagctaagcaaattgtcccng

SEQ ID NO: 45855 - DNA, 261 bp, Glycine max
  unsure (1)..(261): unsure at all n locations; Clone ID: 701131259H1
ggtcactgcccagattggtccacagaacaaagaacaacagacagcagcaaggtcaaaaaaattgtttcgaatggcaaaagaagaggaacaacaacaacccacttcaccgatgcacccaccttacgcttacaccataattctgaacatcttcagcaagagaagaacatgggcgtgtctatttctattggtctacggcacccttttgacttcttcgtggacttcctcaaatcaagctttcttgggtacaatctgcaggttgng

SEQ ID NO: 45856 - DNA, 257 bp, Glycine max
  unsure (1)..(257): unsure at all n locations; Clone ID: 701131260H1
gatgcccctgttgatgagcttgtctttgatgtgaataagggncttgatgacctgttgccagttgaagttaaagagcagcgcctcagcaatctactgcaggcattgatggtcgcagcctgtgttgctgctatgcctgttttgaagaagataccaactncagtgctttggggctactttgccttcatggccattgaaagcttgccaggaaatcaattttgggagagaatattgtatcttttcactgctccaagtcgaag

SEQ ID NO: 45857 - DNA, 261 bp, Glycine max
  Clone ID: 701131262H1
ctatttcttcttgattacttgtttttgtgtttgagattgtgttgtgcatcttttataataattaggaacttaaaaagattgattcagtgtctcctcttagctgataccagaatgggaaagtaaatgaactaagggctcagaactgttatcagggatgttaatttgctctttctaaccagttcccatatgttgtttctgtgtgcgcaatgtggtactttatctaatgcggatgagatgctagttataaccttcacctgtccg

SEQ ID NO: 45858 - DNA, 263 bp, Glycine max
  unsure (1)..(263): unsure at all n locations; Clone ID: 701131264H1
accgcacgaatatcttgttgtttggagcgatccgagaaaaactctgtaaacatgttggttnaccaggacctcgntacaggtgatgagcttctctctgactccttccgttacaaggaaattgagaatggaatgctgtgggnngttgaggggaagtgggttgttaaaggagcagttgatgtagacattggngcaaacccttctgctgagggtggaggagaagctgagggattgatgatgcagctgttaagttgtngacatgttga

SEQ ID NO: 45859 - DNA, 96 bp, Glycine max
  unsure (1)..(96): unsure at all n locations; Clone ID: 701131265H1
tgggaatagtgctgcaatggcttactngtcaggaggaggtgatccttttnggagctantggaancccatttgtgtgcagggttcatattgccctca

SEQ ID NO: 45860 - DNA, 258 bp, Glycine max
  unsure (1)..(258): unsure at all n locations; Clone ID: 701131271H1
ggnaactgagctaaggcttggactgcctggaaacgtaggaggcactggcactgaagaagtgctcatcaggaagagaggtttctctgagactgaaactgaaactgaggaggatgagtctgctaccactgtggatttgatgcttaatctttcttctaaggaannnnnnnnnnnnnnnnnnnnnnnngataagcacaagactttgcctaaggagaagactcttctgcctggcagatcctgctaagcctccagccaaggcac

SEQ ID NO: 45861 - DNA, 99 bp, Glycine max
  unsure (1)..(99): unsure at all n locations; Clone ID: 701131275H1
aattcttcaccctcccctccttttcgcagacgaaggcgcattctattctaacgttcacaagataggaaggcaagactaaagattccnccacctganaca

SEQ ID NO: 45862 - DNA, 255 bp, Glycine max
  unsure (1)..(255): unsure at all n locations; Clone ID: 701131276H1
gaagccctgnangcaaaggtggctnanncnatggacgtcctaaggnatgttgctcagcatcangctggcggtactgctgatcagctggcttccttatctcttaatgacaacncttgtcctcttaaggtttatattttggagtttacttagtgatgatggattgttattttctgcactggctttgatacagattcaggttgagtttgtttngttatctcttaatgacaacttgntcctaaggttaaanaaaaaaaa

SEQ ID NO: 45863 - DNA, 138 bp, Glycine max
  unsure (1)..(138): unsure at all n locations; Clone ID: 701131277H1
ataaaaaaccaatggngtngcaacttgagcaccacatgacagcannccgtnttgttngaggganatggtgnaggttactaacacttggcggagttctaaagtgncactgctggccaagaccaatgtnggtgntggtcg

SEQ ID NO: 45864 - DNA, 259 bp, Glycine max
  Clone ID: 701131278H1
cggagagtacatagctgactacgttctaggagaccaatatagatcagattccaaaacagttaaccaacaagcttatttctatgctaaatccctcaaactcaccaacaaagatgtctttgtcttggacgttgacgacactactctctctaatctccagtattttgctaaccatggatttggtgtggaaccacacaatacgacggcgtttaagaactgggttcttgatggcgaggcattcgcactgccagagactcttaaa

SEQ ID NO: 45865 - DNA, 133 bp, Glycine max
  unsure (1)..(133): unsure at all n locations; Clone ID: 701131280H1
acttgcttaagattcgttctgccgcaaaaaaagatcgtgatgtcatggaaaagggaattanggcttttgtttcttacatccgtgcttataaagagcatcactgttcctatatttttaggtggaaagaattgaa

SEQ ID NO: 45866 - DNA, 240 bp, Glycine max
  unsure (1)..(240): unsure at all n locations; Clone ID: 701131281H1
ataccctctctctttacctctcaannactacaagaagccaannaaggtgcggtcatctgtncngaanatgtgtgaattttgtcagatagttaagcgccggggacgaatctatgtgatttgctctgggaaccctaagcacaagcaacgacagggcatggcaacatttgcaagtgaaggccnatctcgaccagtgtctcggaaacaagtagctggaagatggggataagctgctcaaatngc

SEQ ID NO: 45867 - DNA, 137 bp, Glycine max
  unsure (1)..(137): unsure at all n locations; Clone ID: 701131283H1
cgtcgtcgcaatgggangtgtgatccgtgcgcangtaagggagcaggctcggtcttnaagtcccacacgcaccaccgcancggccctgcacgattccggagcctggacttcgnggagcgcaacgnctacctncaang

SEQ ID NO: 45868 - DNA, 158 bp, Glycine max
  unsure (1)..(158): unsure at all n locations; Clone ID: 701131284H1
gaattgaaggccttgctaagaagcatcaggccactcctgcccagttggcattagcatgggtacttcagcaaggcgaggatgttgtacctatccctggaacaactaagattaagaacctggatcanaacataggttccttagcagtgaaactgtccanc

SEQ ID NO: 45869 - DNA, 258 bp, Glycine max
  unsure (1)..(258): unsure at all n locations; Clone ID: 701131285H1
catgaaccaagcaaggnaaaaaaatcgattgagnaggcgtgggggttttgtatcaaacattccaggagatgtccctcgagtagatggacagctgngcagtagcannggcttttggtgacaggagcctgaagatgcatcttagttcagaacctgatgtgattgtacaggaagtagatcaacatacagagtttcttattctggctatgatggaatatggaaggttaacttcttntganaaaattctttgtttataaataa

SEQ ID NO: 45870 - DNA, 259 bp, Glycine max
  unsure (1)..(259): unsure at all n locations; Clone ID: 701131286H1
ctgagttaaggcttggactgcctggaaacggaggcactgaagaagtgctcatcaggaancaggggtttctctgagactgaaactggtcatgaagatgagtctgccaccactgtggatttgatgcttaatctttcttctaaggagnnnnnnnnnnnnnnnnnnnnnnnnnnnnnnnnnnnngataagcacaagactttgcctaaggagaagacccttctgccagcagatccctgctaagcctccagccaagacgcagtgg

SEQ ID NO: 45871 - DNA, 235 bp, Glycine max
  unsure (1)..(235): unsure at all n locations; Clone ID: 701131288H1
acaccgcccaccgactgtgtgaganngagtgtgagagaaanngtgactgacttttcgaannaganaaancaaaaatgagtttccgtcattccatcatgaacgntcttcccattctcctcttcttnctcttcgtttctgcattagtttctgngaagaaaactggtgatgtgacggagctgcaaattggcgtgaagcanaaaccagtatcaggtgaagttcaggcacacaaaggtga

SEQ ID NO: 45872 - DNA, 256 bp, Glycine max
  unsure (1)..(256): unsure at all n locations; Clone ID: 701131290H1
ggtgagtgaaaatggcggtacccttgctctccaagaagatcgtgaagaagcgcgtcaagaagtttatacgcccccagagtgatcgcaagatctccgtcaagccaagctggcgcagacccaagggtattgattctcgtgtcaggagaaagttcaaaggatgcactttgatggcccancattggttatggctcagacaagaaaacccgccattatctaccaaatggtttcaagaaatttgtcgtgcacaatgtgaaag

SEQ ID NO: 45873 - DNA, 263 bp, Glycine max
  unsure (1)..(263): unsure at all n locations; Clone ID: 701131294H1
gctacagcatagagatcaagnaaggaaggnaggaagatgttgggtgttataaggcacaagagtattcgccctgccttctccgcaatcagacacttgtcttctgcagctaaagagattactgtcagggaggctctgaactccgcactncgatgagganatgtcnggngancctaaagngtnctnnatgggtgaagnngtngggngaatatcggggttcanccagnatnnnccaaggggnctcctcaacaagtatngcccgagag

SEQ ID NO: 45874 - DNA, 71 bp, Glycine max
  unsure (1)..(71): unsure at all n locations; Clone ID: 701131296H1
ggtactangatttcaagcatacacactttgatcaatattcacctcccagaacttccacacaaacatagcgg

SEQ ID NO: 45875 - DNA, 297 bp, Glycine max
  unsure (1)..(297): unsure at all n locations; Clone ID: 701131301H1
anatgatgcnggngggggtctagtnttctngcacccaaagggtgntatggtcagacacataattgaagatttctggaanaaaattncacatgaaacgtngctatgatctactgtacacaccgcatgtggcaaaacctgatctttggaagatcagtggtcatttggatttctanaaagagaatatgnatgatcagatgagcgttgaggatgagctttatcagcttcggccaatgaattgtcccttatcatattttggtgtacnaaagcaagcttcattcctatcgtgattncctatca

SEQ ID NO: 45876 - DNA, 283 bp, Glycine max
  unsure (1)..(283): unsure at all n locations; Clone ID: 701131305H1
acnanttgctantcttggctttgtntcttcctgtttctagcacttattggcacnctctatccctagaatcntggagnacngtnanattggcttgtcttgctgtatgntccttcatccgnttttgntgggtacactgcagcatccttccatggnntgtttgctgngaatggatgcgaaaggagtgctagtntaggagnaattntttacantggaccagtgtttgttgtaggctctatntcnacattgtcgcaatatcttananggtacaattggactcncattc

SEQ ID NO: 45877 - DNA, 285 bp, Glycine max
  unsure (1)..(285): unsure at all n locations; Clone ID: 701131306H1
caaaatgtaaggntatatacctacaaagaactaaaagttgcctctgacaatttcagtccagccaataaaattggggagggtggatttggttcagtttataagggattgctaaaagacgggaaagtagctgccataaaagtactttcagcagaatcaagtcaaggggtaaaggaatttgtgacagagattaatatgatctcagaaatagagcatgaaaatttggttcagctatatggttgttgtgtggaagggaatcaacggattttggtctacaattatcttgag

SEQ ID NO: 45878 - DNA, 284 bp, Glycine max
  Clone ID: 701131307H1
ataacctaaacctatctttcttctctctctgtgtgtgcgcttcaacggcaaccagaagcagccatggccactgcaaggactgtgaaggatgtttcacctcatgagttcgttaaggcgtactcctctcacctcaagcgatccggcaagatggagctgccagagtggactgatattgtgaaaactgcaagatttaaggagttggctccttatgatcctgactggtactatgtcagagctgcttccatggcaagaaagatctacttgagaggaggacttggtgttgg

SEQ ID NO: 45879 - DNA, 284 bp, Glycine max
  Clone ID: 701131308H1
gcaagaatggcacttcgttgcttggtgatgtccctttctgttctcttcactcttggtcttgcgagagaaagccatgccagagacgaagatttttggcatgctgtttggccaaacactcccattccaagttcattgcgagatcttctaaagcctggccctgcaagtgttgaaatcgatgatcaccctatgcaaattgaagaaacacagtacccgaaaaccttcttctataaagaagaccttcatccaggcaaaataatgaaagtacaattcagcaagcctccctt

SEQ ID NO: 45880 - DNA, 285 bp, Glycine max
  Clone ID: 701131309H1
gcacgactatggaatgtgagggaagagagagaccagtttgaggaagcaaacaatccagatagttgaacacctgaaaataaaggaagatgaactttcaaaatcaatcagctcatgtagggttgaagcagatgttatcaaaacctggattaattttctggaagatacttgggttcttcagtggtcaaatgcagaaattaatgacaagcaggtcaatgatgaattggagagacatgaggactactttgtgaacttggccattcaacttcttactacttaccagaaaga

SEQ ID NO: 45881 - DNA, 267 bp, Glycine max
  unsure (1)..(267): unsure at all n locations; Clone ID: 701131310H1
anacancagagcccntcanntctctctgtgcgnctgtggcgtcaanctgcagattcnttntccngggatcnggtcttncangtcctttatctgtnctcttcacataccggtgtacagtcagggagtggcttaactagcactgatgaatttctggctgctaaaacaactggagttcccaacactcctatttgcaatgtggagcctccaaaggtagtcagtgcaaccactatgtccnngacagctgtacctcaggcccggaaagcatcc

SEQ ID NO: 45882 - DNA, 282 bp, Glycine max
  unsure (1)..(282): unsure at all n locations; Clone ID: 701131311H1
cacccttgaagaatgaacggcacaggacaccgcactcgaaaacaanatatcccgccctccattattaccatcctaacctccgantatccctccctctctattttcttccataaatcactccactntcctcaacgcatcatcgtatttcatttcatttccctncccccanncccnncgncaacgccaaacaaaccctaaatctctcnnnnnnnnnnnnnnnnnnnnnnnnntcaaccatgagagagatcctgcacgttcagggaggccaatgcggtaaccaaa

SEQ ID NO: 45883 - DNA, 281 bp, Glycine max
  unsure (1)..(281): unsure at all n locations; Clone ID: 701131312H1
cgaaaaacgacctaaattgggtagtcatgcggtagatgtaaaagggaaagacaagatgtcaaaaggcagtgatgctgtggagtcagcaaaacctgatgagatgaaattacttaattncgctgaaaacgataaagtgtttaatattggtaagagcagcaagaatgaaaataaattttatgcacacagaatggtgaggactggtcttcaaaaagaaggatcaaaagtaatttttggtgttcctaaaccgggggaagaaaaggaaatttatngaagtaagcnag

SEQ ID NO: 45884 - DNA, 280 bp, Glycine max
  unsure (1)..(280): unsure at all n locations; Clone ID: 701131313H1
aaaacaatgggttccgataancacnagaanttggagttcttgaaggagatcggtttgggctcttccaacattgnctcttacattaatggccagtggaaagccactggttcttctgtcacttctgttaatccttctaacaatcagagtatagctcaagtgaccgaagcaactttgcaagattttgaggaggggttgcgagcttgcagtgaagcagctaagacatggatgactataccggcaccgaagagaggtgagattgtgagacagaannaagaaacat

SEQ ID NO: 45885 - DNA, 293 bp, Glycine max
  unsure (1)..(293): unsure at all n locations; Clone ID: 701131317H1
ctgatcgctcatagagagttcgacgcgggcggttgcagaagaagattgcaagatgaagttcaacatncgcgagtcccaccactggatgccagaagaagctcgagatcgacgacgatcagaaactacgagcattttgggacaagaggatctcacaggaggtcagcggagatgcacttggtgangaatttaagggctatgtcttcaaaattactggaggttgtgacaaacaaggattcccgatgaaacagggagtgcttactcctgggtcgtgttcgacttttgcttcacagggg

SEQ ID NO: 45886 - DNA, 283 bp, Glycine max
  unsure (1)..(283): unsure at all n locations; Clone ID: 701131319H1
ggagcttactaaaagctcttggcacacaggttgcagagcccttaagagcaatggtgatgggagctccattggaggatgcccggcatcttgctcaacgttatgacagaatgcggcaggaagccgaagcccaggctattgaagtttccaaacgccaggcaaaagtaagagaaacaccaggcaatgctgagaatgctatgaagctggaagcagctgaaacaaagctgcaagacctgangactaacatggcaatattgggaaaagaagcagctgccgcaatggctgc

SEQ ID NO: 45887 - DNA, 282 bp, Glycine max
  unsure (1)..(282): unsure at all n locations; Clone ID: 701131320H1
ggccattnngcnagntatttaataatggcaattgagaagcatgaggatgttgagagtggatatttgcacgagnnccttcattcaaccagnggntgcngntgntgcttgtnaagagaatggatcagataagagtgtganaaatggatccantggaatggntttgcttagcacacttgttgctgtttgtgggtctttcacanttggaacttgtgtgggctattcagcacccactcaagcggctatcagggcagatcttaatctcnctcttgctggagtntccat

SEQ ID NO: 45888 - DNA, 279 bp, Glycine max
  Clone ID: 701131321H1
ggatcttcacaatccaagcctgatggggctgtaaaaaaaatccggaaacctaagccttggaagcatcctcaacccataacaaagactcagctcacacaattacgtgatgagttttgggacacagctcctcactacggtggccggaaagagatttgggatgctcttcgagccgctgccgaggctgatctaactttagcacaagcaattgtggatagtgccggggtcattgtccagagttctgatttgacagtatgctatgatgaaagaggagcaaagtat

SEQ ID NO: 45889 - DNA, 279 bp, Glycine max
  unsure (1)..(279): unsure at all n locations; Clone ID: 701131323H1
cgcgaggnnaaagatgaaaaggactttgaaaagagagtggtgctcattgatatttaagattganacaaggcttttttgttggttggagatgcatgattgtggtgtgctttgtnttcatttcatcatatgacagccttgtgggtttctttggtgtttcttgatgcatacttaatttactttattattgtgtatttatctcttccatttacaaaaaaaaaagtttgtgtaggtttccttctttgaagtaaaaagaaattaaatatgtactgaaaatggaat

SEQ ID NO: 45890 - DNA, 279 bp, Glycine max
  unsure (1)..(279): unsure at all n locations; Clone ID: 701131324H1
atccctgtaaccgcgttcgacgatttagggtttttttcggagacaatggcggatgaatcggagcacacggcggcgccgcgagcggtgaatcgctgcttgacaagattgccgagaagattcacggccaccacgactcttcctcttcctccgattccgattcggagaaaaaggaaacttcgtcaattaaggaaaaggttttccgcctctttggaagggagaagccagttcactccgtcctcggcggtggaaaacctgctgatgtgctcttgtggangaaca

SEQ ID NO: 45891 - DNA, 274 bp, Glycine max
  unsure (1)..(274): unsure at all n locations; Clone ID: 701131327H1
gggctcgagctaaggcttcttctgctatggccacttttccttgttccagggtgaaaantgggnngtgcgtgtggccagatgtgagacaactttgctttagaaaaggcatgctatatggatttatgcggttgttttctacaccgttgaaaacgntccgtggagctagccgctcgctgagagtgactcaattttgcagtgttgccaatatgtcttcctcattgcagattgaantggtaccttgcctgaaggacaattatgcttatctgttacatga

SEQ ID NO: 45892 - DNA, 277 bp, Glycine max
  unsure (1)..(277): unsure at all n locations; Clone ID: 701131328H1
cttggatctgtaacacagcaacgtcactcatcaaaccttactcatattaattttctctttctccaacttcaacactcaanaatttcaanaaagaatgcgaaacatcaactcagttaagcaagaattcctgaagaaatggatatggggtctcagaaaatacagctctcagaaganaaacatgagtctgatggagagaaagaaagccataaagctgtcagcagatttagccatggcttccaccaganacaaatccntcgctggagcagggcncttattt

SEQ ID NO: 45893 - DNA, 280 bp, Glycine max
  Clone ID: 701131330H1
ttccatctcttgcttcttgcttctattacttgcttctttcttcaccatgtcacttgctgggaaaatcaccactgaaattggggttcatgcaaccgctgcaaagtggttcaacctctttgcaacacaacttcatcatgttcaaaaccttactgatagagtacatggaaccaagctgcatcaaggtgaagactggcatcacaacgagacagtcaaacactggacttataccatagatggtaaggctacaacatgtctggagagtattgaatccattgatgaa

SEQ ID NO: 45894 - DNA, 285 bp, Glycine max
  Clone ID: 701131331H1
cgagaagaaccgtaaagagatctgcaaatacctcttccaagagggagtttgctttgcgaagaaggacttcaatctggcgaacacccggagattgatgtgccgaatctgcaggtgataaagctgatgcagagcttcaaatccagagagtacgtgagggaaacatttgcgtggatgcactattactggttcctcaccaacgatggaattgagttccttaggacttacctcaaccttccatccgaaattgtccctgccactctcaagaagcaggccaagcccgccgga

SEQ ID NO: 45895 - DNA, 290 bp, Glycine max
  unsure (1)..(290): unsure at all n locations; Clone ID: 701131332H1
cttctcgaagacgagcttcaacttctctgcgaatatgtaaaaganatccttattgaggagtccaatgtgcagcctgtcaatagtccagtgactgtttgtggtgatattcatggtcaattccatgatctaatgaaacttttccagactgggggtcatgtgcctgaaacaaattatatttttatgggagactttgttgatcgaggttacaatagtcttgaagttttcaccatccttttacttctaaaagctagatacccagctaatattacccttttacgtggaaatcatga

SEQ ID NO: 45896 - DNA, 291 bp, Glycine max
  unsure (1)..(291): unsure at all n locations; Clone ID: 701131333H1
agctagcncagctttaaattgcnttagtgactcatgatgcatcatcctttctttatcattacaacnaaaatataggtnaagaaagttcgactcagttcagagtagggaaagcctctgatnntncttgttcttgaaagaaaacactctcaacactcaacagaaatncctggctaatccttggtggaccggtcatcaggtggggttgggtgtaggggtagaccctgcagcaaccaattcaccttcttccacacnacatacgntnnaaatngacntgtccncanngnanncgnt

SEQ ID NO: 45897 - DNA, 286 bp, Glycine max
  Clone ID: 701131334H1
aaagccctctcttatttccagacgcggcggcttcttcttccgtttttgtctatcggcgtgaacaatggcgacttacgctgcgatgaagcccacaaagcccggcttggaggagccccaggagcagatccacaagataaggatcaccctttcctccaagcacgtcaaaaacctcgagaaggtttgtgcggacttggttcgcggtgcaaaggacaagcgcctcagggttaagggacctgtcaggatgcccactaaggttcttctcatcactaccaggaagtccccttgt

SEQ ID NO: 45898 - DNA, 212 bp, Glycine max
  Clone ID: 701131335H1
actctcttcttctttttcttctccctcctcctttgcctttttttgtagcttccccttgcgctctgccacttcatcattgaaggtacaaacaattcagaagaagaagcgcgtggtgaaggcagtggaagaagatacccagcaagaactcaacgctgctgatgactctgaacaaccatcaacctccgaagcaccacccgttgtggttcccgttt

SEQ ID NO: 45899 - DNA, 277 bp, Glycine max
  Clone ID: 701131337H1
aaaataatttcttcacatttacaatgaagcaatccactctattcctgttcctattcctattccccctcgttcatgctctttcttacgaagctgcttatattagagatggcctcaaatcctattcccagcttgatctccctcactccgtttttggttctgaaagtgtagccttcgattgccatgggaaaggaccatatgttggagtgtctgatggtagaattctcaagtggcaagagacaaagagagagtggattgactttgcagttacctcgccaca

SEQ ID NO: 45900 - DNA, 276 bp, Glycine max
  unsure (1)..(276): unsure at all n locations; Clone ID: 701131339H1
caggttctggtcagaatgtaaatgctactgacacttcgacagtctctgatgcttatgcaaagatgcttacaatttttatcccacttctggtggatgagagttctttttttgcacacttcatgtgctttgaagttcctacacttgttcctcctggaggtgttgttaatggcaacaaagctggatnnnnnnnnnnnnnnnnnttgggaattatggacattgatgagaatgacagcaaatctggtaaaaattctgcggacttgaagctttgaataaatc

SEQ ID NO: 45901 - DNA, 277 bp, Glycine max
  unsure (1)..(277): unsure at all n locations; Clone ID: 701131340H1
atatggctnacttgttggaatggtcaaagcaagataagaaacgaatgcttcatgtcgtctaccgtgttggtgaccttgatcgcaccatcaaattttacacagaatgtntagnaatgaagcttttgangcaaagagatatcccagaggagaaatatgctaatgcttttcttggatttggccctgaagaatcccattttgttgttgaattaacatataattatggggttacctcgtatgacattggcgatggctttggacattttgcaattgcaactca

SEQ ID NO: 45902 - DNA, 277 bp, Glycine max
  unsure (1)..(277): unsure at all n locations; Clone ID: 701131341H1
ctctntgctcttnatttcttcccttgtattggcttctccaaatccatgtttcctctgggaaactagtccctggactatcatggaattactatttgttgacatgtcccaagcttgagaggattataaggaagcatcttgaggatgtcttcgagaaggacagtggagtagctcctggcatacttcgactcttcttccatgactgctttcctaatggatgcgatgcgtctatattgttgaatggagacggtgacgagaagcaacaccgtgctaactttgg

SEQ ID NO: 45903 - DNA, 272 bp, Glycine max
  Clone ID: 701131343H1
aggggattttcccttgaagaactcaaggcagcagggattcccaaaaagcttgcaccaacaattggtattgctgttgatcatcgccgcaagaaccgttctttggaaagtctgcaagctaatgtgcagaggctgaaaacatacaaggccaaattggttgtgttcccaagacgggcacagaaggttaaggctggtgattctactcccgaggagcttgcaaatgcaacgcaagtccagggttctttcttgcctattgtgagggagaagccaactgt

SEQ ID NO: 45904 - DNA, 243 bp, Glycine max
  unsure (1)..(243): unsure at all n locations; Clone ID: 701131346H1
caccatgtcacttgctgggaaaatcaccactgaaatcggggttcatgcaaccgctacaaagtggttcaacctcttcgcaacacnactccatcatgttcaaaacctaactgatagagtgcatggaaccaagctncatcaaggtgaagactggcatcacaacgagacagtcaagcactggacttataccatagatggtaaggttacaacatgtctggagagtattgaatccattgatgaacagag

SEQ ID NO: 45905 - DNA, 281 bp, Glycine max
  unsure (1)..(281): unsure at all n locations; Clone ID: 701131347H1
aaaagagcgtcgtagtcgcaaccctaatcagaagaagcgcagttnaagcgagtgacagccaccagccatgggtcgtatgcacagccgcggtaagggtatatcctcttctgctttgccctacaaaaggacacctcctagctggctcaagatctcttcgcaagatgtcgaagaaaatatctgcaagtttgcgaagaaaggtttgaccccgtctcagattggtgtcattctcagagattctcacggtattgctcaggtcaatagcgtcactggcagcaaaatcc

SEQ ID NO: 45906 - DNA, 284 bp, Glycine max
  unsure (1)..(284): unsure at all n locations; Clone ID: 701131349H1
gaaacacagctcttctttgatatgctgntgatggtgttggtcactggaaaagagagaagcaagaaagaatgggctaagttgatttcctctgctggttataacaactacaagataactccagtctttggcttaaggtctctcattgagatctatccatagtaagttaatgagatgtgccagcactctatcattcatatatgtaagggctataatttttctgtttcgattcatgagtgaatggtgaataagtaacaatagcaatagactgaactctcttcatcata

SEQ ID NO: 45907 - DNA, 227 bp, Glycine max
  unsure (1)..(227): unsure at all n locations; Clone ID: 701131350H1
gaggcatcatggctcaaaatgnnagtgggcnnagagtagtngtgnncaatggttntgaatccnntgatgatgcatacgatcatgaacacaagctgngtcaaaagggtagcaccaaggtcaaggaggaanaggtttctgtggagagggtgttccagcaccttctggtgcnatcatggaggaaccaattgacagtnagagccttgtggtcagctttgcactcagcatac

SEQ ID NO: 45908 - DNA, 281 bp, Glycine max
  unsure (1)..(281): unsure at all n locations; Clone ID: 701131351H1
cannacttcctcatacncttttattcattcccattcgtttctagggtnttcttttctttgccgagaaaatgagagagtgcatttcgatcnacatnggccaggccgntatccaggttggaaacgcctgctgggaactctattgccttgaacacggcattcagcccgatggacagatgccgagtgacaagaccgttggcggagganacgacgccttcaacacatttntcagcgncgaccggcgcnggaaagcacgtgccccgcgccgtcttcgtggatcttga

SEQ ID NO: 45909 - DNA, 277 bp, Glycine max
  unsure (1)..(277): unsure at all n locations; Clone ID: 701131352H1
ancgagccggattccgaagatgaagaccgaatcgcgttcgaaagaagaaacaaaaacgtatncngaatggttcgatttggcagattcagatggagatggacgaatctctggaaacgatgccacaaatttcttcgctctctccaacttgtcgcgctctcaactgaagcaactctgggctctagccgatgtcaaacgacaagggtttttgggcttcacggagtttgttactgcaatgcagttggtttcgctagcacaagcagggcacgaacttaactca

SEQ ID NO: 45910 - DNA, 272 bp, Glycine max
  unsure (1)..(272): unsure at all n locations; Clone ID: 701131357H1
caactctantggaagaggaacaagaaattgaggttccagtttacaaagaaccnccaggagaaaattccaagatggaaactgatgaannnnnnnnnnnnnnnnnnnnnnnnnnnnnnnnnnnnagcaccaatgacaatgatgttagcatgcaagatgctaataccaaggcaactgctaatgcccctggagccgaaaatggtacccctgaggcaggagataagcctgtgcagatggataccgataccaaggttgaggctccaaagaagaaagtt

SEQ ID NO: 45911 - DNA, 268 bp, Glycine max
  unsure (1)..(268): unsure at all n locations; Clone ID: 701131358H1
ttctctnncaaatgcttcattccaagatggttaggactctgtaggctgataaagacaacactcataccgttgganagaaggatgctgctngccatgttgcttaatttagttcttnacttccttngtcttcttgagttttatcngagacgggagtgcagggatcactagctctttcattcggtcagagtggccggcagttgacatcccccttgatcatgaagcatttgcagttccaaagggttataatgcacctcaacaagtgcacatc

SEQ ID NO: 45912 - DNA, 270 bp, Glycine max
  Clone ID: 701131360H1
cggacactggaagcatcacgatgtcaccgttaaggacgagaagacccttctcttcggtgacaagccagtcactgtttttggacacaggaaccctgaagagatcccatgggggtcaactggagctgatatcattgttgagtccaccggagttttcaccgataaggacaaggccgccgcacatttgaagggtggtgcgaagaaggttattatttctgcccccagtaaggatgcccccatgtttgttgttggtgttaacgagcacgagtacaa

SEQ ID NO: 45913 - DNA, 277 bp, Glycine max
  Clone ID: 701131362H1
gcggcttgactcgagacatctgttggtatgtcaatggcaaagaaacccgtgaaatactatgtggtggacgcgtttactgagtcagcattcaaggggaaccctggcatctgtgtgtttcttagaggaagagagagatgaggagtggctgcaagcagtagccgctgaattcaatatctctgagacttgttacttatcacgcatcacccactcgctccatggaatctctaatccccgttttcgtctcagatggtttactcctgttgctgaggttaaactt

SEQ ID NO: 45914 - DNA, 281 bp, Glycine max
  Clone ID: 701131363H1
gagaaagatggaggggaaggagcaggatgtgtcgttgggagcgaacaagttccccgagagacagccgattgggacggcggcgcagagccaagacgacggcaaggactaccaggagccggcgccggcgccgctggttgacccgacggagtttacgtcatggtcgttttacagagcagggatagcagagtttgtggccacttttctgtttctctacatcaccgtcttaaccgttatgggagtcgccggggctaagtctaagtgtagtaccgttgggattcaag

SEQ ID NO: 45915 - DNA, 286 bp, Glycine max
  Clone ID: 701131364H1
gcttcactctacgcagatcgcagcaaaccagagattgaactccgacgatgcctcccgtcgctcctcgatccggcgatgccatattcgccaacgtcgaacgcgtcaatgcggagtgtttactttgacgtatggcgcaattgtgcgtcaattgctcacggatctggaagaggttgaggaggttaacgagcagcttgatcaaatgggttacaatattggaatccgattgattgatgagtttttagctaagtctaatgtctcaagatgcaacgatttcagagagactact

SEQ ID NO: 45916 - DNA, 281 bp, Glycine max
  Clone ID: 701131365H1
tgcctacaagtatgtttcggagctatggcgcaagaagcagtctgatgttatgagattcttgcagcgggtgaggtgctgggagtatcgccagcaaccttctattgtccgtttgacaaggtctactcgcccagataaggctcgtcgcttgggtttcaaggctaagcagggttacgtgatttaccgtgttcgcgtacgaaggggtggccgtaagagaccagttccaaagggtattgtttatggtaagcccaccacaacaaggtgttactcaactgaaatttcaa

SEQ ID NO: 45917 - DNA, 272 bp, Glycine max
  unsure (1)..(272): unsure at all n locations; Clone ID: 701131366H1
atggccgaccatgcactgtgaacacagttctctggaacacaatccagcttctgtttccacaagaagttgaagcaagaaaagaagccagtgccttgaatagtctccaacaagctcaaaatctgagtccagaatcagcattttttgctaatctaaggaatgacagacgacagccttttaggggggnnnnnnnnnnnnnnnnnnnnnnncagcaggatgaggatgctgcattggctagaatgttgcagagacaaattgatgaacaaagaagcccg

SEQ ID NO: 45918 - DNA, 271 bp, Glycine max
  unsure (1)..(271): unsure at all n locations; Clone ID: 701131369H1
ttgccaaggcaacagataataactcaagacttcaattaacaaccaccaccaaaggtgtgatatggttggnccaagtgtctgcnatgccactggacacatataaggnacatggtttccgaactgaccttgttgaaatgctgacagctttgaaaccaagatttatcagatttccgggcggttgttttgttgaaggagaatggttaagaaatgcatttcgatggaaaacatccattggaccatgggaggagagacctgggcactttggtgatgt

SEQ ID NO: 45919 - DNA, 274 bp, Glycine max
  Clone ID: 701131370H1
aggtaagcacaaccaaagcaacaccccaaatggcttcagcttctgttcccatggcgttgtcactgagctctgttaccaacaacaacaagccttcatccgaagccttcttcaggccactacccctacgccaaccaaagaggaccctcttcaccacgaaggcagtgtcaaactccaagcctcaaatcaatgcatctttgaaggagaaggcagttgccggactcacagcagcttctgtgacagcatctatggtggttccggaggtggctcatgctgc

SEQ ID NO: 45920 - DNA, 273 bp, Glycine max
  unsure (1)..(273): unsure at all n locations; Clone ID: 701131372H1
cagagctcagcgataagcagaaagtggagatcgcgaaatggttcctcctcaactctcctcncggagaaatccaatacgttgccaaagatgtgaaatcgattctcaacaacgacgatttgtacaaggaagccgcttccgaggcttttccctattacaacaaatcgcacttgatttccatcccaatgcccaaccgaagcggagacgtactggttacttcgttcggtgagcttgagggtaatgcatttcttgaacctaggactgcgcaagttgcaa

SEQ ID NO: 45921 - DNA, 238 bp, Glycine max
  unsure (1)..(238): unsure at all n locations; Clone ID: 701131373H1
atctgtgacgagcatcatggcctcgagagcnntgctattgttggctatgtgtgtgcttccggccatggttgtggccattcgcccagcaaagaaccctttttgcgtgaagggtcgcgtctactgtgacccttgccgtgctggttttgagacctcagcaaccacctacattgccggtgctgagattatgttgcaatgcaagagcagggttagcaacgaggttgtgtacaccaagaagggg

SEQ ID NO: 45922 - DNA, 265 bp, Glycine max
  unsure (1)..(265): unsure at all n locations; Clone ID: 701131374H1
tctgcttcttcactttctctcgtttcaatcgaaaaaaatcatgggcagaaaattcttcgtcggtggcaactggaaatgcaatgggaccactgaggaggtgaagaagattgttactactttaaatgaagctaaagtccctggagaagatgttgtagaagttgttgtgagccctccttntgtgttccttccttttgtaaaaagtttgctgcgccctgatttccatgtctcggcccaaaattgttgggttcgcaaaggtggtgcttat

SEQ ID NO: 45923 - DNA, 246 bp, Glycine max
  unsure (1)..(246): unsure at all n locations; Clone ID: 701131375H1
gcccaatttccattgaacagaaaacnaccacctcatgggacnccaatggaaaaacttattacagatactcaacagtcgtgactaacaaatctaacaagagtctcaattctctcaatctttcaatatccaagctttatggtccaatctggggtgtcacaaagtcaggtgattcatacacattcccatcatggctcagctcattatcagctggcaaaagccttgaatttgtctacatccattctgctt

SEQ ID NO: 45924 - DNA, 269 bp, Glycine max
  unsure (1)..(269): unsure at all n locations; Clone ID: 701131377H1
cagcagccaataaaaggacaaaagtgtggtggggagttcaatttggagaaatggaatgcacatggagctgcatatcttctgcatgataggttgcacactcgttctgatatcacattgctnatgtttgttcattttgtgcaancatgcttaaaacaacattcatccaaccttaaaactggccagtttgtaagacttgtgggctaccccctggaagagttccaaaaaagggaactagtcttacaaaattagggtttatgattcctagtctc

SEQ ID NO: 45925 - DNA, 265 bp, Glycine max
  unsure (1)..(265): unsure at all n locations; Clone ID: 701131378H1
ttttaataaactttaactaatagtagagtgctacaangagtgtattaaagaangttgctagcacttctcatcagacaatcaaagcaaccagaaataaaaattctgcttctacactacacagaatnaacagctcgcaaatagttctattttgagagtgatttggttgtgcatatatcatcactcttttacatgagtggtttagatataattatgctaatggatggaatgctgagtccttatgtcatcctgtgaggtgaaatggatc

SEQ ID NO: 45926 - DNA, 282 bp, Glycine max
  Clone ID: 701131380H1
atgaggctattgctgaattggatacattgggagaggagtcatacaaggatagcactttgatcatgcaactgctacgtgataacctcaccctctggacctctgacatgcaggacgatggtgcagatgaaattaaagaagccgcacccaaaggtgacggggaacaaaattaaacataccatactctctgcttattagtcattgaacttcccttctgtaatgttttcaaagggagaaggtgttgaatgctaatctcaatgttactgagattttgggcattcgtgt

SEQ ID NO: 45927 - DNA, 280 bp, Glycine max
  unsure (1)..(280): unsure at all n locations; Clone ID: 701131381H1
gagaactgttgangttattgcatccagactgtatttttactagtcgtatagctatgagcttacagganntcttgctgaaattcggggcaacctccttgcattgcaccgatttgcgactctccgccatgatgagctgggacaggaaacacttcttaatttgttacttcgaaactacantccactacaacctatatgatncaggctgagaagttgaggtccaaggctcctcganttgaagcacattcaaaccagcagttntgtcgttatctcttctaccttg

SEQ ID NO: 45928 - DNA, 272 bp, Glycine max
  unsure (1)..(272): unsure at all n locations; Clone ID: 701131383H1
tgtncacgtaccacgttgaaacggttcnatcatggncggcactgagcagacttcacatactgatccacttagtggnagtgttgtcgctgtgttactaccgcataactcacttgttnctggaacctccaacagcgccatggcttctgatgaccgtagcggagttcttctctcggtgctctggttcttcaaccaagccttccggtggcggccggtgtcgcggagntncatgacggagaagctgccgagggatgagaagctgccggggcttgaca

SEQ ID NO: 45929 - DNA, 272 bp, Glycine max
  unsure (1)..(272): unsure at all n locations; Clone ID: 701131384H1
cacagttaaagatgccaggggaaataatgttaatctcgccgattacaaaggaaaggtccttctcattgtcaatgttgcctcacaatgcggcttgactaattcaaactacacagagcttaaccaattgtatgagaaatacaaagggaaaggacttgaaattctggcattcccatgcaatcagtttggggctcaggagccaggaactaatgaagagattgtggagtttgcntgtactcgcttcaaagctgagtttcccattttcgacaaggtgg

SEQ ID NO: 45930 - DNA, 271 bp, Glycine max
  unsure (1)..(271): unsure at all n locations; Clone ID: 701131385H1
atacgcttgatccatatgggcctcctcgaccacttgtgggacgacaccgtcgccggcccaaggccggaaaacggtctcggcaagctccgaaaacaccacaccttcactttccgacctagctccggcaaggaaacggagggcgggagcgtganatcgtacggagacgaatcgtcggaggaagcgacgagagtgacgcgtagtatcatgatcgtgaaaccgcccgggtaccagagtggatcgcctccggtttctcccgccggttctactactc

SEQ ID NO: 45931 - DNA, 270 bp, Glycine max
  Clone ID: 701131387H1
gcttgagatcaggaattaatttcagaggttcagagaatggcaacggattcttctaatggtaatggacatcaccaaacaacaacaaagcaacctcctttgccgtctcccctgcgcttttccaaattttttcagtccaacatgagaatcttggttactggaggagctggattcattgggtctcacttagttgacagattgatggaaaatgaaaaaaatgaggtaattgttgctgacaatacttcactggatccaaggacaacctcaaaaaat

SEQ ID NO: 45932 - DNA, 269 bp, Glycine max
  unsure (1)..(269): unsure at all n locations; Clone ID: 701131388H1
gaagttggtgtgtgtcaccggtgctgccggttatattgcttcatggattgtcaagttcctacttgaacgtggttacactgtcagggncactgttcgaaacccaaatgatcacacgaaggtagaacatttgctaaaacttgaaggtgcaaaggagagactgcacctttttaaggcagatcttttgggtgaaaattcttttgactccattgttgagggctgtgatggcgtctttcatactgcttctccttttattatcaacgtcaaagacc

SEQ ID NO: 45933 - DNA, 279 bp, Glycine max
  unsure (1)..(279): unsure at all n locations; Clone ID: 701131389H1
caaatgttcaggngcctatctcgaagttgggtgangtctctntgtgcgccgatggcgtcacangnnagcctccttcttcagaagcagntcaaagatctttgcaaaaaccccgtcgatggcttttctgccggtttggtcgacgaaaccaacatttttgaatggngtgtaactataattggacctcccgatactctttatgaggggggatttttcaatgccattatgagctttccacacaacatacgacnnngcacnnngagnnggcccgngnacagccgc

SEQ ID NO: 45934 - DNA, 263 bp, Glycine max
  Clone ID: 701131390H1
gataccatgcggaagaagctcgatacccgtttccccgctgctcggataaagaagataatgcaagcagatgaggatgtcggaaagatagcgttggcagttcctgttttagtttctaaagctctggagttatttttgcaagatctttgtgaccgcacttatgaagtaacccttcagagaggagcaaagaccatgaattcattgcatttgaaacattgtgtacaaagttatagtgtttttgactttctaagagacattgtcagcag

SEQ ID NO: 45935 - DNA, 201 bp, Glycine max
  unsure (1)..(201): unsure at all n locations; Clone ID: 701131391H1
gagcttntttaagcttttcttccattaacatattatcataatgtgtggtattcttgctgttcttggttgttctgatgactctcgagccaaaagggtccgcgtgcttgagctctctcgcagattgaagcancgtggccctgacnggagtgggcnccattcctaaaccgggggagaaaaaggaaatttatngaagtaagcaag

SEQ ID NO: 45936 - DNA, 269 bp, Glycine max
  unsure (1)..(269): unsure at all n locations; Clone ID: 701131393H1
agagccttcagacttaggtttgagtagagacagtggcgttggtccttctaaaattcctaattnaagggactcctaaccanctaganaatttgccagccttgtctggtactnctctgtacaaagggactcttggaatgaatacagttggtgatgggacaagattgaatgtcaatgttgtaccatatactaataacagccccaatgactctcggnacctttttgcagatcttaacccattccagataaaaggaatggggaaggccctgtgc

SEQ ID NO: 45937 - DNA, 278 bp, Glycine max
  unsure (1)..(278): unsure at all n locations; Clone ID: 701131394H1
gtgatgcaaaacttcgaggagcaaaggctggaaaacaagtagaacaaagaagcacaatttcaacaaatgcagcaactactcgataagaggaaagttgaaatgcccaaaagtgtgagtgcaagtaaaaaaagttctccaaggatgccccaaaattctcttagaaaatcaactccacctgcnaattccacaaagganacctctaacacctttaactacgaaaaaaatatcatctagancatcacccatgcctgctacacgtaagtcttggtcagcaacac

SEQ ID NO: 45938 - DNA, 224 bp, Glycine max
  unsure (1)..(224): unsure at all n locations; Clone ID: 701131395H1
cgtctgnattgggttggctttagggcttngaatgccatctggggttttgctctcaggcaatcaagctccaaagctgacccctttctctcacttctaactcacataccttgntccattcttccactttctcnctctagaactacaatggtagaagacatgtgtttcctctacaaggaaattcttgttatgaagcctccaaagagatcaccaatgttgttaaggnc

SEQ ID NO: 45939 - DNA, 217 bp, Glycine max
  Clone ID: 701131405H1
tttggaactttggatatctatagcgaaagcgtggacaccaccaaaaaccgaactgttcccagatctctctctcactcttccaacaatcgaaatccaaaaccctaccgacaccacactcaatcgaaattctcattctcttctcatcgatggggcagaagtctctgatctacgcgttcgtgtcgcggggaacagtgattctcgcggagtacaccgaatt

SEQ ID NO: 45940 - DNA, 258 bp, Glycine max
  unsure (1)..(258): unsure at all n locations; Clone ID: 701131406H1
gtgaatttcatcaccttggtactatttcatttatcaccgttttgcagctttgaatgggggatctaacagtggatttggtggtttgtttttcntgttcagctatggttgggtactcacattgttcaaggggttgtgtaccnggttctgattaactccaaggcttcaacaagcaagcnaatggtgaatccatggaaacttatgtgaaactctctgctgtgctatgggttctcatggcctaacaaaggggtcatggctttc

SEQ ID NO: 45941 - DNA, 273 bp, Glycine max
  unsure (1)..(273): unsure at all n locations; Clone ID: 701131408H1
gaaccctcacctaacaatcagaacccaggatttggtgaaacgatgnacagtgataggaaaattggggttgccttggacttttccaaaggaagcaaaatcgctctgaaatgggctattgacaatcttatcagcaacggtgacactctctacatcgtccacaccaagccttccggaggaagtgaatcaggaaatcttctctggtccaccactggttcacctctgattccattgtcggagtttcgtgaaaaggaggtgatgcgtcatatgaggtgg

SEQ ID NO: 45942 - DNA, 266 bp, Glycine max
  unsure (1)..(266): unsure at all n locations; Clone ID: 701131409H1
gcacgctctgcttccagcgagtgttctttcttcgtttcaacaccttaatttgcanacgctgcttcttcccgcttgagaaatggcacaagaaacctttctattcacatctgaatctgtaaacgagggtcaccccgacaagctgtgcgaccagatctctgatgcagtgctcgatgcgtgccttgaacaggaccctgacagcaaggttgcctgtgagacatgcaccaagaccaacatggtcatggtctttggagagatcacaaccaagg

SEQ ID NO: 45943 - DNA, 102 bp, Glycine max
  unsure (1)..(102): unsure at all n locations; Clone ID: 701131410H1
gtgnangcngtnnccatgngngnaaatcgnntggtgcaatctgtntctgaaaatcgccgnaaagcgaagcacaatctcatatttaacttccacacaacatac

SEQ ID NO: 45944 - DNA, 270 bp, Glycine max
  unsure (1)..(270): unsure at all n locations; Clone ID: 701131412H1
cagggcagctcgtgtgggagatcgtcaagaaaaacaattccttcttggtcaagcagtttggaaggggcacccagagcgtcgaattcagcagagagagcaacaatctctacaacctcaattcgttcaagtactctggtttggcaaacaagaaaactgttactgttcagcctgagggcanaagatcaggctgtgttgttggctacaaccaagacaaagaagcaaaacaagcccgctgcattgctccacaaatctgtgatgaagaaggagttc

SEQ ID NO: 45945 - DNA, 270 bp, Glycine max
  unsure (1)..(270): unsure at all n locations; Clone ID: 701131413H1
gcttctttgtattgctgttatntctgattcatngcagcttcttctgggtttgtgnattgctttgatgttgaaaagaaggaaaagattggaatatttgagctcaataaaggtgacctttctttgaaggtcaccaactggggtgcttcaattttgtccctggtgattcctgataagaatggaaagttgagtgatgttgttctggatatgattcgttaaggattacactaatgatacaacatattttggagcaactgttggccgggttgctaa

SEQ ID NO: 45946 - DNA, 270 bp, Glycine max
  unsure (1)..(270): unsure at all n locations; Clone ID: 701131414H1
gcattganccctttgcncaaaggnaatgannggtggtgttgtgttaaaaaaaatattgancttggttggttctaagtagaaacaaaaattgtcanttncccatttctgcatttttggtttgggagaggagaaaccaagaattaagaaatgggttgctccgcnaagagnttgntgcgncttatttttggngtngttggtgncatgtgttagaggggangacccttatagattctacactggaatgncggcaatggagacattattccattg

SEQ ID NO: 45947 - DNA, 267 bp, Glycine max
  unsure (1)..(267): unsure at all n locations; Clone ID: 701131418H1
ccagtagtcatatgcttgtctcaaagattaagccatgcatgtgtaagtatgaactaattcagactgtgaaactgcgaatggctcattaaatcagttatagtttgtttgatggtatctgctactcggataaccgtagtaattctagagctaatacgtgcaacaaaccccgacttctggangggatgcatttattagataaaaggtcaacacaggctctgcctgttgctttgatgattcatgataactcgtcggatcgcacggctttgt

SEQ ID NO: 45948 - DNA, 266 bp, Glycine max
  unsure (1)..(266): unsure at all n locations; Clone ID: 701131419H1
gcgtggtcgtggtggttcggcggggaacaagttccgcatgtcgctgggtcttccagtggcggcgacggtgaactgcgccgacaacacgggggcgaagaacctctacatcatttcggtgaaagggatcaaaggccgtttgaaccgtcttccctcggcctgcgttggcgacatggtgatggccaccgtgaagaagggaaaacccgatctgaggaagaaggtcttgccagctgtcatcgttcgcnacgcaagccatggcgccgaaagga

SEQ ID NO: 45949 - DNA, 270 bp, Glycine max
  unsure (1)..(270): unsure at all n locations; Clone ID: 701131424H1
tccangcnnttnttgggtnnncgtntgaagtgnagnaatggnagatggattgcattngcagcatncatnggtagttcagaagttatctggacagtcttatcttgtgtccaggcttgctcctaatcantccagaaactgttctaccantggtagttacttcaatggaggtttgcagtcttcaggtttggttccagtcanggtacacgtgcangntgagaaaggggtgtctggattaaangttggattcctgatgggcgnagtntcggagaa

SEQ ID NO: 45950 - DNA, 264 bp, Glycine max
  unsure (1)..(264): unsure at all n locations; Clone ID: 701131425H1
gctccctgngagagctcntcgcggcggtngcagaagaagattncaagatgaagttcaacatcgcgattcccaccactngatgccagaagaanctccacanccacgacgatcngaaactgcgagcnttttggggacaagaagatctcacaggaggtcatcggagatgccactccgtgangaatttaagggctatgtcttcaaaaattaaccggaggntgtgnacaaacaagggatctcccaatgaagcaggnagtggctgactcc

SEQ ID NO: 45951 - DNA, 264 bp, Glycine max
  unsure (1)..(264): unsure at all n locations; Clone ID: 701131426H1
gctaatacgtgnnacaaaccccgacttctggaagggatgcatttattagataaaaggtcaacacaggctctgcctgttngctttgatgattcatgataactcgtcggatcgnacggctttgtgccggcgacgcatcattcaaatttctgccctnnnnaactttcgatggtaggatagtggctaccatggtggtgacgggtgacggagaattagggttcgattccggagagggagcctgagaaacggctaaccacatccaaggaa

SEQ ID NO: 45952 - DNA, 264 bp, Glycine max
  unsure (1)..(264): unsure at all n locations; Clone ID: 701131427H1
tgatcccgccattgcaaacaacgccacgctgaggctcgtccgccggtctcgtcttcctccatgaaaatgatttcaacgaagccctcaaacacaccaatgctggtggaaccatggacctgcacgcgttgaatgttcagatctttantaagatgcataggtcggattatgctgagaggcagcttcggatcatgcagcagattgatgaagatcacactctcnnnnaactcgccaatgcctggctcaatttggctgtgggtgggtcaa

SEQ ID NO: 45953 - DNA, 51 bp, Glycine max
  unsure (1)..(51): unsure at all n locations; Clone ID: 701131432H1
gaaagcaagctcatcntagagttttacnaatggcagnagcctcctnnatgg

SEQ ID NO: 45954 - DNA, 268 bp, Glycine max
  unsure (1)..(268): unsure at all n locations; Clone ID: 701131433H1
ctttgcaccaggtagatgttctaaatacgttgccaattgtagtgctggcgatnccatccactgaaccctatatcgttggacactacttattacttgctcatgaatctgctgccacattatacaagacaaaatatcaggctcgtcaaaaaggacaaattgggatcactaatccaacacactactttttgccaaaatctcaaagtgctgcagattacaaggcagcaagtagagctctggacttcttctttggttggtatctgatccggtt

SEQ ID NO: 45955 - DNA, 77 bp, Glycine max
  unsure (1)..(77): unsure at all n locations; Clone ID: 701131434H1
ggccagtccgcatgaaaagtngaacatttggnctcaataaagaatatctgagnaaccagtcattccaataaaangng

SEQ ID NO: 45956 - DNA, 259 bp, Glycine max
  unsure (1)..(259): unsure at all n locations; Clone ID: 701131437H1
anaaagggaaaanagaacacccttatttccatttctaaaagagttcattgaagaaatgaagatggatagtgcttccatgacaggctcaaagaggaggatatcatccaacagaggaattggaggagtcctcagagagcaaagggcaaggctatacattataagaagatgtgttgtcatgctcctctgttggcatgactagttttttcaagacttgaagaagttccacaagcagcatggcaatggaagaaaagttctcttc

SEQ ID NO: 45957 - DNA, 258 bp, Glycine max
  Clone ID: 701131439H1
cttgtctcaaagattaagccatgcatgtgtaagtatgaactaattcagactgtgaaaccgcgaatggctcattaaatcagttatagtttgtttgatggtatctactactcggataaccgtagtaattctagagctaatacgtgcaacaaaccccgacttccggaagggatgcatttattagataaaaggtcaacacaggctctggccgttgctttgatgattcatgataactcgtcggattcgcacggctttgtggcc

SEQ ID NO: 45958 - DNA, 271 bp, Glycine max
  Clone ID: 701131440H1
ctggcgatctctgcgttttcccctattttttctgaatctaacaacaaacattcctctggcaacaatcaatactattaataagagttccttccttcactctcacccaagccaaagaaaggaacaagaacaagaccaacaaagtaacgtgaaagagaaagagatggaggaaattgttccagtggtggatttccagaggctttcagaggaagaggagcgcaagaagctgagaaaaacatgtgagaaaccagggtgtttcagaatcattcaacca

SEQ ID NO: 45959 - DNA, 259 bp, Glycine max
  unsure (1)..(259): unsure at all n locations; Clone ID: 701131442H1
gntggatncgctggagatgntgccccacgngctgtgtttcccagcattgtaggtccgtccttcgtcacactggtgtgatgnttggcatgggccaanaagangnatatgtnggtgatgaggnccaatctaagaggggtatttgactctcaagtaccccatgaacatggaattgtgagcaattgggatgatatggaaaagatttggcatcataccttctataatgagcttcgtgttgccccagaagagcatccagttctct

SEQ ID NO: 45960 - DNA, 264 bp, Glycine max
  unsure (1)..(264): unsure at all n locations; Clone ID: 701131445H1
ctcagatttgcggggcgagatgatgcagcagccaggacccggcatggcaccttcccaccatgggccagcagccgcagcaacagtaccagcagcagcctccgccgcagcagcaacaaccctacgtcatnatgccgccgcagcatcaggcnccgcagcctatgtgggccccatccgcccagcctccgctgccgcagcagcctgctagcgnccgacgaggtccgaaccnctggatcggggatctgcagtatggatggacgagntnnc

SEQ ID NO: 45961 - DNA, 133 bp, Glycine max
  unsure (1)..(133): unsure at all n locations; Clone ID: 701131446H1
gngggntatancactctgccaatttgtctatananacagggaccccaacnggtcttnnnccttttatctacttcgnctcgngaaccctttctctgtctcttntctctctgctcctgaatttaacacnactcag

SEQ ID NO: 45962 - DNA, 248 bp, Glycine max
  unsure (1)..(248): unsure at all n locations; Clone ID: 701131447H1
cgcaaactcaacagtattggatttgttgaaaagatctgggagagcaagctctangttgacaacatataggttcccattgaaggaagagttgaggccaaggctgaatcacaaacctgttagtgaccccaatagcaagttgaagatgggagatgtgattgaacttacgccagccatacctgacaagtctcttacagaatacagggaagaaatccagcgtatgtacgatcgtgggctaactgtgtcgagca

SEQ ID NO: 45963 - DNA, 101 bp, Glycine max
  unsure (1)..(101): unsure at all n locations; Clone ID: 701131449H1
cttcgnagccgcaccggtgctggccggttatattgcttcatggattgnncaagttccctacttgaaacntggttacactgtcagnnnaaccgntnnnnaac

SEQ ID NO: 45964 - DNA, 257 bp, Glycine max
  unsure (1)..(257): unsure at all n locations; Clone ID: 701131451H1
ctttttcaacaccctctatgaacntttccgagaaggtgcagattttnttcgcggttaccccttcantctccgggaaggtgtaccaactgcagtttctcatggtctttggctcaacatcccagattacgatgctcctactcagcttgtgaagccacttgagaggaacactaggtatgtggatgctattttgaccataccaaagggcatttgtttcccatgtgtggaatgaacttggcctttgatcgcgatctcatagg

SEQ ID NO: 45965 - DNA, 261 bp, Glycine max
  Clone ID: 701131452H1
gttcacgctgctgatggtactccgttactcatcaagaacgcaatctgtgtctttgaacaatatggcagcatcatgtggcgtcacaacggaaacagggcattcccaaatgaatcgttcgaagaaaacgagaacggaagtccaacttagtggtaagaactgttgttaccgtgggcaactacgataacatcattgattgggagtttaaaacaagtggctcaatcaaaccctccgattgctctctcgggtatattggaattaagg

SEQ ID NO: 45966 - DNA, 247 bp, Glycine max
  unsure (1)..(247): unsure at all n locations; Clone ID: 701131453H1
gccctcaatcaccggagagagagtgagtgcaaagccatcgtcttcttctcagacaagnagtttggtaaaagatggctgatgctgaggatattcaaccccttgtctgtgacaatggaactggaatggtgaaggcaggatttgctggtgatgatgctcctagggctgtgtttcccagtattgttggccgacctcgtcatactggtgttatggttgggatgggtcaaaaggntgcctatgtaggtgatga

SEQ ID NO: 45967 - DNA, 256 bp, Glycine max
  unsure (1)..(256): unsure at all n locations; Clone ID: 701131455H1
tgaaaatgaaagtgcttgtnttgtttgttgctacagttttggtngcatatgantgccatggctcagactaaccagaagttcccctctcccaaatgaaaactgggtttggtgggcaatacagcaatgaggtggcatgtgccagttggaggcttggcgtggaagcaaacaacgtatcaagtggcaaactgttcctgcagcttncggagagtacatagctgactacgttctaggagaccaatatagatcagattccaaa

SEQ ID NO: 45968 - DNA, 259 bp, Glycine max
  unsure (1)..(259): unsure at all n locations; Clone ID: 701131457H1
ctagcttacaaatctgctaaggtgtttgttgctggtcaccggggtcttgttggctcggccattggtcgcaagctncacccaacttgggttcactaatctagtcttgcgctcccatgncgagcttgatctcactcgacaatctgatgttgaagccttctttgcttatgaaaaacctgaatttgtcattgtagctgcagccaaagttggtggcatccatgccaacaacacctaccctgctgatttcattgccatcaacctc

SEQ ID NO: 45969 - DNA, 257 bp, Glycine max
  unsure (1)..(257): unsure at all n locations; Clone ID: 701131458H1
gagaatatgaagttgtttgttttctttgttgctgcagtagttttggtagcatggccatgccatggcgcaggctaccaaaggttccctctccgaatgaaaactggctatggtgagcgttcttcggaggtaaaatgcgcaagttttaggnctgctgtggaagcacacaacatccgagcnnttaaaaccattcctgaagagtgcgttgaaccaacaaaggactacattaatggcgaacaatttagatcagactctaaaac

SEQ ID NO: 45970 - DNA, 203 bp, Glycine max
  unsure (1)..(203): unsure at all n locations; Clone ID: 701131459H1
aatcatgtcattcagaagtgtattgaatgngtccctgaagatgcaatccactttattgtgtcaacatttttttgatcaagttgtgacactctcaacccatccatatggttgccgggtgatacaggtaagttctcttcactgcttatgttactcttataatgtaccttagatcatttgtcatataaaatacgttccacacaaca

SEQ ID NO: 45971 - DNA, 262 bp, Glycine max
  unsure (1)..(262): unsure at all n locations; Clone ID: 701131461H1
acagacactaaactaaacctacaacggctggtctggtttaggtttaggttgagcgatgtcgggtcnntataactccaactttctcaccagtgagggctgcttctcctcagattagaaccaacccagaagtcgacagtcagtaccttacggagttgctggcagagcatcagaagcttggtcccttcatgcaagcccttcccatatgcagtcgtctcttaaatcaagaaatattaagagtttctggaatgctgtccaatcaagg

SEQ ID NO: 45972 - DNA, 264 bp, Glycine max
  unsure (1)..(264): unsure at all n locations; Clone ID: 701131464H1
gaaagcnngctcatcctagagntttaaaaatggcagcagcctcctccatggctctcncttccccatccttggctggcaaggccgtgaagctgggcccatcagcccccgaagttcgggagggtcagcatgaggaagaccgtcaccaagcaggcctcctccggaagcccatggtacggcccagaccgcgtcaagtacttgggcccattctctggcgagcccccgtcctacctcactggcgagttcccaggtgactacggctgggac

SEQ ID NO: 45973 - DNA, 88 bp, Glycine max
  Clone ID: 701131465H1
gatggcttcacgcaggcccgtatcttctctgattcgatcctcccttcgtagatctcaatcgaagccctcaatttccacacaacatacg

SEQ ID NO: 45974 - DNA, 67 bp, Glycine max
  unsure (1)..(67): unsure at all n locations; Clone ID: 701131466H1
catcgatgaagaacgtagcnnaaatgcgatnacttggngtgaattgcagaatcccgtgaaccnttcg

SEQ ID NO: 45975 - DNA, 97 bp, Glycine max
  unsure (1)..(97): unsure at all n locations; Clone ID: 701131467H1
gtaccctttcgggaatttccagttacngcctaaggcttcttagnttganctgttccacccaaaaacnttgaagttactgtcatttgaacatgtaaca

SEQ ID NO: 45976 - DNA, 274 bp, Glycine max
  Clone ID: 701131468H1
gcgcagttccctacctctcctttcaagatccgttgataaaagccttattcgttgattctgtatggtatttcaagagatattgctcagatgcagatcttcgtcaagaccctcaccggaaagaccatcacccttgaggtggaaagctctgacaccatcgacaacgtcaaggccaagatccaggacaaggaaggaattcccccggatcagcaacgtctcatcttcgccggaaagcagctcgaggacggccgtaccctcgccgactacaacatccaga

SEQ ID NO: 45977 - DNA, 272 bp, Glycine max
  unsure (1)..(272): unsure at all n locations; Clone ID: 701131470H1
ggtgccgcaacccattttgcatctaacccttttgtcattaataatctnncctgaccactctttccttggtcgatgccgccgatcccacatttggcttcacccctcttggattatctagtagctcaaacttgcaaatccaaaagccttacgacgttgcagtcaacgagcgctacagcttttcaaatggagtgcacagattttgggtatactccacggacaagcctcatatgcaaggcagcaatacgaagccacgaactgagattcgtncccgc

SEQ ID NO: 45978 - DNA, 271 bp, Glycine max
  Clone ID: 701131471H1
ctggaaaggtggtgtgtgtcaccggcgcttccggttacattgcttcctggatagtcaaattccctcctcaatcgcggctacaccgttaaggccaccgttcgcgacacaagtgatccgaaaaaaataaaccacttggttggcctcgacggtgctaaggagaggctgcacctctacaaggcgaatcttcttgaagaaggttcctttaactctgtcgttcaaggttgccatgctgtgtttcacactgcttctcccttttatcacaatgtcaagg

SEQ ID NO: 45979 - DNA, 259 bp, Glycine max
  unsure (1)..(259): unsure at all n locations; Clone ID: 701131472H1
gaatggctcccaagggtttaatctttttggctgtgttatgcttctcagcactgtcactgagtcgttgtcttgcggaggataatggacttgttatgaacttctacaaggaatcatgccctcaggctgaagacatcatcaaagaacaagtcaagcttctctacaagcgccacaagaacactgctttctcctggctcacnaacatcttccatgactgtgctgttcagaagttgtgatgctcactgttgctggactccacaag

SEQ ID NO: 45980 - DNA, 258 bp, Glycine max
  Clone ID: 701131477H1
caatggtgtacgtcaaggctcagaaatcaaaagcctacttcaagagatatcaagtcaagttcaagagaagaagagagggaaaaaccgattaccgtgccaggattcggttgattaatcaggacaagaacaaatataacactccgaaataccgatttgttgttcgctttagcaacaaggacattgttgcacaaataatatctgctagcattgctggcgatattgttcttgctgcagcatatgcacatgagctgccacgat

SEQ ID NO: 45981 - DNA, 259 bp, Glycine max
  unsure (1)..(259): unsure at all n locations; Clone ID: 701131479H1
ggggcacatgaaggagacacgtagacaaacacactaacacagcgaggcagacataggaaagggggggaaaaggagcataaatggcattgcgtcatttacgattcttccctcacacacttcctctaactctcactcccactcccaatcccaataacagtaaccgtttttccttcttcactccctcactctcttccaccacgctcatggctntgcttcacaaggtcctggttcccatcgccgacggcaccgagcccatgga

SEQ ID NO: 45982 - DNA, 258 bp, Glycine max
  unsure (1)..(258): unsure at all n locations; Clone ID: 701131480H1
gttctcacagtgncattttctctctcactccccaattcccaatactacctttcgtctcagagccatggcgcctcacagcacgcctcttgaactcaatcgcttcgccgaggtcggtaacaaagtcgccgatgctgccggagaagttatccgcaaatacttcagaaaaaacttcgacgttattcacaaacatgatctcagtccagtaaccattgcagatcaatctgctgaggaggctatggtttcaatcatactagacaa

SEQ ID NO: 45983 - DNA, 273 bp, Glycine max
  unsure (1)..(273): unsure at all n locations; Clone ID: 701131485H1
gngatgactgcctccaaggatcgcgagancttcgtctacatcgccaaactcgccgagcaggccgagcgttacgaagagatggtggaatcaatgaagaacgttgcgaatctcgacgttgaactgacggtggaggagcggaatttgctttctgttgggtacaagaatgtgattggtgctcgcagaggtccctggaggatcctgtcttccattgagcagaaggaagaaacaaaagggaacgagttgaatgcgaanggattaaggagtacagacaga

SEQ ID NO: 45984 - DNA, 116 bp, Glycine max
  unsure (1)..(116): unsure at all n locations; Clone ID: 701131489H1
cgggcggtgttaagcaaatcgcggagagagaggagaanatcgagtggtggaatctgtntctgaaaatcgccgcaaagcnaagctcaatctnatatttaacttccanacaacatang

SEQ ID NO: 45985 - DNA, 249 bp, Glycine max
  Clone ID: 701131490H1
ccgatttctaccagttggctggcgttgttgccgttgaggtcaccggtggacctgaagttcccttccatcctggaagagaggacaaacctgagccaccaccagagggtcgcttgcccgatgccactaagggttctgaccatttgagagatgtgtttggcaaagctatggggcttagtgaccgagatatcgttgctctgtctgggggtcacactattggagctgcgcacaaggagcgttctggattcgagg

SEQ ID NO: 45986 - DNA, 273 bp, Glycine max
  unsure (1)..(273): unsure at all n locations; Clone ID: 701131491H1
gcctgnnttcaanttcaaangggattgttgggggngtnaanaatcgtaagaaaacaaaagctcaancgnaatcgaatccttcaatttcattctcttcnnggtcancggatcgtcatgtacagagttgcaacatcaatcaattcaagaanggcaatctcnaagggccatgggagggaaacttggggatccaatnaggttttcnaanttcagccggcnggtactggcaaggganctcnatccaggngggtttgttttaagctgggcttacnggag

SEQ ID NO: 45987 - DNA, 229 bp, Glycine max
  unsure (1)..(229): unsure at all n locations; Clone ID: 701131492H1
tacaggcacctattgttaataatccngctttttgggaganaaantggtatcgaacnatatggncctgataacccgttcttgcattttactatcaacaggaacacttaccaacagtatatggctgcaaaagagctaaagaagcngtctggagatatcaccggaagtataacacatgggtttcaagggcatgaagagccaaaagttgcaacagatgaatatgagcagggaa

SEQ ID NO: 45988 - DNA, 255 bp, Glycine max
  unsure (1)..(255): unsure at all n locations; Clone ID: 701131493H1
gatcgnccctataccagtgatcaagganatttttcgaactgatggcgaacagttcctcaagtatccaccanctaaagtgatgcaggtggataagtctgcatggatgactgatgaagaatttgcnagagaaacgattgctggtttaaatccaaatgtcattaagattatagaggagttcccactaagtagcaagctcagatactcaagcctatggtgatcatacctgtataantagcaaaagnaacatttggagcc

SEQ ID NO: 45989 - DNA, 259 bp, Glycine max
  unsure (1)..(259): unsure at all n locations; Clone ID: 701131494H1
gggtttgcatganaccacaaggataaactattacaaaggctatttgactcaactaaagaaagcagttgatgatggagcaaatgtggttggggaatttgcatggtcantgcngggataaacttgaatggaaggttggggttacacatcaaaggtttggcatgtctatgttgatttcaaaaccctcaaggagatacccccaagatgtcggcatactggttcaagcaaactccattaccaaaaaggagtattaatagcnggg

SEQ ID NO: 45990 - DNA, 266 bp, Glycine max
  unsure (1)..(266): unsure at all n locations; Clone ID: 701131503H1
cttgtatatatctcattttgaggcagtggaaaatgttgtacgnntgcataaggcgggctctgatgctaacttgnancaactatcatcagttcatatnctctaatggtcattctattgaggaatttcttgcatctgaggccactgaagctggttcaatatttgacgatcttcagagaaccctttcaactcagcaggatgaactggaatatttgcagggaaactacggcatagattcaatctcagtcttgaacaaataaaagatatct

SEQ ID NO: 45991 - DNA, 247 bp, Glycine max
  unsure (1)..(247): unsure at all n locations; Clone ID: 701131504H1
ttgtactctggtgantaatnanaccgtaatttctcaaccacctcaacaagctggacgagccatttttactcacttggaacggtattaaacaaaggaagaattcatggcaagatggagttttgggaaccaactgtcccattcctccaaactcaaattacacatacaagtttcaggccaaggatcagatggtacatatacatactttccatcaactcaactgcaccaaagcagctggagggtttggagc

SEQ ID NO: 45992 - DNA, 264 bp, Glycine max
  Clone ID: 701131509H1
cgagggtaaggtcgcgttgtgttgcgtcgtgtcgtgcgctgttcctctgtttctcgtttttgtgttcagaccgaaccctagctccgcatcgcaaccatgtcgaccaagcaaggtggaaaagctaagcctttgaagaaacccaagtctgataagaaggattacgacgagattgatgtggctaacattcagaagaaaaaggaagaggagaaggcgctaaaggagttgaaagccaaggcgcaacagaagggaagctttggaggttct

SEQ ID NO: 45993 - DNA, 92 bp, Glycine max
  unsure (1)..(92): unsure at all n locations; Clone ID: 701131511H1
tgcaatttccagttatcttggtatgnatttgttctttatttctgagaaaattagtgatttttcttttattccggactttatttatttnccca

SEQ ID NO: 45994 - DNA, 265 bp, Glycine max
  unsure (1)..(265): unsure at all n locations; Clone ID: 701131512H1
aaccctaactggtccgaaccattggagccaccgtgcaatagttcctcctctcacttctctccctcaacacaccatnncattaacngtttcagctttatttggaagagggttgtaacgctgacgtgaaatttttctgaagacaaagatgcaggcttgtacaacgatgagttctttgcagcaacaacctatttggaccaaagggttaaatttccctgcaaaagggtatggcagcaataacgggtttctacctcaggtgaggttctgc

SEQ ID NO: 45995 - DNA, 261 bp, Glycine max
  unsure (1)..(261): unsure at all n locations; Clone ID: 701131513H1
cgctattcctattaaatgaatcatagtcataganagatccattattcatagttnaaattaggaaccttttgtgttctgttctgttctgttacatctcgtgaatcgtttacaacttcttaaccgtttttctgttgcagatggcttcttcgtttctatccgcagcttcgcacgctgtctcaccctcttgttctctgtccaccacgcacaagggaaancccatgcttggaggcaacactttgagatttcncaaaggncccaatt

SEQ ID NO: 45996 - DNA, 263 bp, Glycine max
  unsure (1)..(263): unsure at all n locations; Clone ID: 701131515H1
ctgagatgtgtggaggagctatcatctctgatttcattccggcngcngcgatcgccgggtctcgccgcctgaccgccgattacctgtggccggatttgaagaagcggaagtctgacttggacgttgacttcgaggctgatttcagggattttaaagacgattctgatatnnnnnnnnnnnnnnnnnnnnnnnnnntcaagccctttgctttcgccgcctcttctcgtctgtctacggcagcgaaatctgtggcattccaaggt

SEQ ID NO: 45997 - DNA, 263 bp, Glycine max
  Clone ID: 701131516H1
cgagtcaacgggcgagtaaacccgtaaggcgcaaggaagctgattggtgggatccccctgtgggttgcaccgccgaccgaccctgatcttctgtgaagggttcgagtgagagcatacctgtcgggacccgaaagatggtgaactatgcctgagcggggcgaaccagaggaaactctggtggaggcccgcagcgatactgacgtgcaaatcgttcgtctgacttgggtataggggcgaaagactaatcgaaccgtctagtagct

SEQ ID NO: 45998 - DNA, 263 bp, Glycine max
  unsure (1)..(263): unsure at all n locations; Clone ID: 701131519H1
atggcacacataaaggntaaatacaagaatcttcctatttacatcactnanaatggcatggctgaatcaaggaatgantcaataccagtcaatgaagcccgcaaggatantataaggattagataccatgatggccatcttaaattccttcttcaagcgatcaaggaaggtgttaatttgaagggctattatgcatgancatnttcggacagttttgaatgggatgctggttacacagttcgattcgggctcatatatgtgga

SEQ ID NO: 45999 - DNA, 260 bp, Glycine max
  unsure (1)..(260): unsure at all n locations; Clone ID: 701131520H1
gcgnggtaattggtanancgagaaacanagaaatggacgattacacgagggaaatgatggacctgaagacactggtcactcgcactctcgagaagaaaagcgtcctcgccaggatccgtgccgaactcagggcgagtgtgttcgaagccatcgaagaggaagatcgtgtgattnagnaggaacaaggtctacctcctgcatgctaggtagttccaacgatcgagctaagcagcttcacgcttctcctccagggagacttc

SEQ ID NO: 46000 - DNA, 262 bp, Glycine max
  unsure (1)..(262): unsure at all n locations; Clone ID: 701131521H1
gtttgttttctttgttgctgncagtagttttggtagcatggccatgccatggcgcaggctaccaaaggttccctctccgaatgaaaactggctatggtgagcgttcttcggaggtaaaatgcgcaagttttaggcttgctgtggaagcacacaacatccgagcctttaaaaccattcctgaagagtgcgttgaaccaacaaaggactacattaatggcgaacaatttagatcagactctaaaacagttaaccaacaagcttt

SEQ ID NO: 46001 - DNA, 262 bp, Glycine max
  unsure (1)..(262): unsure at all n locations; Clone ID: 701131522H1
cttngttaccctcttcacatggccttctctctgntaattcccacgntgaccatattttcctaccgagtcaactccatgacgatgactcagtgagttgnactgctaccgacccaaatcttaactacaagccggtgatnggaatcctgacccaccccggcgacggtgcctctggccggntcagcaacgccaccggggtttnttacatcgccgcctcctacgttaaatncgtggagtccggtggtgctagagttatgccccttat

SEQ ID NO: 46002 - DNA, 262 bp, Glycine max
  Clone ID: 701131524H1
gcttacgctaattgaaggtgttcttgcagcaaatatttttgattggggatctcgtgcatgtgtggatctctatcataaaggaactattatcgaaatttatagaatgagtcgcaataaaatgcgtagaccttggcgggtggatgattttgatgagtttaaagagagaatgaaaatgccctgtcataagagggctttactttttgtagataactcaggtgctgacattgttctagggatgcttccactggctagggagctcctc

SEQ ID NO: 46003 - DNA, 259 bp, Glycine max
  Clone ID: 701131526H1
agcaactatgcctaaccctaaggtcttcttcgacatgaccatcggcggtcaatctgctggccgcatcgtgatggagctctacgccgacgtcactccccgcaccgccgagaacttccgcgcgctttgcaccggcgagaagggcgtagggcggagggcaagcccctccactacaagggctcgtccttccaccgcgtgatcccgagtttcatgtgtcagggtggcgacttcaccgccggaaacggaaccggcggcgagtcga

SEQ ID NO: 46004 - DNA, 259 bp, Glycine max
  unsure (1)..(259): unsure at all n locations; Clone ID: 701131527H1
ggttcttcctcctgaagtcgcaaaactgcttcccaagaatcgtcttctctccgaaaatgagtggcgggcaattggggttcagcagagccgtggctgggttcattatgcaattcatcgccctgagccacacataatgctcttcaggaggcctttgaattatcagcagcagcaggaaaaccaggcccagcaaagcatgcttgtcaaatgaacactatctatgcnaatctgaaagtgggattacaatgttatataggtttta

SEQ ID NO: 46005 - DNA, 91 bp, Glycine max
  unsure (1)..(91): unsure at all n locations; Clone ID: 701131528H1
ctcgtaagagtagtaactaagaanaataaagggttctaatttatttccgttcaattctccggcggcaccgcaaccgattccncaaacgnnt

SEQ ID NO: 46006 - DNA, 258 bp, Glycine max
  unsure (1)..(258): unsure at all n locations; Clone ID: 701131529H1
gctgaattaaatttccttaatgtaatatnactacttcatcanggganatctcaggttaaataatntcnttanaacttgagttnntaatcatgctgaatggngtcatgtgnttcatgtagcgattgtagccaacatcatatagttggataaggactttgttgttataatgtaatattactctaattatataatagtcatanatgccaataacctctatgttccatttttcttacacaggagagtgttggtttananntc

SEQ ID NO: 46007 - DNA, 262 bp, Glycine max
  unsure (1)..(262): unsure at all n locations; Clone ID: 701131530H1
cttgaccagaaaagtagcaaccgcagcaccaaagactttgctttgcatcnatctnnattctaatccaattctctctgcatctacatatacaatatcataatcgttcataagattgcatttgcattgatttcaaaaatgcagatcaggggatcgagtcacagactctccagtatgggcaataatcgatcccgcattcccgcgctcctcatctccatgttcgccactttcgcttctatctacgtcgctggaaggctgtggcagg

SEQ ID NO: 46008 - DNA, 262 bp, Glycine max
  Clone ID: 701131531H1
atgaagttgtttgttttctttgttgctgcagtagttttggtagcatggccatgccatggcgcaggctaccaaaggttccctctccgaatgaaaactggctatggtgagcgttcttcggaggtaaaatgcgcaagttttaggcttgctgtggaagcacacaacatccgagcctttaaaaccattcctgaagagtgcgttgaaccaacaaaggactacattaatggcgaacaatttagatcagactctaaaacagttaaccaac

SEQ ID NO: 46009 - DNA, 245 bp, Glycine max
  unsure (1)..(245): unsure at all n locations; Clone ID: 701131533H1
gcaaaanntttgaagaacactcaaacatggtatgagcatagnctaattgatgacatggtagcatatgcactcaaaagtgaaggtggatatgtttgggcttgcaagaattatgatggtgatgtccaaagtgatttacttgctcaaggttttggctcattgggtctcatgacttctgtgctgttatcttctgatggcaagacattagaagctgaggcagctcatggaactgtaactcgacattttcg

SEQ ID NO: 46010 - DNA, 242 bp, Glycine max
  unsure (1)..(242): unsure at all n locations; Clone ID: 701131534H1
gggcagtccaaatgtctcaagacnagatgacagcaaagaccaagtgcaacctggcttgcantcatcaattcaagaggaggccttagcaagagagctataccctgattatatccccccattagcctcagctggaggtagtggatctttggtgatcaatgatagcaatgagtatgatgttgaagggggtgaggatgagcctaactttgacgtggaagactgcaaacatgagaatcttcacacat

SEQ ID NO: 46011 - DNA, 259 bp, Glycine max
  unsure (1)..(259): unsure at all n locations; Clone ID: 701131538H1
gccgtatgcagnctcaccatgttctgtcaanaactgaattgttttaagtctctgttcctctgctttcantgctncacattttcaactctncattaactntcttgctaagggaatcttcgtcgtngaatctgaggaaacgtcagtatgaaaatcaaggaattttcctcgccataatgaacgngagaatcactagaggcacatgttggtagaagattttctctggggattgacttgattgattgttcacagttcatgctaa

SEQ ID NO: 46012 - DNA, 238 bp, Glycine max
  unsure (1)..(238): unsure at all n locations; Clone ID: 701131539H1
gtgggttgcaccgccgaccgaccactgatcttctgtgaagncgttcgtgtgagagcataccngtcgggacccgaaagatggtgaactatgcctgagcggggcgaaccagaggaaactctggtggaggcccgcagcgatactgacgtgcaaatcgttcgtctgacttgggtataggggcgaaagactaatcgaaccgtctagtagctggttccctccgaagtttccctcaggatagctg

SEQ ID NO: 46013 - DNA, 260 bp, Glycine max
  unsure (1)..(260): unsure at all n locations; Clone ID: 701131542H1
cttgangaccanagactnattgaagatatctgtanggacaatgangctgtnattccattttttcgtccgaaaatcanatgccnaggtaaggactaaacccagttgacaaggattttnaattatcaattgaacgcatcatatgtgcacaatctggtaccaaatttacatgcagaccagttagggtcagtctctgtaacaaatgaggtcctggagaggagccaattaacaagagattttgttctggaaccaattattatgaa

SEQ ID NO: 46014 - DNA, 249 bp, Glycine max
  unsure (1)..(249): unsure at all n locations; Clone ID: 701131543H1
ttgatttgtagtttgttttgtgctttagataaaagttctgccaaatcaagaggggttttaagatcatagtgtgtgttttgcaacaatggctaagttctttgctgctatgatcttggcactctttgccatttccatacttcaaacagtggtaatggctgctaatgaacaaggaggccacttgtatgacaacaagagcaaatatggaagtggaagtgtcaagagttaccaatgcccatcacaatgctcgng

SEQ ID NO: 46015 - DNA, 117 bp, Glycine max
  unsure (1)..(117): unsure at all n locations; Clone ID: 701131545H1
ancancttgttncggttgnttcgtnnttgtcatggggtgncatntctatggtgnccgaggaggattcangaaggttnctaccccgangggagtnatttggggtgccgagaaattaca

SEQ ID NO: 46016 - DNA, 258 bp, Glycine max
  unsure (1)..(258): unsure at all n locations; Clone ID: 701131546H1
taaccccatcaatctccataccctcatctcggatttctcgaaaaancctccaatgcattcctcgttagctacattacatacccagtaagtaacctttgtatcaccgctcctagcgtaagaacattcagcaatgaaggtgaggaaatgtcggcatcatcattgatagagtctccagttcttcaactccatgagatctcngctgtcaagttcggcaactttaagctcaaatctggcatctcctcnccaatctacatagat

SEQ ID NO: 46017 - DNA, 257 bp, Glycine max
  Clone ID: 701131547H1
aaagaaactgcaacttcctctgttttgctcccctgtttaggccttttcataagcttagaatgacacacaaggaattttccattgctctagtgactctcattgctgttctctttgtcaacatgaacatccaaggtgccactgctgactatggtagttggcagagtgctcatgccactttttatggcgggggtgatgcttctggcacaatgggtggagcatgtgggtatggaaatttgtatagccagggctatggaact

SEQ ID NO: 46018 - DNA, 261 bp, Glycine max
  unsure (1)..(261): unsure at all n locations; Clone ID: 701131551H1
gcggnanngtcntancgcacntctncctagcatttacagnaagatcggtaaggaaaaggttcacatcagtattgtggtgcattgcgccatgtcgactctgggaaatccactaccactggtcacctgatttacaagcttggaggcattgacaagcgtgttattgagaggtttgagaaggaagctgctgagatgaacaagangtctttcaagtatgcctgggtgctggacaaacttaaggctgagcgtgaaagaggaatcacc

SEQ ID NO: 46019 - DNA, 256 bp, Glycine max
  unsure (1)..(256): unsure at all n locations; Clone ID: 701131553H1
cgaacagtgaaccctcacctaacaatcagaacccaggatttggtgaaacgatgaacagtgataggaaaattggggttgccttggacttttccaaangaagcaaaatcgctctgaaatgggctattgacaatcttatcagcaacggtgacactctctacatcgtccacaccaagccttccggaggaagtgaatcaggaaatcttctctggtccaccactggttcacctctgattccattgtcggagtttcgtgaaaa

SEQ ID NO: 46020 - DNA, 108 bp, Glycine max
  unsure (1)..(108): unsure at all n locations; Clone ID: 701131554H1
ggatgaacccacagcactgaaagtaacgttaganacgaganagtttgcattattcacaatttcgaaaactcactcagattggagaagggagttccacacaacatacna

SEQ ID NO: 46021 - DNA, 257 bp, Glycine max
  unsure (1)..(257): unsure at all n locations; Clone ID: 701131555H1
gattcccctccccagacgccgcagagtcaganagagagattcactgaaacagancgcagaagaaaatacataaactaatccagaaaatgagcagcggcgctggaaaggtggtgtgtgtcaccggcgcttccggttacattgcttcctggatagtcaaattcctcctcaatcgcggctacaccgttaaggccaccgttcgcgacacaagtgatccgaaaaaaataaaccacttggttggcctcgacggtgctaaggag

SEQ ID NO: 46022 - DNA, 258 bp, Glycine max
  unsure (1)..(258): unsure at all n locations; Clone ID: 701131556H1
gccagangccactacaccgttggcaaagagatcgtagatctgtgcttggatcgcgtccgaaagctcgcagacaactgcactggtctccagggcttcctcgtcttcaacgctgtcggcggtggcaccggttccggtctcggatctctcttgttagagcgtctctccgtcgattacggcaaaaagtccaaattagggttcaccatttacccttcccctcaggtttcaaccgcagtcgtggagccctacaacagcgtcctc

SEQ ID NO: 46023 - DNA, 255 bp, Glycine max
  Clone ID: 701131557H1
cgactcggttgctatcagcgagtgagagtgagtgagtggttctcttgcagcaacaaggtttagtgacaccaaacagacgggaaatgggtcgtggggtcagtgctggtggtggacagagttccttggattatctctttggcagtggggtacctgccagcagtgcaaatggtgctcgcactcaaaatgcaagtgctccttcaccaccggttgataagcaaagtccagcaccagcaccagcaccagcacctgcacctg

SEQ ID NO: 46024 - DNA, 254 bp, Glycine max
  unsure (1)..(254): unsure at all n locations; Clone ID: 701131558H1
aagatttcggcgtatcgagatagaaggttccccgggacgcaagacgagtttgancacgcgcttctgacctcaaccaccgtttacgtggggaacatgtcgttttacacgacggaggagcaagtttacgagctcttctcgcgtgctggggaaatcaaaaagatcatcatgggcttggacaagaacacaaaaacgccttgcggcttctgtttcgttttatattattctcgtgaagatactgaggatntttgcnaata

SEQ ID NO: 46025 - DNA, 256 bp, Glycine max
  unsure (1)..(256): unsure at all n locations; Clone ID: 701131559H1
ctcgagcgccactttactctnagacancctcccagataaccatgancnnantaatgaagaccaccctgaatcatgataagaattaagaaaacgagctnantcgttaatttgtagtggcaaaaagccttnatattgctcantatcccttctttattcagtctncattatcacactcatcacgcactttctctaanatggcttcaaccgcttctgtggttagccaacaagtacaatncaataacagaacaagtttcat

SEQ ID NO: 46026 - DNA, 246 bp, Glycine max
  unsure (1)..(246): unsure at all n locations; Clone ID: 701131561H1
tggggaagctatccaagcagttcgaagtagagctggggtgttgggtttaggtcnctttangattactgaagaggctgggttgtggggatattggcagtgtttacctctccgagttgagtggaactaaatgttactttgcaatgaaggtaatggacaaagggtctctagcaagtcgtaaaaagctacttcgtgctcagacagaacgagaaattctgcagtctcttgatcacccttttctcccaactt

SEQ ID NO: 46027 - DNA, 258 bp, Glycine max
  Clone ID: 701131565H1
gcagcttcttaacattgtcgtgtgcaggtgcagtgcaaaatcaacatgtatcacaccctacaacgtttttgggagttcctaaaaacaatctagaaaaaggaaaacaccgcacaggttagttgtggttgcggtgactcaaggctctgctgaatcaagcaagtccgatgaaaaaatcccttcgtgggccaaaccggactccgatgaacctccgccgtgggcccgggagagcccaacaacaacagttcgcaacaagaagga

SEQ ID NO: 46028 - DNA, 255 bp, Glycine max
  Clone ID: 701131566H1
tttggtatcactaaggaagctgttgttgctgcagctaaagagcttatctagaacttttgattttttttgccttctggttttggttgagagcattccatgtcatgaataagaaaaaggttaaatatccttcgattgggaatttgggattttaagtgaagaagcaacatagatcaaagaattttgtgaacttgtaataactatttgacaatttagttttgcactgccacatggttaaattcaatgtttgatcatatc

SEQ ID NO: 46029 - DNA, 255 bp, Glycine max
  Clone ID: 701131567H1
ctgagattgttggcactttcattcttgtctacaccgttttctctgccaccgatgccaagcgtaggcttagagactcacacgtccctattttggcacccttgccaattgggttcgctgtgttcttggtgcacttggccacaatcccaatcactggaactggtatcaaccctgcacgaagtctcggtgctgccatcatcttcaacaaagaccttggctgggatgatcactggatcttctgggttggacctttcgttg

SEQ ID NO: 46030 - DNA, 86 bp, Glycine max
  unsure (1)..(86): unsure at all n locations; Clone ID: 701131568H1
gatggcntnacgcnggctcgtatcttctctgnttcgntnctccnttcgtagatctcnatcgaagccctnaattgccacacnacata

SEQ ID NO: 46031 - DNA, 253 bp, Glycine max
  unsure (1)..(253): unsure at all n locations; Clone ID: 701131570H1
cttctctctctgtgtgtgcgcttcaacggcaaccagaagcagccanggccactgcaaggactgtgaaggatgtttcacctcatgagttcgttaaggcgtactcctctcacctcaagcgatccggcaagatggagctgccagagtggactgatattgtgaaaactgcaagatttaaggagttggctccttatgatcctgactggtactatgtcagagctgcttccatggcaagaaagatctacttgagaggagg

SEQ ID NO: 46032 - DNA, 85 bp, Glycine max
  unsure (1)..(85): unsure at all n locations; Clone ID: 701131572H1
ccagaatcggtgtangttacaggtttaagggttttgttttcatttaggtcactaatccgatatcatgaagctccgatacgancta

SEQ ID NO: 46033 - DNA, 255 bp, Glycine max
  unsure (1)..(255): unsure at all n locations; Clone ID: 701131573H1
ggcntcgttngantntttgaagacacaaagtggncccncttgaactgaaattnaatcnnntgatgnangctactgcttggattggtgaaaataaagttgctattgttggagttttcccgaaattttctggagaggagtttgacaacttttctgccttagcagagaagttncnntctgattatgactttggtcnnactctgnatgccaaacnccttccaagatgagagtcatcagtttctgggcccntagttaggt

SEQ ID NO: 46034 - DNA, 217 bp, Glycine max
  unsure (1)..(217): unsure at all n locations; Clone ID: 701131574H1
gaaccaacncccaaacccctctttnctccagaactttcatgtccancttgccctcacaaacccaagccgcatcttcgtnttcttcctctgcgccatctcctaaccctaattcccaacatggaatcggaatccctattcctcaacccttcccttctctttccccctcaccaatcaacctcactttcggatctctccagatntccgataccccaggntc

SEQ ID NO: 46035 - DNA, 243 bp, Glycine max
  unsure (1)..(243): unsure at all n locations; Clone ID: 701131575H1
gcttgctgctgctgcatagttgatcgaaagcatgacaacatcattgtccagcatccntttcaagggaattgcagctcgttctttcaccgcccctctaactaggtcctgttatcatggaatgagatactttgctactgtatcaaatgatcctgacacacatgatgacttcaagccagctaataaacttgagaattccaacatttctttggctgatgttattgagcaggatgtcaaggataatcc

SEQ ID NO: 46036 - DNA, 246 bp, Glycine max
  unsure (1)..(246): unsure at all n locations; Clone ID: 701131576H1
agatgatccacgttcttttcctctttgctcttgtctcgttcacttcccatgcttctgtcaatgatttctgtgtagcagacctaaaaagtccagatagcccttcaggctatcagtgcaagccacctaacacagtcacagtggatgacttgtgttctctggctttgtagctggaaacaccacaaacactttcaatgctgcattaactccgcatttgntactgatttccaggtgtgaatggtctggtgt

SEQ ID NO: 46037 - DNA, 255 bp, Glycine max
  unsure (1)..(255): unsure at all n locations; Clone ID: 701131577H1
gtnntctcngtcgcngnngtagntttggacgcatgnccatgcnatggcgccggctacgaaaggttccctccttccgaatgaanaccggctatggtgagcgttcttcggacgtaaaatgcgcaagttttaggcttgnngtggaagcacacaacatncgagcaccttaaaaccattcctgaagantgngttnaaccaacaaaggactacattaatggcgaacaatttagatcagactctaaaacagtnaaccaacaa

SEQ ID NO: 46038 - DNA, 252 bp, Glycine max
  unsure (1)..(252): unsure at all n locations; Clone ID: 701131578H1
tttgagctgccaaaaggggatgttagaataacagatgtattccaagctgttgatgctgcaaagagaaacttcaccgtttctgcatggggcttagttgacaccacattggaagatgtcttcattaaggtagcacgcgaggctcaggcatttgacaccttgtcataactgtcatacaaaataaactctgctcaaaaccaaattagtatttagtaaatacntaanctctatgctacacggttagcatagagtagc

SEQ ID NO: 46039 - DNA, 256 bp, Glycine max
  unsure (1)..(256): unsure at all n locations; Clone ID: 701131579H1
actgcctcttccncncagattcagcanagntctattttcncctctcatggnttcagattccaaaaaggatttccctgctgatgacaaagctggaacagaagagagtaaaacatccaaagatgagacttnatctaaagattctccagcagaacaaagagcncncagtacttttggacctagacctggacctggctgggcatccaggcaacccttttgatctctcagcaatgtctggtctgctcaatgatccaagtat

SEQ ID NO: 46040 - DNA, 257 bp, Glycine max
  unsure (1)..(257): unsure at all n locations; Clone ID: 701131581H1
gcccagaatccgagntcaaccccnacgaaggcaaggggtttttctcggcttcttcagatttcctgaaatggcgcctgtttcagctttagccaagtacaagctcgtcttcctgggtgaccaatccgtgggcaaaaccagcatcatcactcgcttcatgtatgataaattcgataacacctatcaggctacaattggtattgattttctatcaaaaactatgtatcttgaagatcgaactgttcgactgcagttgtggg

SEQ ID NO: 46041 - DNA, 254 bp, Glycine max
  unsure (1)..(254): unsure at all n locations; Clone ID: 701131583H1
caaaaaccatcgttatgcagaaaatgatantgcaacanataacacatcatctganagtagctcntgctttgcaagatcgnttgctttgtcaaggacaggatccgtatgatatggagccttctagtcatgtaacacctaatggatctcttctgcctcccaataccaagggtgcaaataacatgggacataaaccatcaggatatttgaaagtgaagggagagatagagcatgctgctattactgctgttaaaaag

SEQ ID NO: 46042 - DNA, 249 bp, Glycine max
  unsure (1)..(249): unsure at all n locations; Clone ID: 701131586H1
gnnggtcctgccattgncagnngctttctctnntccntggctganggtgcngccgccacnncctncaccaaccgatgggnaaagcnggntcgaggcgaagnacacaagcccgatgaagttcctgtncntgatcgaacactactcaaatttccagagccatcagaancncgtgttgatctcccagagtggaagcctgtaaggttcatgccagacaacattgctgggcnnaacnagataagtgncatattg

SEQ ID NO: 46043 - DNA, 249 bp, Glycine max
  unsure (1)..(249): unsure at all n locations; Clone ID: 701131589H1
gtggaatcaatagccatnaagatcgttcggaaagacctcgtacccaatggacctggcagcgttaagatggttgcagtggattcggatgatctctggtttgcgtataacctgatagctcccggagactctgtcatggccgttactgtcaggaaggttctaagagaagctgctagtggcggacgggaagcagaacgcgtcaagctcaaattggaaattaaagtccaagagcttgctgattatgacaaagaa

SEQ ID NO: 46044 - DNA, 72 bp, Glycine max
  unsure (1)..(72): unsure at all n locations; Clone ID: 701131590H1
tcaatttcgaaccccatttctggtttctcttccccttttgttattcatcttcaacctcaccccttcgnacgt

SEQ ID NO: 46045 - DNA, 244 bp, Glycine max
  unsure (1)..(244): unsure at all n locations; Clone ID: 701131591H1
tttgttgtgagctataagctagtttatcgtgaggagaatatgaagttgtttgtcttctttgttgctgcagtagttttggtagcatggccatgccatggcgcaggctaccaaaggttccctctccgaatganaacggctatggtgagcgttcttcggaggtaaaatgcgcaagttttaggcttgctgtggaagcacacaacatccgagcctttaaaaccattcctgaagagtgcgttgaaccaac

SEQ ID NO: 46046 - DNA, 247 bp, Glycine max
  unsure (1)..(247): unsure at all n locations; Clone ID: 701131592H1
tcaaggtccacccagaaggaaaatatgtcgttgatattgacaaaagtattgacattacaaagattactccatccactagagttgcacttcgcaacgacagtnatgttctcacttagttctgccaagtaaagttgatccattggtcaatctgatgaaagttgagaaggttcccgattctacttacgacatgattggtggtttagaccagcaaattaaagaaataaaagaggtcattgagttaccaatc

SEQ ID NO: 46047 - DNA, 241 bp, Glycine max
  unsure (1)..(241): unsure at all n locations; Clone ID: 701131593H1
gtgtattattacattttgcaccatgccttctctcttcgctagaaaccagaggttctcattgggctactctcctggttcttctggaactattgacaggnaaccttcgcatggcagatgctcaaattggtgtgtgttanggcatncngggcaacaatctaccgtcagcaaacgntgttataggtcttatagntcaaatnacatnaagagnatgagactctatgatcctaatcaagctgntcta

SEQ ID NO: 46048 - DNA, 251 bp, Glycine max
  unsure (1)..(251): unsure at all n locations; Clone ID: 701131594H1
tgcaaactgtgtaattgtttgtttgtcacagaaataacagtnnaagaagaaactctcagttgaaaaattcaaccgcgcttagatttcgttttttctgaatgtggcccattctcttactcgttgccgtggccggatccactggtttcgccaccaaacgcttccttactcgcagaaacaccattgaaggtganaacgtcaatctccacgatccaagtgcttttgacttttccagttcggaaagcacttctctg

SEQ ID NO: 46049 - DNA, 254 bp, Glycine max
  unsure (1)..(254): unsure at all n locations; Clone ID: 701131595H1
gagaaatgagaatgaagaagctgnttttaatantcntncncagcatttaccttcgncnncngtngcnatatcngcgtctgatcattnttcgnaaacncanggcgtttcactggcagttgntgcaacgcccggacctccacctctcatggtcccnntgantnttatncagggagctgcttnnaaaggagccgtctgtntggatggaacattgcctggttaccactttcatcctggatttggatctggggcaaata

SEQ ID NO: 46050 - DNA, 276 bp, Glycine max
  unsure (1)..(276): unsure at all n locations; Clone ID: 701131601H1
ggctgggcctcaagagatactctggtgctttgcctaatacaaaaatcaccaacaattttacttccccaaaagtacaagcttctatagcttcaggngtgcaaaggaagctggatatggcaaatgaggatggaattaagagcaagaaatcattgaagactactcaacaatcaaaatatcgattaccaggaaaaggcagcccaacttctataaacaaggggaggactgcacgtggggtttcagaaacagcngagaagttggtcaatatgtcaatcggta

SEQ ID NO: 46051 - DNA, 271 bp, Glycine max
  unsure (1)..(271): unsure at all n locations; Clone ID: 701131602H1
gngcaactctaatcgcagctgcatttctcctcctaactctagccctctccatgtatcttctcttcgagcatctttccgcttacaagaacccccncggagcaaaagttcctcatcggggttatcctaatggttccctgctattcttttgaatcttttgtatcattggtcaatccctcaatcagtgttgattgcgagattctaagggactgctacgaatcctttgccatgtattgctttggaagatacttgttgnctgcctcggtggtgacga

SEQ ID NO: 46052 - DNA, 267 bp, Glycine max
  unsure (1)..(267): unsure at all n locations; Clone ID: 701131603H1
cgactncaaggctattgtacataatccaaatcctttgatccctcccatttttgcatcggatgataacacgtgttgcttagagtggaacactgcaatggaaaagcttactggttggagccgcgcggatgtcattggaaaaatgttggtgggagaggttttcggcagttgctgtcagttgaagggttcagattcaataacaaagttcatgattgtcttacacaatgcgcttggtggacatgatacagatagattccctttttcatttct

SEQ ID NO: 46053 - DNA, 267 bp, Glycine max
  Clone ID: 701131604H1
gtagtcatatgcttgtctcaaagattaagccatgcatgtgtaagtatgaactaattcagactgtgaaactgcgaatggctcattaaatcagttatagtttgtttgatggtatctactactcggataaccgtagtaattctagagctaatacgtgcaacaaaccccgacttctggaagggatgcatttattagataaaaggtcaacacaggctctgcctgttgctttgatgattcatgataactcgtcggatcgcacggcctttgtgc

SEQ ID NO: 46054 - DNA, 267 bp, Glycine max
  unsure (1)..(267): unsure at all n locations; Clone ID: 701131605H1
gatntctgaaacnccagagtttcatttcaattcagtcttattattagggtttgccgattgagagagaaagagaaatgggngacncgaaaaggaatcccnatggctttggggctcttggcgatgatcctcttcttcattgcttcctcttcctctcacctcgttcgcncttccgatgacgccgacgacgcgatcttctacgagtcgttcgacgaggattttgatggacggtggattgtatccgacaaggnggattacaatggtgtctgg

SEQ ID NO: 46055 - DNA, 102 bp, Glycine max
  unsure (1)..(102): unsure at all n locations; Clone ID: 701131606H1
gaaacaaaccaaggacgagaacacgatgttgcttgaaccttgcacttggtttattggttttggctctgtttctgcacttgcgtcccacnccccantngcaaa

SEQ ID NO: 46056 - DNA, 267 bp, Glycine max
  unsure (1)..(267): unsure at all n locations; Clone ID: 701131607H1
ctctcatcttcttattcttctgctttcactctctgactcaatcgttctaatccacaaaaaatgaccttaaattacaacattgccctcgccttctctgcggtgctcacnctgctcctctttcccctactgaccgtagggagctcgtggaggagcagccactagtcctcaagtaccacaacggccagctcctgaagggccgcatcaccgtcaatctcatctggtacggcaccttcaccccgatccaacggtccataatcgtggacttca

SEQ ID NO: 46057 - DNA, 269 bp, Glycine max
  Clone ID: 701131608H1
ctccctcctcttgtctaattgaggaaattaaaatggcagcctcttcattgaaccacaaattccataaccatgctcgttctaatagcttgccctctaagccacaccctctcatcctacaatgcaatgaacgcttatctagactaggggcctatgataccatctcttcttcattgctaaggcaaaatcttactaaccttctagatttgcatgggtgcattgaaaagttggttcaactacccttaactcaacaagcacttgttcaggaatgc

SEQ ID NO: 46058 - DNA, 269 bp, Glycine max
  Clone ID: 701131609H1
ctcacccctactcttcttccagtctctatctcaatctccatcaaatttaactatggctactgaagaggttttggttgatgaaatcacttaccctaccaagatcactactaccaagcccctatctttgcttggccatggaatcaccgacatggagattcacttcatccatgtgaaattctattcaatcggggtttatttggagccagaagtagtaggccacttggaccagttcaaaggaaaatctgcaaaggagctggaagataatgaag

SEQ ID NO: 46059 - DNA, 272 bp, Glycine max
  unsure (1)..(272): unsure at all n locations; Clone ID: 701131610H1
tgattnnccattgacgcgtgnaatngctgggaaaagcaacgaaaanaagggagnnagaanagggagagcgtgcgtggtggttttgggagaacattggacgaagccctncgaatgcagtaccacgctcttnccactcgccaatcaggcttccctggnggttgacattgttgcatatggaggttcagagccccatactgcacttcttgccaacccatctattcatatttacataatgaagccagtggttaacagccagtcaaagctaccaaaga

SEQ ID NO: 46060 - DNA, 271 bp, Glycine max
  unsure (1)..(271): unsure at all n locations; Clone ID: 701131612H1
gcagcaacnaggtttagccactccaaacagacgnggnnatnggtcgtggggtcagtgctggtggtggtcagagttccttagnttatctctttggcagtggggtgcctgccagcagtgcaaacagtcagcctgcaaatggtgctcgcactcaaaatgctagtgctccttcaccaccagtcgataagcaaagtccagcaccagcaccagcaccagcaccagcacctgcatcatcaccaattgataagcaaattccagctggaattcctggaag

SEQ ID NO: 46061 - DNA, 270 bp, Glycine max
  Clone ID: 701131613H1
agttggtgcaccgtttgtacccagagattgatccagctctgaaccctgaccacgtccctcacattctgaagaagtgccctgatgccattccagaccctaaggcggtgcagtacgtgagaaacgaccgtggcactcccatgattctagacaacaactactacagaaacatattagacagcaagggtctcttgatagtggatcaccaactagccaatgacaagaggaccaagccttatgtgaagaaaatggccaagagccaagactatttct

SEQ ID NO: 46062 - DNA, 274 bp, Glycine max
  unsure (1)..(274): unsure at all n locations; Clone ID: 701131615H1
ggcagcagctactgttggtgctggtggttttgtcttgcatgaacaccatgagaaaaaggaagttaaganagaagatgaggaagctcatggaaagaagcaccaccatctgtttggctgaacatgataaatattcatatataattaatattcaagctccaaagtatcaccatgcctgtgtatctctatcatatcttccatttctagtgtgcctttgaataaattctgtgcgagcttgaagagtgtttaattatgcctatggtgttacttcatatat

SEQ ID NO: 46063 - DNA, 262 bp, Glycine max
  unsure (1)..(262): unsure at all n locations; Clone ID: 701131617H1
gttggcgtctangaccaccgacgacgtcgtcaganactcagancctctcgtatgcncgaaaacggcattcgcattctcaaggaagaggtgcagagatcgaatcgggaatgggaatcatacaaggagaagataaaaaataacgaggagaaggttaaacttcataagcagttgccctacctcgttgctaacattgttgagatattggatatgaatccagaagatgaagctgaagaagatggggccaacnttgatcttgactctc

SEQ ID NO: 46064 - DNA, 267 bp, Glycine max
  unsure (1)..(267): unsure at all n locations; Clone ID: 701131618H1
gggagttggcattcttggcattgcttgggcctttggtggcatgatcttcattctggtgtactgcactgctggaatctcagggggtcacataaacccagcagtgacatttgggctcttcttggctcgcaaggtgtctttgattagagcaataatgtacatggtggctcagtgcttgggagccatatgtggagttgggttggttaaggccttccaaaangcttactaccaccangtatggtggtggggccaatgagctcagtgaagggt

SEQ ID NO: 46065 - DNA, 265 bp, Glycine max
  unsure (1)..(265): unsure at all n locations; Clone ID: 701131619H1
cncgaggagcagcctcangaggagaangatgtctcacaggaagttcgagcanccaaggcacggttnactgggattcttcccaggaagcgtgctgctcgtcacagggganaactgaaggcttncccnaggatgacccattccaaggcacacaagctcactgcattcttgggttacaaggccggtatgactcacattgttaganntgtcgagaagccaggatcaaagcntcacaagaaggngacttgtgagcctgttannattattg

SEQ ID NO: 46066 - DNA, 265 bp, Glycine max
  Clone ID: 701131620H1
gcgttatgtggcctcttgtctccttacttgcaaagccggaacagaaatcgcatataaaatgcgaaaagaaatgaattcaatgttcggagatctgcacaggatctctctccgtgtccgttgaactttctttacgccctcctcgtaacataaaaattcagatcccgccaactctgaagacctctattctctttccctcccctttccactttcccgagaaaaataaacttttccgtcaattttctctccacggtttccttcttcctca

SEQ ID NO: 46067 - DNA, 263 bp, Glycine max
  unsure (1)..(263): unsure at all n locations; Clone ID: 701131621H1
gngaatctgagaaatggcggattcttctcgggaggagaacgtttacatggcgaaattggcggagcaggccgagcgttacgaggagatggttgagttcatggagaaggttgcaaagactgtggaggttgaggagttgacggtggaggagaggaatctcctctctgtggcttacaagaacgtgattggtgcgaggagggcttcgtggaggatcatatcctccattgagcagaaggaggagagcaggggcaatgaggaccacgtgg

SEQ ID NO: 46068 - DNA, 103 bp, Glycine max
  unsure (1)..(103): unsure at all n locations; Clone ID: 701131622H1
tcaaagcgaccaagggctgaatctcagtgnatcgtggcagcaaggccacttctgncccttaaaacaaaggtcccttcaaacccactttccccacantctnnng

SEQ ID NO: 46069 - DNA, 265 bp, Glycine max
  unsure (1)..(265): unsure at all n locations; Clone ID: 701131626H1
gctcgagttccggcgatgaacgccggcgttcttcgccgccggnnatcgtgggccgccgactanttcggancctgcggtggccggcgctgcacttttgcgctcttgttcanttaagcgctctgcgccattngcttgcatgancctctctactgataccagtttaaaggaagctgttcaaactgaaaaggccccagcggcattggggccatactctcaagcaatcaaagccaacaaccttctgtttgtgtcaggtgttcttggcctt

SEQ ID NO: 46070 - DNA, 267 bp, Glycine max
  unsure (1)..(267): unsure at all n locations; Clone ID: 701131629H1
ttaccatttgggtccctgagacaaagggaaaaactattgaagaaatccaatggtctttcagatgaatttccttctctagcagttgcttttntttttttcctttcacaagcngattnaagaatttcacattttaatgnatctgggattatcgagtgntccaagtatncattngattccttcacttgaaaatggggatcctgnnccggngatangnnctttgatgtttttcntnnatganttggcttcttgaacattcncttagactag

SEQ ID NO: 46071 - DNA, 189 bp, Glycine max
  unsure (1)..(189): unsure at all n locations; Clone ID: 701131630H1
caatcaatgctgtcaactgttgattnnccaagggtgccaatcngnctgctgagaatgcaaanggatggacccccttgatggttgctcgttcgtggcgtagngactagctcaggacatcttanaaacacctccagaanaccccttacaagttcttccnncnncanatntatcncttccagcnaacanccc

SEQ ID NO: 46072 - DNA, 269 bp, Glycine max
  unsure (1)..(269): unsure at all n locations; Clone ID: 701131631H1
ggctgggttcggtgtttcaggctcattctctcttactaggcccanaatcttttctcgatcttccaatancatctctctctttcgctctcaatctcatttccctgctgctgcattcggttccttgacacgttccaacccacacgtgcacnccgctgtcacttccgactccaaggccgctanttcgcttganctaactcaacccgatctcgataatagcggcggcggtgccaacggtaacggaggcggcggtggaggtggagtggaggtng

SEQ ID NO: 46073 - DNA, 150 bp, Glycine max
  unsure (1)..(150): unsure at all n locations; Clone ID: 701131632H1
ctttacttcctttagatgtaaaattttanttatcctctgttgcaccttgacacattgtnttgatttaanataagnnggananaacaatgttgaaacttganactgtagttttattttgatcctatgttaactttgttttcgacttccttt

SEQ ID NO: 46074 - DNA, 264 bp, Glycine max
  unsure (1)..(264): unsure at all n locations; Clone ID: 701131635H1
ggccgcacttactcttgttctcaagggattcgattttctctgcactcacttctagggtttcctccgcgctatcagcaatcatggccgacgaaacaccaaatgagatgaaggaggaggttccagaaattgttccttttgatcctaccnnnnnnnnnnnnnnnnnnnnnnttacaattgtagatcctgctgatgaccctgtggagaaattggctgagaagacagaaaacctctcagtttctgagggggttgagactgcatttgctg

SEQ ID NO: 46075 - DNA, 263 bp, Glycine max
  unsure (1)..(263): unsure at all n locations; Clone ID: 701131637H1
ttcgtgatcgaaaatggcgacgttgaaggttcctgcacaacttccttcacccattggaagacagtgagcaattgcgaaaagcttttcaagggtggggaacgaatganggattgataatatcaatcctgggtcacagaaacgcggctcagcgtaagttgattcgtgaagcttatagtacaacccatggagaagatcttcttaaagatttagacaaagaactttcaagtgactttgagcgggctgtgatggtttggacattggat

SEQ ID NO: 46076 - DNA, 94 bp, Glycine max
  unsure (1)..(94): unsure at all n locations; Clone ID: 701131640H1
ctcggtgtntgantctctgcttcgtcctttcattcctcttccgaatcgttaatcgttacgatcgatccatctcccgcttccacacaacanangg

SEQ ID NO: 46077 - DNA, 263 bp, Glycine max
  Clone ID: 701131641H1
ggaagactggattaatatcatcagttgccaatttatgtgctccggtagaagaatggactgttggtggaactgcactcacctcactgatggatgtggagaggaggcatggtaaattcaagcctgtgatcaagaaggcaatggtggaacttgaaggggcacccttcaaaaagtttgcctccttgcgggatgaatgggccctgaagaattgctacatcagtccaggtccaattcaattctctggcccaggatctgaagtaattaat

SEQ ID NO: 46078 - DNA, 265 bp, Glycine max
  unsure (1)..(265): unsure at all n locations; Clone ID: 701131642H1
ttcaacttcagttcagttgtgttgtctgacaaaacgaacagcaattgggagcagatgcaagatccatcttcaaaccctaattccaatccaaatcccaatcctcacaacgccaatgccncatcccagttaccgcgtccgccgcaggtcacggcgtccaccgccgtcgccggcgccttctcgtcctctctattcgcgcgctccggcggacctcaccaccggcgagcccactcggagatgagtttccggctgccggacgatatgatgg

SEQ ID NO: 46079 - DNA, 266 bp, Glycine max
  Clone ID: 701131646H1
catccctcttgatttgtagtttgttttgtgctttagataaaagttctgccaaatcaagaggggttttaagatcatagtgtgtgttttgcaacaatggctaagttctttgctgctatgatcttggcactctttgccatttccatacttcaaacagtggtaatggctgctaatgaacaaggaggccacttgtatgacaacaagagcaaatatggaagtggaagtgtcaagagttaccaatgcccatcacaatgctcgaggagatgtag

SEQ ID NO: 46080 - DNA, 268 bp, Glycine max
  Clone ID: 701131647H1
gtgacttttgcaccaactggactgacaactgaagtcaagtctgtggagatgcaccatgaatctcttacagaggcacatcctggtgacaatgtgggattcaatgttaagaatgttgctgttaaggatttgaagcgtggttatgttgcctcaaactcaaaggatgaccctgcaaaggaggctgctaacttcacagcccaagtcatcatcatgaaccaccctggtcagattggaaatggctatgcccctgtcctcgactgccacacttctc

SEQ ID NO: 46081 - DNA, 269 bp, Glycine max
  unsure (1)..(269): unsure at all n locations; Clone ID: 701131648H1
gggcttgggctacacgttctccctcgtcctcagaatcttgtgaagtatgctgagagctgcatgtatacccctgtcnaccgaaactataggtgaattatggggcaagtcacttaactttggctgtaataaacatatgttntggtggcatatgtgagttgttttatgtaacttacgcataagtgagagtggtcttatgctttttattacgaaatcaccaaaactgcaggtgaatcatgctttttgttatggggcaaatcactgttagcttg

SEQ ID NO: 46082 - DNA, 258 bp, Glycine max
  unsure (1)..(258): unsure at all n locations; Clone ID: 701131651H1
ctttttctctgccgccactggtttcgattccacacaanatangacnngnatcnatcctttgaatgtcttgcgttttcctttcactacctnnttctaactnanacacacatnaacgggngatatcnctgtcgactcctgntaggaagaggctcatgagagatctcaagaggctgcaacaagacccgcctgcaggactcagcggggcacctcaggataacaacataatgctgtggaagctgtcatatttggtcctgatga

SEQ ID NO: 46083 - DNA, 261 bp, Glycine max
  Clone ID: 701131657H1
ggcacactctctctacttaaacttcagcctttgcatatctctctctcttcatcattgtgctctagtaatcacactagtagtcagtagcagtagtacttgtacccataacataacaaccatggctaatgtgtcccttctccttttccttttgttcttgtctctctcatcaggagggaatttgatcatggctaatgggcagaaaacttggtgtgtggcaaagccttcatcagatcaagcaacccttttggccaacctcaatta

SEQ ID NO: 46084 - DNA, 265 bp, Glycine max
  unsure (1)..(265): unsure at all n locations; Clone ID: 701131663H1
ttctctcctatctatatcttttctcacttagtcttgtgttgtcttcccccacaacacacttgtcanggagagataacaatggcttctgagaaggttgagactgttgttgcagggaattacttagaaatggagagggaaaaggaaggttctaagtccaccagtggcaaattgtctaggctcttttggcatggtggctctgtctatgatgcatggtttagctgtgcttctaatcaggttgcacaagtgttactgacactaccatatt

SEQ ID NO: 46085 - DNA, 150 bp, Glycine max
  Clone ID: 701131664H1
ctttacttcctttagatgtaaaattttatttatcctctgttgcaccttgacacattgttttgatttaagataagaaggaaaaaacaatgttgaaacttgaaactgtagttttattttgatcctatgttaactttgttttcgacttccttt

SEQ ID NO: 46086 - DNA, 263 bp, Glycine max
  unsure (1)..(263): unsure at all n locations; Clone ID: 701131665H1
gttctcttcactcttggtcttgcgagagaaagccatgccaganncgaagatttttggcatgctgtttggccaaacactcccattccaagttcattgcgagntcttctaaagcctggccctgcaagtgttgaaatcgatgatcaccctatgcaaattgaagaaacacagtacccgaaaaccttcttctataaagaataccttcatccaggcaaaacaatgaaagtacaattcagcaagcctccctttcaacaaccatggggtgt

SEQ ID NO: 46087 - DNA, 259 bp, Glycine max
  unsure (1)..(259): unsure at all n locations; Clone ID: 701131671H1
gcgggttactgtctgttcaagctaccatctctctctctctnnccttagtgcctccttgccagaagttaaaatggcccaagaaactttcctattcacatctgaatcagtgaacgaggggcaccctgacaagctctgtgaccagatctccgatgctgtgctcgatgcatgcttggagcaggaccctgacagcaaggttgcctgtgaaacctgcaccaagaccaacatggtgatggttttcggagagatcacaaccaaggcc

SEQ ID NO: 46088 - DNA, 259 bp, Glycine max
  unsure (1)..(259): unsure at all n locations; Clone ID: 701131673H1
gggcaggctttcatcttccttcaacaagcctttangtcctctcttcaatgctggctcagtttactacaagtcctctttgcctgctgaagctgcgtacgacaatgagaaaagctgtgatacggaattgaatgctccacttgaggttgttgatcctgagattgctgatataattgagcttgaaaaagctagacaatggaagggactggaactgataccctccgagaatttcacttctgtctctgtaatgcaagctattggc

SEQ ID NO: 46089 - DNA, 260 bp, Glycine max
  unsure (1)..(260): unsure at all n locations; Clone ID: 701131674H1
ctttctccaacttcacacacaaaaaaacatngcaaaggatagaacanttggtgtggctctagatttctccaaaagcagcaagaatgctctgaaatgggcatttgagaacttagccgataaaggtgacaccatttatgtcattcacatcaacccaaactctctagacgagtcccgcaacaagctatgggcaaaatctggttctcctcttattcctttggtagagttcagagagcctgagattatgaaaaagtatgatgttg

SEQ ID NO: 46090 - DNA, 250 bp, Glycine max
  unsure (1)..(250): unsure at all n locations; Clone ID: 701131675H1
gcttgctgctgctgcatanttnatcgaaagcatgacaanattcattgtcncagcatccnctttcaagggaattgcagctcgttctttcaccgcncctctaactaggtcntgttatcanggaatgagatantttgctactgtatcanatgatcctgacacacatgatgacttcaagcnagntaataaacttgagaattccancatttctttggctgatgttattgagcangatgtcaaggataatccgnta

SEQ ID NO: 46091 - DNA, 258 bp, Glycine max
  unsure (1)..(258): unsure at all n locations; Clone ID: 701131676H1
gcgcgtgttgggataatccaatataatctagagggtgcagngtagagtaaaaaaagataaagatgatcgatatgaaatnnnnnnnnnnnnnnnnnnnntggggctctgaatcccaaggccgattactgtctatcccaacaaaacctaacccagatgatgctcctgcctctgctcgttggctcgtctccctcaatttctggggagtcttgaatactatctcatctgatttgggtggagctccctttgggaatgtggtat

SEQ ID NO: 46092 - DNA, 240 bp, Glycine max
  unsure (1)..(240): unsure at all n locations; Clone ID: 701131678H1
anacaccaattaaggagaaaaaaancntattttaacacaaaangctcaatggtttggaaggnnatttgttgttaatttaagcttttatgcttttcaaacctttatttgctatttttcacaacttgtttacattgacaaaaaaaggttaaacatgcataatccaattaagaattaagaaaatcgtanctaagtgaagcaataattcgtttactttttgtttttnctttgccctttttcntt

SEQ ID NO: 46093 - DNA, 263 bp, Glycine max
  Clone ID: 701131679H1
ggctggtgcttattgcatgagcatggcatcaacctacaatctaaagatgcggcctcctgagtattgggttgaagatgatggatcagtgagcaaaataagacatggagagacttttgaagaccacattcggttttttgaggggctttgagctaataatttatcttgtaggaaagaaggctggagaattgttatgtacttggagtttgaatctttcctcgtcaatgaatgcatgactcttgtagttctgtttcttccgttctaat

SEQ ID NO: 46094 - DNA, 256 bp, Glycine max
  unsure (1)..(256): unsure at all n locations; Clone ID: 701131683H1
tccaatccatcaaagcatttcataatgaacaaagatctatnccactagaccaccacctcttcttagaagaaattaaaatggcacatcgttacccaaaacccctcttagacaccctctactgcttaaaagaccatattcattgggaggaagaacaagtagaagatgatgagtacagtagtagcacaaccacaacaatcacaaacacaaacacagacacctcctctgtggtctttttagaacacgacctcttctggga

SEQ ID NO: 46095 - DNA, 254 bp, Glycine max
  Clone ID: 701131684H1
ggccggtcgatcctggcggaagacattgtcaggtggggagtttggctggggcggcacatctgttaaaagataacgcaggtgtcctaagatgagctcaacgagaacagaaatctcgtgtggaacaaaagggtaaaagctcgttttattctgatttccagtacgaatacgaaccgtgaaagcgtggcctatcgatcctttagtccttcggaatttgaagctagaggtgtcagaaaagttaccacagggataactgg

SEQ ID NO: 46096 - DNA, 254 bp, Glycine max
  unsure (1)..(254): unsure at all n locations; Clone ID: 701131686H1
gatcctgaaagtcatcaggaagaacttggtcaagaagtgcattgagatgttctttgaaattgctgaaaacaaggnagactataacaanttttatgaagccttctctaagaacctgaaacttggtattcatgaggattctcagaacaagacaaagctagctgaattgctcaggtatcactccactaagagtggtgatgagatgaccagcctcaaggactatgttaccaggatgaaggaaggacagaatgacatct

SEQ ID NO: 46097 - DNA, 207 bp, Glycine max
  Clone ID: 701131687H1
taccgtcctagtctcaaccataaacgatgccgaccagggatcagcggatgttgcttttaggactccgctggcaccttatgagaaatcaaagtctttgggttccggggggagtatggtcgcaaggctgaaacttaaaggaattggcggataagacaaatgttgttgagtttcgttttatttatagattgaattctcagttttgatttg

SEQ ID NO: 46098 - DNA, 256 bp, Glycine max
  Clone ID: 701131689H1
ggctagctccagaaaattaggatctgcttcagatctagtgtttccctgtcccaaatcacgagtccattgagtttgattttgtggatgaaaagcatagatagggcttttgcaaaactctccaatgtttcttgaaattatatgaccatgcgtcgaattcgtatgctgcactccttctccgtcgtgttcctctactggttctacgttttctcatgaactccctcttaaatccgtgattaattagatctatctccttagt

SEQ ID NO: 46099 - DNA, 257 bp, Glycine max
  unsure (1)..(257): unsure at all n locations; Clone ID: 701131690H1
tcctactccaatcactttcttttttccngtcagtcatgggcaangtcaagatcggaatcaanggatttggaagaattggncgtttggtggccagggtggctccncagagagangatgttgaactcgttgncgttaacgatcctttcattaccaccgattacatgacatacatgttncaatacganagtgttcacgggcactggaagcatcacgatgtcaccgttaaggatgagaagacccttctcttcggtgacaag

SEQ ID NO: 46100 - DNA, 256 bp, Glycine max
  unsure (1)..(256): unsure at all n locations; Clone ID: 701131692H1
cnaggctcttccttgccttctgaatctgttgaccaataattataaaaaaagcatcaagaaggaagcttgttggaccatatcaaacatcacagctggtaataaacagcagattcaggctgtgattgaggctaatctaattgctcctttggtcaatctgcttcaaaatgctgagtttgatatcaagaaagaagctgcttgggctatctcaaatgctacatccggtggttctcatgaacaaatcaagttcctagtaagt

SEQ ID NO: 46101 - DNA, 260 bp, Glycine max
  unsure (1)..(260): unsure at all n locations; Clone ID: 701131695H1
cgaacatggctaagtatcattcaagtggganaagctcttccatgactgctatngccttnctgtttatccttctaatcacttatacaggcacaacagatgcacaatccggggtatgttatggaagacttggcaacaacttaccaacccctcaagaagttgtggccctctacaatcaagccaacattcgcaggatgcgaatctacggtccaaggccagaagtcctcgnagcactaagaggttccaacattgagcttttgcta

SEQ ID NO: 46102 - DNA, 255 bp, Glycine max
  unsure (1)..(255): unsure at all n locations; Clone ID: 701131704H1
gcgnattctcagatccatggancaggctcatattattaagncaaagcctctcagatccgcggtggcggacntgacgganatgaagtcntcaagncgtctcttcacgatcggactngtgtcggcgtggtactcctccaacattggggtactgctcctcaacaagtaccttctcagcaactatggcttcangtatcctatcntcctcaccatgtgccacatnaccgcctgctncctctntagntacgtngccatcgc

SEQ ID NO: 46103 - DNA, 252 bp, Glycine max
  unsure (1)..(252): unsure at all n locations; Clone ID: 701131705H1
gcgaaagtgaaataccactacttttaacgttattttacttattccgtgaatcggaagccgggcactgcccctctttttggacccaaggtcggcttcggccggtcgatccgngcggaagacattgtcaggtggggagtttggctggggcggcacatctgttaaaagataacgcaggtgtcctaagatgagctcaacgagaacagaaatctcgtgtggaacaaaagggtaaaagctcgtttgattctgntttcc

SEQ ID NO: 46104 - DNA, 234 bp, Glycine max
  unsure (1)..(234): unsure at all n locations; Clone ID: 701131706H1
atggtaagcgatgcaggaggggactgtncgagtcattttacatggaaaatcaaaatcgtactcagatctatctcaaatgagtaatttgagtaatcngaaggagttgcaaaagcaagagagtcctttcaacaagagaagaagggttttgattgcatccaagtggtccagaagatcatctttctattcctggtccaacccacaatccatgcctcttttgcctgtggatnangatca

SEQ ID NO: 46105 - DNA, 147 bp, Glycine max
  unsure (1)..(147): unsure at all n locations; Clone ID: 701131707H1
ctactttctctctctttgtaacttgtaagcatggagtcctcaaagatctatgcttacctctttcctttgcatgctcttcctctcctccgccactcccattctcggttgtggctactgtggcaaaccccccaaaaagcacaancctgg

SEQ ID NO: 46106 - DNA, 251 bp, Glycine max
  unsure (1)..(251): unsure at all n locations; Clone ID: 701131708H1
aactaaatatgggctgacttgttggaatggtcaaagnaagataagaaacgaatgcttcatgtcgtctaccgtgttggtgaccttgatcgcaccatcaaattttacacagaatgtttaggaatgaagcttttgaggcaaagagatatcccagaggagaaatatgctaatgcttttcttggatttggccctgaagaatcccattttgttgttgaattaacatataattatggggttacctcgtatgacattgg

SEQ ID NO: 46107 - DNA, 251 bp, Glycine max
  unsure (1)..(251): unsure at all n locations; Clone ID: 701131709H1
ctggtgggtccgagctcataatcaccacgaaatctggtgatagatcatcaaccaaaacacttggttcccgtgaatttttgcgttattatcgtcagaaacctcggccatcactagcaaatntggctatcactgctgcattggcttcaaggtacaggagcctgggcttgaccactatccaatcaagggagaagattgtgaggatgaaagtgctgaaggaaatgaataggtcaggtgtggacaatatgcgtacc

SEQ ID NO: 46108 - DNA, 249 bp, Glycine max
  unsure (1)..(249): unsure at all n locations; Clone ID: 701131711H1
gacatggntggttttaaacttcttgagcatgtngggcttganatggatcttcctgtcattatgatgtctcgtgganggggaaacaagcaaggtgatgaaaggtgttcaacatggagcctgtgattatctccttncagcctataaggntgaaagaactgagaaacatatggcagcatgtcttagaaaaaagatacatgaggcaaaagaatttganagttttgagagcntncattgatgancaatggatca

SEQ ID NO: 46109 - DNA, 252 bp, Glycine max
  Clone ID: 701131712H1
caagtcattacctgcaaagctgcggtggcctgggaacccaacaagcccttaaccgtccaagacgttcaggttgctccgcctcaggccggcgaggtccgtgtccaaatcctcttcaccgctctctgccacaccgatgcttacacttggggcggcaaggatcccgaaggtctcttcccctgtattctcggccacgaagctgcagggattgtggagagtgttggagaaggtgttactaatgttcagcctggggat

SEQ ID NO: 46110 - DNA, 252 bp, Glycine max
  Clone ID: 701131713H1
gctcatccttgagttaaaaaatggcagcagcttcttccatggctctctcatccccatccttggctggcaaggccgtgaagctgggcccatcagccccagaagtgggaagggtgagcatgaggaagaccgtcaccaagcaggtctcctcaggaagcccatggtacggcccagaccgagtcaagtacttgggcccattctctggcgagcccccgtcctacctaaccggtgagttcccaggcgactacggctggg

SEQ ID NO: 46111 - DNA, 248 bp, Glycine max
  unsure (1)..(248): unsure at all n locations; Clone ID: 701131714H1
ggaattaccctangcatgttactgtgcacgttgttgatgggaaccttgganccaaatactgcaaaatccatcacaagatatgttgtttcgagattccatgtttcagccaataggaggggntaacgggcaacgaaatgtttttaccaatacagctccatcgaacacaagtgaaagccctaataacactgncacgatcttctgttcanccaatcaantctccttatcctcccttcacacaacacaagngt

SEQ ID NO: 46112 - DNA, 163 bp, Glycine max
  unsure (1)..(163): unsure at all n locations; Clone ID: 701131716H1
ttgagnttccgtcattccatcatgaacgntcttcccanttctcctcttcttcctcttcgnttctgcattagtttcngcgaagaaaaatggtgaagtgacggagngcnaattggcgtgaagctaaacccgtntccngtgaantttcggnaccnaaggngncnng

SEQ ID NO: 46113 - DNA, 201 bp, Glycine max
  Clone ID: 701131718H1
ccgatcgcatagctcgctcgcaaccaccatgccttcccgaagaagaactctcttgaaggtcatcattctcggtgacagtggggtggggaagacatctttgatgaaccaatatgtgaataagaagtttagtaatcagtacaaggcaaccattggagcggattttttaaccaaagaagtgcaattcgaagataggcttttcac

SEQ ID NO: 46114 - DNA, 234 bp, Glycine max
  unsure (1)..(234): unsure at all n locations; Clone ID: 701131719H1
tggaaacagcgaaagtgaaataccactacttttaacgttatnttacttatacccgtgaatcggaagcggggcactgcccctctttttggacccaaggtcggcttcggccggtcgatccgggcggaagacattgtcaggtggggagtttggctggggcggcacatctgttaaaagataacgcangtgtcctaagatgagctcaacgagaacagcaatctcgtgtggaacaaaagg

SEQ ID NO: 46115 - DNA, 234 bp, Glycine max
  unsure (1)..(234): unsure at all n locations; Clone ID: 701131720H1
caggacctggcagcttcaggttttcactatggccattgtggantttgggcccttccgttctactagcaactggcatggtcccaacattgtggttaccgatatcatcaatctttctcggccccaatatagccagcctactttccttaattggacttgattgcatatttaacctgcggtgcaaccctttttctcctgcatggctgatgctgttcacgaccaaagtctccaacacaa

SEQ ID NO: 46116 - DNA, 237 bp, Glycine max
  Clone ID: 701131721H1
tagcacagaaccttgtgaatacacgagatggattgtacactatatttggttgtaataaagctgagatatacgtggacagtgataactgacatttgaggatacgaattagggtggtctatgctttgaagaaacattagctttgggaagagtgttgatactggtagggactcatttgtagagagggtaaacaaaacagtggagatcgatccatacagtgtttgaccagatgtatttatt

SEQ ID NO: 46117 - DNA, 248 bp, Glycine max
  unsure (1)..(248): unsure at all n locations; Clone ID: 701131728H1
ctcggttgctatcagcgagtgagagtgagtgagtggttctcttgcagcaacaaggtttagtgacaccaaacagacgggaaatgggtcgtggggtcagtgctggtggtggacagagttccttggattatctctttggcagtggggtacctgccagcagtgcaaatggtgctcgcactcaaaatgcaagtgctccttcaccaccggttganaagcaaagttccagcaccagcaccagcaccagcacctgc

SEQ ID NO: 46118 - DNA, 253 bp, Glycine max
  unsure (1)..(253): unsure at all n locations; Clone ID: 701131729H1
acttcaagagatatcaagttcaagttcaagagaagaagagagggaaaaaccgattaccgtgccaggattcggttgattaatcaggacaagaacaaatataacactccgaaataccgatttgttgttcgctttagcaacaaggacattgttgcacaaataatatcctgctagcattgcnggncgatattgttctgctgcagcatatgcacatgagctgccacgatatggtcttgaagtagggcttacaaattat

SEQ ID NO: 46119 - DNA, 255 bp, Glycine max
  unsure (1)..(255): unsure at all n locations; Clone ID: 701131730H1
gnagtttccggtgcatctcatcgtcttccaaaatgaacgacgcagatgtctcgaagcaaatgccagcagatggtgcgtttcatccgccaggaagctgaggagaaagccaacgagatctctgtatctgccgaagaggaattcaatatcgagaagctgcagttggttgaagccgaaaagaagaagatcaggcaagaatacgaacgcnaagagcgccaagtncgaaattcgcnagaagattgagtactcaatgcagct

SEQ ID NO: 46120 - DNA, 249 bp, Glycine max
  unsure (1)..(249): unsure at all n locations; Clone ID: 701131731H1
tttgcntttctgaaagtggagagaaccctagaaaccaaactgtgctgtgcttcctacagttcatggcggacgtcatgattatgaaggagatcgaggacncgtcgcttccgtctcggccgtcgatctctccactctcgatctcgacgccattcgcctccctaccggcgaagattgcggcatcgtcagtgatgacgaggaggtttaccaggaggagaatctcgagtttgagtctggatttggtaacatcat

SEQ ID NO: 46121 - DNA, 211 bp, Glycine max
  unsure (1)..(211): unsure at all n locations; Clone ID: 701131735H1
aaatccccgcttcgtggaaatcccgaaccagaaaccatgcttctccgaaccgctgctgcttctgcttcgtccctctccctcttcagcccgaacgccgaacctccccgttcggttcccgctncgtggattggtggttcgcgcagcaaaggatccacgaaccaccgcgccctgaccggagtgatttttgaaccgttcgaagaggtgaagaagg

SEQ ID NO: 46122 - DNA, 250 bp, Glycine max
  Clone ID: 701131737H1
cgagatcttcattcgccgattttaaaagatgagtaagcttcagagtgatgctttgcgtgaagccatttcaggaatcatggccgattccaaggagaagaatcgcaaatttgtggagaccatcgaactccaaatcgggttgaaaaactacgatccacagaaggacaagcgtttcagtggctctgtcaagctgccccacattccctcgccccaagatgaaaatttgcatgcttggtgatgctcagcatgttga

SEQ ID NO: 46123 - DNA, 247 bp, Glycine max
  unsure (1)..(247): unsure at all n locations; Clone ID: 701131740H1
ccagatcttaatcaagaggantgagtnttgtttttccagccatgnngccgctngtgagtctaagcctttctctcagatttacgcttaacagagttacagtcactcagtaatctactccttttctagatcctgcatgctgggaaaaccaacaaaaattcttacaagacactcattgcagccgagtatgctggcgtccaagttgattttgcccctaattttgagatgggtgtctccaataaaactcctg

SEQ ID NO: 46124 - DNA, 246 bp, Glycine max
  unsure (1)..(246): unsure at all n locations; Clone ID: 701131741H1
ttnactcttttctctctttcnctttctattatctctccaacttcactccttttattcccttntcacttcttagttctttccttatcctttcgctatncagacatgttttgnttnnctatttgatcggatcggatcggatctngctttcgccattaattactcatggaganccgnnccgatgcagataccagcncctttnnaagtttgtncgcagctgtgtcatatggatttacatcaatggccatg

SEQ ID NO: 46125 - DNA, 245 bp, Glycine max
  unsure (1)..(245): unsure at all n locations; Clone ID: 701131742H1
agctaccttcatgcaacccaccaaggtgggcatggccactcgcaacctcaaatctacacaatgnannncagnngctttggcttggaacncgcngcagctaaactcattngntccnttaagcncgatctcaaagattntgcacaaaaatgtgtcgacgccaccaaaattgcaggattcgcncttgctacntcagctctacgtngtntctggagcgagtgctgaaggtgttccaaagaggntaacct

SEQ ID NO: 46126 - DNA, 171 bp, Glycine max
  unsure (1)..(171): unsure at all n locations; Clone ID: 701131746H1
cagccccantatctgggtgaggcctatcagtggactcacaatggtggttgaccttgaactncatgaagatcgttcagtatcacgacggtggcattataccagtaccaactgccgataacactgaataccgcttttcacatcagaacccaccnttcggtccacncnacannc

SEQ ID NO: 46127 - DNA, 255 bp, Glycine max
  unsure (1)..(255): unsure at all n locations; Clone ID: 701131748H1
actgttagacctttttgattcagaggntcccagggancgngantacttggagacagttcttcatcgtatttatgggaaatttatggttcaccgaccattcatcagaaaagcaatcaacaatatattctaccgcttcatttttgaaactgagaaacacagtgggattgcagaactcttggaaattttgggaagtataattaatggatttgctttgccactganagcaganacanangcnatttctagtgggannnc

SEQ ID NO: 46128 - DNA, 227 bp, Glycine max
  unsure (1)..(227): unsure at all n locations; Clone ID: 701131750H1
atttttggtcacatagtttatggnntgcntctgncgtagtncttcaacagcnccctggctcgctacgatcatcttgattatnttttaagccttttaaatgcccaacatcttgttcttgatgtttgagatgatgtatccanttcttagtgaaatcttctttccgggtgtatgnatcaattctactgtgagangacgcaggacccatttagttcaatccntctcgttgc

SEQ ID NO: 46129 - DNA, 248 bp, Glycine max
  unsure (1)..(248): unsure at all n locations; Clone ID: 701131751H1
gnaccatcctggtcaaattgagggctgctgctattatggagcatatcttggatggaagttcctacatgaaagctgctaagaagttgcatgagattgatcccttgcaaaagccaaaacaagatagatatgcccttagaacttcaccacagtggcttggtcctcttattgaagtgattcgtttctcaaccaagtcaattgagagagagatcaactctgtgaatgacaaccctttgattgatgtttcaagg

SEQ ID NO: 46130 - DNA, 246 bp, Glycine max
  unsure (1)..(246): unsure at all n locations; Clone ID: 701131753H1
gctaaacgacattacctccgtaaccggtgaatggcagaagaagtaaagngagaaaaccgatattcgcactttaccgcacccagcgactccgcgtggttttggcganaacttctagaacattcttccatggaggttatcagggttctagcggcggcgatcgtggtagcggtgctngcggnggctcttccggcggacgcgccgacgacaaccgagtattcgcgccgtgcacggacacgcgagtgcagc

SEQ ID NO: 46131 - DNA, 69 bp, Glycine max
  unsure (1)..(69): unsure at all n locations; Clone ID: 701131755H1
cgagattccncctaaacccgntngangttgttgtnagtgaagaaatggacgaacaaagaggancnancc

SEQ ID NO: 46132 - DNA, 243 bp, Glycine max
  Clone ID: 701131756H1
gccagtagtcatatgcttgtctcaaagattaagccatgcatgtgtaagtatgaactaattcagactgtgaaactgcgaatggctcattaaatcagttatagtttgtttgatggtatctactactcggataaccgtagtaattctagagctaatacgtgcaacaaaccccgacttctggaagggatgcatttattagataaaaggtcaacacaggctctgccgttgctttgatgattcatgata

SEQ ID NO: 46133 - DNA, 245 bp, Glycine max
  Clone ID: 701131757H1
ggagaagactcttctgcctgcagatcctgctaagcctccagccaaggcacaggtggtaggttggccacctgtgcggtccttccggaagaacatgttagctgtacaaaagagcgtcggagaagagaacgagaagaacagcagcagccctaatgcaagctttgtcaaagttagcatggatggagcaccttacctccgcaaagtggacttgaagatgtacaagagttaccgagagctctctgattctt

SEQ ID NO: 46134 - DNA, 246 bp, Glycine max
  unsure (1)..(246): unsure at all n locations; Clone ID: 701131758H1
cnggaatggaggtcgcaacaaacacggccgtggccacgtcaagttcattncgntgctccaactgcggcaaatgctgtcctaaggacaaggctatcaagaggtttctggtgaggnacattgttgaacaggctgcagtcagagntgttcaggaggcttgtgtctatgaacaatacacgcttccgaagctttatgtgaagatgcagtattgtgtttcctgtgctatccactctccangttgtgagggnt

SEQ ID NO: 46135 - DNA, 249 bp, Glycine max
  unsure (1)..(249): unsure at all n locations; Clone ID: 701131763H1
tgaaaatgaaggtccttgttttcttcgttgctacaattttngtngcatggcaatgccatgcgtacgatatgttccctctccgaatgnacactggctatggtgcccgtactccggaggtgaaatgcgcaagttggacncttgctgtggaagcacacaacatcttnggcttgagaccattcctgaagagtgcgttgaagcaacaaaggaatacatccatggcgaacaatatagatcagactccaaaacagt

SEQ ID NO: 46136 - DNA, 246 bp, Glycine max
  unsure (1)..(246): unsure at all n locations; Clone ID: 701131766H1
tgataacttgcatcatatcaaaatctttgggcaanatagggagcttaattaaagnnctcattaaggatcatggaatcncaaacacagtctgagctaccagttgtagacttcaccaacaaaaatctgaaaccgggtactgatgcatgggtttcagcttctcaagtagtgcgtggtgcacttgaggatcatggtggtttcttggcatactatnataaggtcagtttngagactacgagttctgnttnc

SEQ ID NO: 46137 - DNA, 248 bp, Glycine max
  unsure (1)..(248): unsure at all n locations; Clone ID: 701131769H1
tacttacaaaactctgttctttcctccatgaattcaatttctttaggtaccttcgtcttcactccccctccagcatgcnagttccgcccccttcttcaaaccaaacaccaacccatcttccacagcctctgcagcantggtctcactctctcccgaatttctctgcacccaaaaacccanttttctacgagccacggactcnaacaccgacgcccccatttccctccccgagggcgcgtccttcgtnt

SEQ ID NO: 46138 - DNA, 243 bp, Glycine max
  unsure (1)..(243): unsure at all n locations; Clone ID: 701131773H1
cccgcttcttacctcaacccgatgtcttcattcgcncttcccacggaacacgcattctagcccacgccggcattctggcttccatgtcccctgtttttgacaactttatagatcgcccacgtaagcatcggagctccgagagaattatccaaatccacggcgtcccctgcgacgccgtcaccgccttcgtcggattcctctactcctccaggtgcacggaggaggagatggacaagtacgggc

SEQ ID NO: 46139 - DNA, 226 bp, Glycine max
  unsure (1)..(226): unsure at all n locations; Clone ID: 701131774H1
gtcctgcctcgtnacaaaatactgaacngccgcagctctgtggctgatcgacgcattcttgcaactcaatcccanaatgtctataacgcacagcctccaccacttcactcnnnnnnnnnnnnnnnnnnntcttagctccctcttccttcaattccagaggacaggtttcgttgcctgtgaagagcgtgagcatttggcaaatgcgttgccncacccgaaggctgag

SEQ ID NO: 46140 - DNA, 238 bp, Glycine max
  unsure (1)..(238): unsure at all n locations; Clone ID: 701131775H1
gttttttcagnagttgagttgctgatccatgtttttttatgtgatgttttggtagatcacaatatgcgtttgttttttatttctcttatgagttttgctgactgggctgttatttttgccgggaagacaaaaaagagtttcttttgggatcaactctaacaggctatgttattttgaaagaagttacttcgcatcaataatgggttcaggtgattggtttaagacaataattagctaa

SEQ ID NO: 46141 - DNA, 249 bp, Glycine max
  unsure (1)..(249): unsure at all n locations; Clone ID: 701131777H1
cnagaccgggcatggctaatgaagaggaacaganaaaccacctcttcggcatcaaagatctccggtcacaagactgctcctttcagagtgatgcactctatcagtatatacttgaaaccagtgtctatccnagagagcacgagtgcttganagagatacgcaagatgactgcaaaacacccactgaacatcatggcaacaccagcagacgaaggacaacttctgagcatgcttgtnaagctcacgaatt

SEQ ID NO: 46142 - DNA, 245 bp, Glycine max
  unsure (1)..(245): unsure at all n locations; Clone ID: 701131778H1
ggggaagatgaattcggtaaagcaagangtccanatganaggaacttagactctttgaatgaatatgatttaggacattctggtgattatagtttagcagctgatattgatcganaaanattccgtgggcctcaaggttatgagtcatatgatccacatgcngganccatatgctngggagcancataggannccctcatcccatttaggcaggnggactcgtcgcagntctgacagtcctgana

SEQ ID NO: 46143 - DNA, 200 bp, Glycine max
  unsure (1)..(200): unsure at all n locations; Clone ID: 701131779H1
tgagttgcatgcatcttagttcatttgcaatgctctctatagaacctggnaattatagttcattttggtttttgctttcctctttattttctagactcttgtgtactaacttttcaagatcctaacacaatataaatgtggctctaaaaatataagaactagtttattttttttggtttgctcattcatgcagaaagtaa

SEQ ID NO: 46144 - DNA, 240 bp, Glycine max
  unsure (1)..(240): unsure at all n locations; Clone ID: 701131783H1
aattcgagtcttccttcgtttccaagtcagcgttaagggtttagtttggcgcgtgcgatnnagancnaggaattggacgatggagagtgtagtagggaccatgaagagaagtttgagaggcagattgtgagcgttgatgccaagagagcgttggttggancaggtgctcggatcctgttctatcccacactcttgtataatgtgcttcgtaacaagattgaagctgagttcaggtggtgg

SEQ ID NO: 46145 - DNA, 236 bp, Glycine max
  unsure (1)..(236): unsure at all n locations; Clone ID: 701131785H1
ttctatatcctgtctatcctctntctccctctccaatttctctgcacctcttncncatttcnatttgttcttcatcttccaccttcctaactncnacnaataccatgcaaacccaccaaacgtagcaaaccaaaacgccaccacgtttcgaaagtgacatgcaacagtaaccaaaacaccccaacaccaaacccagaagaagaaagaccatcatacaacattctaggaaaatatag

SEQ ID NO: 46146 - DNA, 129 bp, Glycine max
  Clone ID: 701131786H1
tctagatctacttcatcatgcacttgtttaagctgcaggaggactttaatttgggtattatatccagacttttgtgtttttccaattaaatttgactaaaagatcacagatagtagctttccacacaac

SEQ ID NO: 46147 - DNA, 237 bp, Glycine max
  unsure (1)..(237): unsure at all n locations; Clone ID: 701131787H1
ggatctggatgttgttactcggatggatttattggacttctttaaggaagaatgtgaacagagagaagctataatcgtatatgcaactcatatttttnatggactggagacatgggcaactcatttggcatacatacaagatggtgaactgagaagagcagaaaaaatatcaaatgttaaagagttgaaatctcaactaatctgctgtctgttgttgaggcctggcttcgcgctgac

SEQ ID NO: 46148 - DNA, 244 bp, Glycine max
  unsure (1)..(244): unsure at all n locations; Clone ID: 701131788H1
taaaaaaagagagccaaaccaaacctttcccgaaacggttacgttttgcccttcttcggaaccctcccttctgcgccgctgctgctgcnccggtacgccgtcgggactactcccggtaaccgaagaccactgccgatccgtcagaaacctcggatctcggatctgaacgagcgaaacgatgccgtctcacgcggatctggaccggcagatcgagcatctgntggagtgcaancctntgccggag

SEQ ID NO: 46149 - DNA, 231 bp, Glycine max
  unsure (1)..(231): unsure at all n locations; Clone ID: 701131789H1
ttcgaagtgcgcgaagaactcgggttgctacaacatcnagagatattgtagctnngaatgaactgtctgtggcttccaactcattagctcaggcatcagttcaccataaatatcatttggaggaggctgatgagtttgcagatgaacatgttactagggctccaaaaaatgggtgtggcattccttggaattggtccctttcttcaaccttgaatcggatttaaaaataat

SEQ ID NO: 46150 - DNA, 237 bp, Glycine max
  unsure (1)..(237): unsure at all n locations; Clone ID: 701131790H1
catgcccccatgtttgtngttggtgtcaacgagcacgagtacaagccagagcttgatattatttccaatgctagctgcacaaccaactgccttgccccacttgccaaggttatcaatgacaggtttggcattgttgagggtttgatgaccactgttcattccatcaccgctacccagaagactgttgatggaccatcagccaaggactggagaggtggaagagctgcttcatttaac

SEQ ID NO: 46151 - DNA, 96 bp, Glycine max
  unsure (1)..(96): unsure at all n locations; Clone ID: 701131791H1
accgtcatacgcatgggntcctccgangatggngttggacacgaaanctctcatcggagcnctncgacgntantacccgacgacnaaatncngact

SEQ ID NO: 46152 - DNA, 243 bp, Glycine max
  unsure (1)..(243): unsure at all n locations; Clone ID: 701131792H1
tttcagtcgcactctgcaatcctatcttgtttgcatntcaaaatctcattgcatcatcatacttcttcttaaaagttaaaaggttannnnnnnnnnnnnnnnntgagtagcgtgntggagcatggtgttgtgggatgttgcaaatcagggccaggctatgctaccccactggaagccatgtactggtccaagagagtctcttatttatgtaactgctgtctacacagggacaggnatagagac

SEQ ID NO: 46153 - DNA, 241 bp, Glycine max
  unsure (1)..(241): unsure at all n locations; Clone ID: 701131793H1
cgcgtgggactcacgcgcctgagtcctcctcgtcctcttncaaccgttgtcgacactctttctttctctctctaccttaactacgttcgtatctcggatccgtcgacgtttctgtcccttctttcggatccaccttcgttgtttcgatcgaatcttgttactatgatgagaagagatcaaatacgtgcacgtgagatgcgaaccccatccctggttgacctttgtgttcagaaagtaatag

SEQ ID NO: 46154 - DNA, 242 bp, Glycine max
  Clone ID: 701131794H1
actttcctcttcacctcagaatctgtaaacgaaggccatcccgacaagctgtgtgaccaggtttcagatgccatcctagatgcatgcttggagcaagacccagaaagcaaggttgcttgcgagacctgtacaaaaactaacatggttatggtctttggtgagattacaaccaaggccagcgtgaactacgagaaaatagttcgagacacttgcaaaggcattgggtttgtgtcaccagatgt

SEQ ID NO: 46155 - DNA, 251 bp, Glycine max
  unsure (1)..(251): unsure at all n locations; Clone ID: 701131796H1
cttgtctcaaagattaagccatgcatgtgtaagtatgnactaattccagactgtgaaactgcgaatggctcncttaaatcagttatagtttgtttgatggtatctactactcggntaaccgtagtaattctagagctaatacgtgcaacaaaccccgacttctggaagggatgcatttattagataaaaggtcaacacaggctctgcctgttgctttgatgattcatgataatcgtcggancgcaggcctt

SEQ ID NO: 46156 - DNA, 267 bp, Glycine max
  Clone ID: 701131802H1
aaggtcttcttggtgctggggaagacagaatggagcaatcatattcatgggagaattgggctcttgacaaggaaatgggggaggatgaggaggagttccttcgcgacatccttagtaaaccggctttttcttccgagagtgaaagtcaagcaccagttgtctcatgctctgccaaaagcaaaagggctccgatgacatacattttgtcttttgataactccaccataacaccagcaccttcttccccccccaccctagaggcccaac

SEQ ID NO: 46157 - DNA, 268 bp, Glycine max
  Clone ID: 701131803H1
gcgtgctcaagtgtggcagaggaaaggtttggcttgaccccaatgaagtcaacgaaatctccatggccaattctcgccaaaacataaggaagctggttaaggatgggtttatcatcaggaagcccaccaagattcactctcgctcacgtgctcgtcgaatgaaggaagccaagaggaaaggacgtcactctggatacggtaagcgtaagggtacaagggaggcaaggcttcccactaaaattctatggatgaggagaatgcgtgtgct

SEQ ID NO: 46158 - DNA, 264 bp, Glycine max
  unsure (1)..(264): unsure at all n locations; Clone ID: 701131804H1
gccgggtctgtgngaacatcccaattgttctttgcggtaacaaggttgatgtgaagaacaggcaagtgaaggcaaagcaggttactttccacaggaagaagaatttacagtactatgagatttcagctaaaagcaactacaattttgagaagccttcctgtatttggccagaaaactgcaggtgatcctaacttgcactttgtggagtctccagcatggctccaccagaagttctaattgatttagctgcacagcaacaacatg

SEQ ID NO: 46159 - DNA, 267 bp, Glycine max
  Clone ID: 701131805H1
acttgatctcatcataatcgtcagcgtcaattgaagaagatgccgatcagaaacatcgccgtcggaaggcctgaagaggcgactcaccccgacacgttgaaggcggctttggctgagttcatctcaaccttcatcttcgtgttcgccggctcaggctccggcatcgcctacaacaagctcaccgacaacggcgctgccacccctgccggcctcatctccgcctccatcgcccatgcattcgccctcttcgtcgccgtctccgtcggc

SEQ ID NO: 46160 - DNA, 269 bp, Glycine max
  Clone ID: 701131806H1
tagaagaggagcaggaggcatcaccattgccacaatggttaaaggtcgccaaggagaacgtgtaagactctacgttcaggggttcaattcttggatacaagaggtccaagtcaaatcaatacccaagcacctccctaatccagattgagaatgtaaactctaaggaagaagttgcgtggtactgtgggaagcgcatggcttacatctacaaagcgaaggtaaagaagaacggaagccactatcgctgcatttggggtaaggtcaccagg

SEQ ID NO: 46161 - DNA, 265 bp, Glycine max
  unsure (1)..(265): unsure at all n locations; Clone ID: 701131807H1
gttgtgtacttgtgttaattgtgttgttgttgtaggaaatttaagtgaagagagaatgatgatgaagtctgctatgtgtgcattggtgcttgtggcactggttgtggttgaagtggggcccatggctgaggctgcggtgantgcaacccaacacagttgactccttgtcttccggcaattaattcaggttctgcaccttcgagtgcttgttgccagaagctgaaggagcaaaagccatgcttctgtggctacctcaaaaacccta

SEQ ID NO: 46162 - DNA, 115 bp, Glycine max
  unsure (1)..(115): unsure at all n locations; Clone ID: 701131809H1
ganaccgttgagttgagtttgagtcccttcgcattcaattattcattcacagtttttncatcttccgaaacctcnaannccccntaaccntggtagaacccaagaaangggcgtg

SEQ ID NO: 46163 - DNA, 265 bp, Glycine max
  unsure (1)..(265): unsure at all n locations; Clone ID: 701131810H1
aaggctcctattactcaattccccaacaaaagtgcgcgcttttcggtcttcgctcaaaagaaggcaaagaaacttcggaagataattttgaaggaagatgtgactgatgtaggaaagcaagggcaacttcttgancgtgagggctggctttttcagaaattacctgcttcccatgggaaaggcacaacttgttactccccagctactcaaggaaatgaagatagaagaggaaagaattgaggctgagaaaagacgggtaaaagaa

SEQ ID NO: 46164 - DNA, 264 bp, Glycine max
  Clone ID: 701131811H1
gggaaggagcaggatgtgtcgttgggagcgaacaagttccccgagagacagccgattgggacggcggcgcagagccaagacgacggcaaggactaccaggagccggcgccggcgccgctggttgacccgacggagtttacgtcatggtcgttttacagagcagggatagcagagtttgtggccacttttctgtttctctacatcaccgtcttaaccgttatgggagtcgccggggctaagtctaagtgtagtaccgttgggatt

SEQ ID NO: 46165 - DNA, 113 bp, Glycine max
  unsure (1)..(113): unsure at all n locations; Clone ID: 701131812H1
atatcatggctatctccatggtgaagcttatgcntttctgctgctctcatattcttgncccttgcaagcanttgtgtcctgtaacaccactgncattttcnanatcnantagg

SEQ ID NO: 46166 - DNA, 199 bp, Glycine max
  Clone ID: 701131813H1
tgtctttgcttcccaggtggtggtgcagacggagggaagagtgtgtgagtcacaaagccacgggttccatggtttgtgtaatagagaccacaactgtgctttggtctgcaggaacgaaggtttctccggtggcaggtgcaaaggcttccgccgccgctgcttttgcaccaggatttgttgagatctcatcaaacactac

SEQ ID NO: 46167 - DNA, 260 bp, Glycine max
  Clone ID: 701131814H1
atcctaggttgtcaaactctagatgtaaacttgtgtagcttccgtagactcaactcatagaattggcttgtaaactctttgtaaagttgtaagagtttacctaatgtgaaaaacaatattaaaaaacttgttaatgacatatgctcaacaagatattaacaccacaataatttaacatttaaacttgataataaagaaaaataacaagctaaaatgataaagtcaggtagtacattagtactaaataagatcaaatacgt

SEQ ID NO: 46168 - DNA, 262 bp, Glycine max
  unsure (1)..(262): unsure at all n locations; Clone ID: 701131815H1
tggaaaagatttgggatcatagcaccggtgacatgggagctgatttttatcatcgatacaagggtgacataaaaatagcgaaagaaattgggctggactntttcagattctctatctcatggtcaagaatattcccaaagggcaagggagcagttaacccccttggggttaaattctacaacaatgtcatcgatgagatcctagcaaatggtttaaaaccttttgtccactctttttcattgggactttccacaagctcttg

SEQ ID NO: 46169 - DNA, 261 bp, Glycine max
  Clone ID: 701131816H1
gtacaggcaacaatggcaataacaaggagattttagcttacttgagtgctgcagaaacatatataggagtaaaaccagctccaatcatagcaggattctcatccaggggtcccagttccgtgcaaccattgatactaaagccagacataactgctcctggtgtgaacgtaattgctgcttttacacaaggagctggtccgtctaatcttccatcggatagacgccgatctcttttcaatgtgcaacaggggaacttctatg

SEQ ID NO: 46170 - DNA, 121 bp, Glycine max
  unsure (1)..(121): unsure at all n locations; Clone ID: 701131817H1
gcgtgngncaatnaaggtgataaacactaaaactgnnaagtattgngactnggnattggccaatgaaacgaagccaatatggatgcgcaatccaaaggaagttgaaaaggaggagtacaat

SEQ ID NO: 46171 - DNA, 263 bp, Glycine max
  unsure (1)..(263): unsure at all n locations; Clone ID: 701131818H1
gaccttcacgtttcggtgaccatgccctccattgaggttggtactgttggaggcggcacacaactcgcatctcagtcagcatgtcttaatttacttggtgtcaagggtgccaataaagaatctcccggtgcaaattcnaggctactggccaccattgtagccggttcagtcctagctggggaactatcactcatgtctgcaattgcagctggacaacttgttaagagccacatgaaatacaacagatctagcagggatatatc

SEQ ID NO: 46172 - DNA, 267 bp, Glycine max
  unsure (1)..(267): unsure at all n locations; Clone ID: 701131819H1
aaaaaaccctgaaaatagtgatgtcggagagtggtaggggacaccacggcgccaccgccgagactggcagaagggaacagttcatgacggagaatgttgccggagactcgtcgtcgtcattgtcatggagactcaacgtgaaggagtttcagttgccacgcttaagnnnnnnnnnnnnnnnnnnnnnnnnnnnnntccctagttacttcactttccgtgaccttctacggaaaccaaagaagcaacgcaaggttgcagaatactaca

SEQ ID NO: 46173 - DNA, 259 bp, Glycine max
  unsure (1)..(259): unsure at all n locations; Clone ID: 701131821H1
ttcctcaatgcngtcgaatngganggcaaatatgtgggaggaacaacaacancaacaacaggggaaacnncgagttgntgnccggcgttggggtacaaggttcgtgcttcngacatggcngacgtgnccacagaagctggagcagttggagatggtcatgggttgtgcccaggaagagggaatttcccacctcgcctccgacaccgtccactacgatcccacggatctttattcctgggtccaaaccatgttaaccgaa

SEQ ID NO: 46174 - DNA, 145 bp, Glycine max
  Clone ID: 701131822H1
gggaaccggtgttgttaccctgttaggagcattaagcttttttttgttgtctcttctgtgtaggggatggagtttttggattattatatacttgctgatgtactcggctctttgttgattctgattgcagacatttttgccctcc

SEQ ID NO: 46175 - DNA, 270 bp, Glycine max
  unsure (1)..(270): unsure at all n locations; Clone ID: 701131824H1
atcgaagacgaagatggaggacgcatcagcatcaaagttcattccacaccaaattcggaggnngtccaaaacgacgcgctttcgattcggtctccatggagtcaagagcgacatcgttggttctcaccctcttcaatcttcactccaatctacaaggagaatgnntgaagcgatgaagaggcaatgcaaagttaacctgtacggaactgcttttcccatgaaggaggagcttgacaggcaaatcctgtccaggttccagcggcctcctgg

SEQ ID NO: 46176 - DNA, 265 bp, Glycine max
  unsure (1)..(265): unsure at all n locations; Clone ID: 701131825H1
ctcaaagtccagctgcactggaatgtcatcatcgctgctgaaaatctgcaaccggaaggtctgatgcttcatagggcaatcattgtccgccttctgagtgactttgctgtgaagaaggccaccaaagatctgggatactttcttgcagtgaccacactggagaaaataggggaaggaaaggtcagacaacatactggggatgtgctcttccctgtggtttttaatgccatcaccttcaagtttttcaagggtgagatantagagg

SEQ ID NO: 46177 - DNA, 83 bp, Glycine max
  unsure (1)..(83): unsure at all n locations; Clone ID: 701131827H1
tttttccttctggctttccaatcttccttctcacacacctgtgnctgncaaactcttnccaatgtcttccacaanacntaaga

SEQ ID NO: 46178 - DNA, 263 bp, Glycine max
  Clone ID: 701131828H1
aagccaaggaatcttcccaagtcacgattgaggcaaatacagtttatggtgcattgcgcggattagagacattcagccagttgtgttctttcgattatacaactaaaacagtaaaaatatacaaggcaccttggtccatccaagataaacctagatttgcatatcgtgggcttatgctggatacatcaaggcactatttacctattgatgtaattaagcagattattgaatctatgtcctatgctaaacttaatgttctacat

SEQ ID NO: 46179 - DNA, 78 bp, Glycine max
  unsure (1)..(78): unsure at all n locations; Clone ID: 701131830H1
tgagagtgagcataattaatggcncaccaaggcattcactaatgtcttctccttccancacaacattancggncaggc

SEQ ID NO: 46180 - DNA, 112 bp, Glycine max
  unsure (1)..(112): unsure at all n locations; Clone ID: 701131831H1
aaaataaataataaaganaacaaaacatagtagaaggaaacgcgncaatcgcaatcatcaaaaaatccatcatntttncaattgncatttgctcctgctctttctcacaatg

SEQ ID NO: 46181 - DNA, 266 bp, Glycine max
  unsure (1)..(266): unsure at all n locations; Clone ID: 701131834H1
cttgtacgctaggaaggcggacatcatcttnagaggatactctggttggaattcaaggcgnnccctttcaggttttncgatgaaattttccccaaggatgcttatgtgcaaccatcattggnaattgtgtattttggtggcaatgattctattgatcctcacccatctggcctnggtcctcatgtaccccttgaagaatatgttgaaaacatgaggaaaattgctaatcatcttaagagcctctcggaccatattcgcattatatt

SEQ ID NO: 46182 - DNA, 264 bp, Glycine max
  unsure (1)..(264): unsure at all n locations; Clone ID: 701131835H1
gggttttcactttttcagaaaagtcgaacggcgagcgtagtcgcaaganacgcaacagaatagaacgacgaataggcgtgcagggaaaccatttcattttcgagcgcgtcgctttcgaatccaatggccttcaacaacgcactgagatctgccgcgaagtcgtcgcttcttccgaatcttccttctctaactcagtgagcagaggttttcattcaactggcatgaagaggatgggaggtggacatggtcatgatgagccctact

SEQ ID NO: 46183 - DNA, 266 bp, Glycine max
  unsure (1)..(266): unsure at all n locations; Clone ID: 701131837H1
atgaaggtccttgttttcttcgttgctacaattttngtagcatggcaatgccatgcgtacgatatgttccctnctccgaatgaacactggctatggtgcccgtactccggaggtgaaatgcgcaacttggaggcttgctgtggaagcacacaacatctttggctttgagaccattcctgaagagtgcgttgaagcaacaaaggaatacatccatggcgaacaatatagatcagactccaaaacagttaaccaacaagcttactttt

SEQ ID NO: 46184 - DNA, 263 bp, Glycine max
  unsure (1)..(263): unsure at all n locations; Clone ID: 701131840H1
gagagaagcgtcttaataaacgctcttctctgaatcacctgatttcttctcttcttctcttctctttcgtttcgatcttcgatctctgaaaatgagagagtgcatttcaatccacatcggtcaggccggtattcaggtcggaaacgcctgctgggagcnctactgcctcgaacacggcattcagcctgatgggcagatgccanctgataagactgttggtngaggtgatgatgctttcaacaccttcttcagtgaaactgggg

SEQ ID NO: 46185 - DNA, 263 bp, Glycine max
  unsure (1)..(263): unsure at all n locations; Clone ID: 701131841H1
angnnttnnntcgcatcggatctncactcncttctcngntctnannatgcccgtcgtttatgnagctcgnttnacnancntcgaagacnccgnganggagagtgnatanggttacgttcgcaaggtatnaggaccagtcgtcgttgcagatggcatggctggggctgctatgtatgaactcgtgcgtgttggtcatganaatctcattggtgaaattattcgtctcgaagggaattctgctaccatccaagtttatgaggaaa

SEQ ID NO: 46186 - DNA, 262 bp, Glycine max
  unsure (1)..(262): unsure at all n locations; Clone ID: 701131843H1
gtcttttgggatatgaagaatcgtcttnctcgangcntcacaacattngagtgggataanngttttgtttctgtttacagcaaggataatccnnacttgctttttagcatntgtggatttgaagtnnggatacttcctaaaattagaatgactcaagaagcattcagtaacacaagagatggtgtctggaatctccagaatgaacagacganaganaggacagctgttgcttnccnacgagttgatgatggccacatgaaag

SEQ ID NO: 46187 - DNA, 258 bp, Glycine max
  unsure (1)..(258): unsure at all n locations; Clone ID: 701131846H1
gttcgcttgcagtcacacaagaggccaatcctattcatagctcgagatgggtgaagaagtgaaggtagttgttccagaatcagtgttgaagaagcgcaagagggaggaggaatgggcgttggccaagaagcaagaactcgatgctgccaagaagaagagagccgagagccgcaanctcatctacaacagagctaagcagtacgctaaggagtacgatcaccnngagaaggattgattcggttgaaacgcgaggccaag

SEQ ID NO: 46188 - DNA, 258 bp, Glycine max
  Clone ID: 701131847H1
ctttttcacagccttcgaagtcaaagattctggctgagcagtcctaagtaagtccattgtagaagtcatggttctagagtccattttgtcgtcttcgacgtcaccatctttcaggaggcagtttgcaaagcatgaactgggcagttggtcgacactcttgaagaggcaccgcttcctcttatttgctcttgctctactaactgtcctctgtaccatttatctatattttgcagttacatttgcagccaatgactcctg

SEQ ID NO: 46189 - DNA, 257 bp, Glycine max
  Clone ID: 701131848H1
ctggtcatcgttgggatctccatacgccggatctgctaaaatacgcttgatccatatgggcctcctcgaccacttgtgggacgacaccgtcgccggcccaaggccggaaaacggtctcggcaagctccgaaaacaccacaccttcactttccgacctagctccggcaaggaaacggagggcgggagcgtgagatcgtacggagacgaatcgtcggaggaagcgacgagagtgacgcgtagtatcatgatcgtgaaac

SEQ ID NO: 46190 - DNA, 264 bp, Glycine max
  unsure (1)..(264): unsure at all n locations; Clone ID: 701131850H1
caaccaccggccatactcactgttgttctcaagggattcgattctctctgcactcacttctagggttttctctgcgctataagcaatcatggcggatgaaacaccaaatgagatgaaggaggaggttccagaaattgttccttttgatcctaccnnnnnnnnnnnnnnnnnnnnnnttacaattgtagatcctgctgatgaacctgtggagaaattggctgagaagacagaaaacctctcagtttccgagggggttgagactgc

SEQ ID NO: 46191 - DNA, 255 bp, Glycine max
  unsure (1)..(255): unsure at all n locations; Clone ID: 701131851H1
ttgattgcaaccaccgacgtggagcttctgaagagancgtggcgcaacgagaaggcggccccagagattctccgctacgaatctaaattggtttcccgcgtcaacaaagtcattcaactcatggaagaaattgtggaggaaaaatccagtggcggtactgatcctctttcggtgtctctatatcagatggacttggatagaactctctttttgttaagatcctatctcaggattcgcatccagaagattgaaaag

SEQ ID NO: 46192 - DNA, 243 bp, Glycine max
  unsure (1)..(243): unsure at all n locations; Clone ID: 701131856H1
tgaaagtgcttgtnttgtttgttgctacagttttggtagcactatgaatgccatggctcaganctaccagaagttccctctccaaatgaaaactgggtttggtgggcaatacagcaatgaggtggcatgtgccagttggaggctggcgtggaagcaaacaacgtagttcaagtggcaaactgttcctgcagcttgcggagagtacatagctgactacgttctaggagaccaatatagatcaga

SEQ ID NO: 46193 - DNA, 261 bp, Glycine max
  Clone ID: 701131857H1
aacgtacctagttgttggtctttatatttagttattgacatcaacaaagtcatggaggaagttaatgtggttcaaaccaagaatggaactgtttcagtagcttctgcgtttgctggccataaggaagctatacagcaaagggaccacaaatttttaagaattgctgttgaagaagcgtataaaggggtagactgtgaagatgggggtccctttggtgctattatagtttgtaatgatgaaattgttgctagatgtcacaac

SEQ ID NO: 46194 - DNA, 264 bp, Glycine max
  unsure (1)..(264): unsure at all n locations; Clone ID: 701131859H1
acttgatctcatcataatcgtcagcgtcaattgaagaagatgccgatcagaaacatcgccgtcggaaggcctgaagaggcgactcaccccgacacgttgaaggcggctttggctgagttcatctcaaccttcatcttcgtgttcgccggctcaggctccggcatcgcctacaacaagctncaccgacaacggcgctgccacccctgccggccttcatctccgcctccatcgcccatgcattcgccctcttcgtcgccgtctccg

SEQ ID NO: 46195 - DNA, 256 bp, Glycine max
  Clone ID: 701131860H1
gccggcgatgcgctcctgtccttaactggccgggtcgtgcctccggtgctgttactttgaagaaattagagtgctcaaagcaagcctacgctctgtatacattagcatgggataacaccacaggattctgatcctattgtgttggccttcgggatcggagtaatgattaacagggacagtcgggggcattcgtatttcatagtcaacttagtggtaagaatgttgttaccgtgggcaatacgataacatcatgatt

SEQ ID NO: 46196 - DNA, 259 bp, Glycine max
  unsure (1)..(259): unsure at all n locations; Clone ID: 701131861H1
gtggtctgcaactatgagcaaggattatctaatcatactttctctctttctttccacggtgcttgcaanttaccagnnnnnnnnnnnnnnnnnnnnncctctatcttgggaagggctctcccatcgcaaattgtctcccagttatcacattcacaaaaccattgacgaatcctatgcagttatcttcgatgctggtagcacgggaagccgtgtacatgtctatcgttttaaccaacaattagatctccttcgcattggc

SEQ ID NO: 46197 - DNA, 256 bp, Glycine max
  unsure (1)..(256): unsure at all n locations; Clone ID: 701131862H1
agcaccacatgctggttattcctattcaggaagagctgctgcttatgccttcggaaacattgatccatcaaatattacacgtgtgtnccttcttggtccttctcaccactattacactccaaaatgtgctcttacgactgcaactgtctacaagacacccataggggacctgcctattgatttggaagtaactgaggagctaaagctacggggaaatttgagctgatggatattcgtgttgatgaagctgaacata

SEQ ID NO: 46198 - DNA, 115 bp, Glycine max
  unsure (1)..(115): unsure at all n locations; Clone ID: 701131863H1
agaagtttgattgtggacttgagcaaaataatactcgcctttcaanattgcatgaatctcatgagagtcatatgcttgnagagccagaccgacacacatgaacactgtgctncaa

SEQ ID NO: 46199 - DNA, 263 bp, Glycine max
  Clone ID: 701131865H1
ctagggtttggaggctatgccgaaaacgggttaaataagctcggaaaatgattctcacaaagcagtaccgatgcatacactcagctagttgtcaatgtactaaagggcatttaagtgaagatatgatattcttagtatttcataatttgaattggaatcccaagctaattgcaactctatcatgtgtgtgcaaatggtttgatgatcttgccaagcgagttctatggaaagagttttgtcgaacaagagctccgaaaatgttg

SEQ ID NO: 46200 - DNA, 261 bp, Glycine max
  unsure (1)..(261): unsure at all n locations; Clone ID: 701131866H1
aaaaaactcaaanaccttcaagaacttgtatctttctttgttagtatttgttactacaattttacattcttttcatctctacatatttcattagtcatggcacctcaagcagtttccttcaagtccttcgccgttgctcttattgtggcgcttttcttctccgcctccgctctggacttagtttcggggcagtcgccggtnccggcgccggcgccggcaccagatgccggagcagctggatccgtgtcgagctcggtcgcc

SEQ ID NO: 46201 - DNA, 262 bp, Glycine max
  unsure (1)..(262): unsure at all n locations; Clone ID: 701131869H1
cttctcttccngcaaattcaaaacccaatctcaatcttttcctttcgttccatttccttcatttganatngancacacccacgcagatcccaaatttccaactcgtaaattatccgccttttttcccattccgaggaaagaancccaatccacgaccgatccaatgccgctttgaatcgcgtgccgtcctccttccctgggaacatctttttgctttttgaatcgatatttggagcagttgggtcgatgagtaacatgtgac

SEQ ID NO: 46202 - DNA, 76 bp, Glycine max
  Clone ID: 701131870H1
ccaaattcatttgcatatacaatcggttggatcattgccactttctttcaatccattcccaattcccacacaacat

SEQ ID NO: 46203 - DNA, 260 bp, Glycine max
  unsure (1)..(260): unsure at all n locations; Clone ID: 701131871H1
cgaatatcttgttgtttggagcgatccgagaaaaactctgtaaacatgttggtttaccaggacctccttacaggtgatgagcttctctctgactcnttccgttacaaggaaattgagaatggaatgctgtgggaagttgaggggaagtgggttgttaaaggagcagttgatgtagacattggtgcaaacccttctgctgagggtggaggagaagatgagggagttgatgatgcagctgttaaggttgttgacattgttga

SEQ ID NO: 46204 - DNA, 150 bp, Glycine max
  unsure (1)..(150): unsure at all n locations; Clone ID: 701131872H1
ccagccacntgttcaacgccgcgggtgtcacgggtagacccaatgtggactggtgcgaatctcacaaagttgaaaccatccgaaccaacgtcgtcggcactctcaccctcgccgacgtctgccatcataaaggcctcatcctcatcaact

SEQ ID NO: 46205 - DNA, 259 bp, Glycine max
  Clone ID: 701131873H1
cgcaacggaacaatgtcaggacctgagtgttgctcaaactcaccagttctgaacccgaatgcaggagctggccacgttgaaaaactcgctgctctcgattcctatctctctggttcccctaattccattgccattcttctcgtctccgacgtttttggatatgaagcaccaaatttaaggaacattgcagacaaggttgcagctgctgggtattatgtggttgttcctgactttttctatggtgatccctataatcctg

SEQ ID NO: 46206 - DNA, 258 bp, Glycine max
  unsure (1)..(258): unsure at all n locations; Clone ID: 701131874H1
tagtcatgatcctcctattgtnttggctaaagtagatgccaatgaggagaagaacaaagaccttgcatcacaatatgatgttaagggattcccaacaattaatattctgagaaatgggggaaagaatgttcaggaatacaaaggtccccgtgaagcagatggcatcgttgactatttgaagaaacaaagtggtcctgcttcaactgaaattaaatctgctgatgaagctactgcttttattggtgaaaataaagttgc

SEQ ID NO: 46207 - DNA, 261 bp, Glycine max
  unsure (1)..(261): unsure at all n locations; Clone ID: 701131875H1
aaaagaagcaccgagcgaanccagccaggttgtcttccgattccttcgtgcgtgcgattcttctgatattccaaggcgacgcanccgacaccggacccatctccggcgacatctcaccgatctccggcgaatccccggtccccactttcttccctcgaaatgaatcccgagtatgattatctgttcaagctccttcttattggagactctggtgttggtaaatcatgccttcttctgagattgctgatgattcgtacatcg

SEQ ID NO: 46208 - DNA, 258 bp, Glycine max
  unsure (1)..(258): unsure at all n locations; Clone ID: 701131876H1
gatngcttcttcagatgttgagtaccgttgctttgtcggtgggctcgcttgggccactgacgaccaagctctcgagagagccttctctcagtacggcgaaatcgttgaaacgaagattatcaacgatcgtgagactggaagatccaggggttttggatttgtgaccttcgcctcggagcagtccatgaaagacgccatcgaagggatgaacggccaaaaccttgacggccgtaacatcactgttaacgaagctcagtc

SEQ ID NO: 46209 - DNA, 255 bp, Glycine max
  unsure (1)..(255): unsure at all n locations; Clone ID: 701131878H1
ggaagttggtgtgtgtcaccggtgctgccggttatattgcttcatggattgtcaagttcctacttgaacgtggttacactgtcncggccactgttcgaaacccaaatgatcacacgaaggtagaacatttgctaaaacttgaaggtgcaaaggagagactgcacctttttaaggcagatcttttgggtgaaaattcttttgactccattgttgagggctgtgatggcgtctttcatactgcttctccttttatta

SEQ ID NO: 46210 - DNA, 254 bp, Glycine max
  unsure (1)..(254): unsure at all n locations; Clone ID: 701131880H1
cgcaccagtttcaccgcacgaatatcttgttgtttggagcgatccgagaaaaactctgtaaacatgttggtttaccaggacctccttacaggtgatgagcttctctctgactccttccgttacaaggaaattgagaatggaatgctgtgggaagttgaggggaagtgggttgttaaaggagcagttgangtagacattggtgcaaacccttctgctgagggtggaggagaagatgagggagttgatgatgcagc

SEQ ID NO: 46211 - DNA, 259 bp, Glycine max
  Clone ID: 701131881H1
gtcacttgtgtccctcataatgactggtggttacttgcatggaattatgcgtagtgcgcactaagtaacgaaggtgggattgtaggatagcatcctgtaaacttcgctgaatgcaatctcctcctactgttatgaagcttgtgtttttgtctttggacccatggtgcttatgttggtcatacatgtagactttcgttgttaaataaggacaccatcggattgcgttcgaccactgtttacaggcatattgttagttgtt

SEQ ID NO: 46212 - DNA, 260 bp, Glycine max
  unsure (1)..(260): unsure at all n locations; Clone ID: 701131883H1
tcacccacgtctctctcccgcttcagatcgtaaacgtctcgctgttccaagatgggtgtggctgagaacattcccgatatggaggngggtaccttggagattggaatggaatacagaactgtatctggagttgctggaccattggtcattcttgacaaagttaagggacccaaatttcaagagattgttaatattcgtttaggagatggaactactcggcgtggacaagttctagaggttgatggcgaaaaggctgttgt

SEQ ID NO: 46213 - DNA, 262 bp, Glycine max
  Clone ID: 701131884H1
cttcaacctaacgcagcatcgctatactcttcattccatggctttgcccaatcagcaaaccgtggattaccctagtttcaaactcgttatcgtcggtgatggtggcacaggaaagacaacctttgtgaaaaggcatctcaccggagaattcgagaagaaatatgagccaaccatcggtgtggaggttcacccattggattttttcacaaactgtggaaagattcgattctactgctgggatactgctggacaggagaagttt

SEQ ID NO: 46214 - DNA, 232 bp, Glycine max
  unsure (1)..(232): unsure at all n locations; Clone ID: 701131885H1
gagaaagaaaagaatggcaaagttaataaaattctttgagncgaacacaggggccaagattccttctgttgggttaggcacttggcaagctgagcctggtgttgtagccaaagctgtcaccacagccattctggttggatacaggcatattgattgtgctcaagcgtataacaatcaagcagagattggttctgctcttaagaagcttttgatgatggtgtggtgaagcgtg

SEQ ID NO: 46215 - DNA, 263 bp, Glycine max
  unsure (1)..(263): unsure at all n locations; Clone ID: 701131886H1
gagaaatggagcttcaagaccatgatttcttggaggaattaatgtctctaagaagagaaacatgggataccaatccatgttcacaagaaaaccagcttttctctaatggctggagttttgattgttttgaggatcaanactatcatcaagcttttcctccaaactctttctcttgccaacaagttcctcaaagttacaataacaaaggctacaactacaatgaaatttatagttccttactacatgaattctctgcaccccaa

SEQ ID NO: 46216 - DNA, 260 bp, Glycine max
  unsure (1)..(260): unsure at all n locations; Clone ID: 701131887H1
ccagaccctccgaactttaagaaatacggcgtncctttctactccgttgcgtggattccccaacacgttgtcaaatcgcgccaaatcgaaaccgccgatgagtcctcggactccgatcacagcacttcgccggcgaccgaggcggagaaggaacccgcgacggtcgccggtaactacctgctgttcgccggcggngcggagcaggccacagcggtatccccaatgctttggttattgcgcacttcgatgtcgcgtcgaat

SEQ ID NO: 46217 - DNA, 208 bp, Glycine max
  Clone ID: 701131888H1
tagtgcctccttgccagaagttaaaatggcccaagaaactttcctattcacatctgaatcagtgaacgaggggcaccctgacaagctctgtgaccagatctccgatgctgtgctcgatgcatgcttggagcaggaccctgacagcaaggttgcctgtgaaacctgcaccaagaccaacatggtgatggttttcggagagatcacaacc

SEQ ID NO: 46218 - DNA, 113 bp, Glycine max
  unsure (1)..(113): unsure at all n locations; Clone ID: 701131889H1
atgggttctttagcattgcaaacnatttagtnctcaaaagggtgttgtttcanatcnctaggtttcnntanattnntncacatcncaacaatttatnaancaggtgaagcata

SEQ ID NO: 46219 - DNA, 261 bp, Glycine max
  Clone ID: 701131891H1
cttggtgatgtccctttctgttctcttcactcttggtcttgcgagagaaagccatgccagagacgaagatttttggcatgctgtttggccaaacactcccattccaagttcattgcgagatcttctaaagcctggccctgcaagtgttgaaatcgatgatcaccctatgcaaattgaagaaacacagtacccgaaaaccttcttctataaagaagaccttcatccaggcaaaacaatgaaagtacaattcagcaagcctcc

SEQ ID NO: 46220 - DNA, 255 bp, Glycine max
  Clone ID: 701131892H1
tggtttgcaaggatggggaacacgttctgcttcttctgtggttgcgttgctcaatccagcgtcggcgtggtcgagcagtggggtcgcttccaccgcctcgcccaaccgggcttccactttttcaaccctctcgccggcgaatgcctctccggtatcctctccaccaggatctcctccctcgacgtccgcatcgaaaccaaaaccaaggacaatgtttttgtgcagttgctgtgttcgattcaataccgagtgata

SEQ ID NO: 46221 - DNA, 255 bp, Glycine max
  Clone ID: 701131893H1
aaacagagcatctctctgttctctgttctgttctgattctctctctttctgactttctctttctctcccccctcatatattcctcttttcttcagaaggaccacttcactttcagaaacccagtttcgcatctgggtttttgtttgttgaagtgccaattttgaagattaaaataaaataactatgacttggaaaagcagaggagaattgcctctagaagcgttatctcgcagagatgggcactgtttctctgct

SEQ ID NO: 46222 - DNA, 255 bp, Glycine max
  unsure (1)..(255): unsure at all n locations; Clone ID: 701131895H1
acatcgtcaacttcgtacactccaacatctccaagaacagccgacaancctatgcagtcagccgccgcgctggccaccagacttccgccgagtcctggggaaccggtcgtgccgtctcccgtatcccccgtgttcccggcggcggaacccatcgcgccggccagggagccttcggaaacatgtgtcgtggaggacgcatgtttgccccgaccaagatctggcgccgctggcacaggaaaatcaatgtgaaccaga

SEQ ID NO: 46223 - DNA, 275 bp, Glycine max
  unsure (1)..(275): unsure at all n locations; Clone ID: 701131901H1
ccatgctgtaattggccctttggaagacaataccgtgtacttctaccgatgtggtggaaaaggtcccgagttcgagctcaaaactcctccagctcaatttccaattacttttgctgtggctggggatctgggtcaaactggttggactaaatcaacactggcacatatagaccaatgtaaatatgatgtctacctgctaccaggagacctttcatatgctgattgtatgcagcatctgtgggacaatttgggaaactgtggagccgcttgcnagt

SEQ ID NO: 46224 - DNA, 257 bp, Glycine max
  Clone ID: 701131902H1
gcaacaacaggtggtccatggcttaccttgcgctctgctttacccctctcattctccttctgactcctcttcattgcgcttccctgtattgccatcttcctcttcatccaagctccgaatttctcgaaccaaacccaaatcccttctcacccctttcaccggtctggttcctcttaaccccctcttcctctcctctccttcttcagaatatgccggctctgatcactcttttaccattattgacaatggtggtcgag

SEQ ID NO: 46225 - DNA, 275 bp, Glycine max
  unsure (1)..(275): unsure at all n locations; Clone ID: 701131903H1
aagaaaataacaacatgctanaagagcaaagacactcagtagaagggggatctatcatctgaattttgttccttcaagcattaaganannagagatatctcgaccaacctaggttactggaaaccgattattagtatcgaattttcttcaactttggccctcttactaatccaccaggatttagacactgcttttgtggatagcagagacaatgttgtctcagaagcaaggagaggacgcaataatcacaaacctcaaccacacagaacatgaag

SEQ ID NO: 46226 - DNA, 272 bp, Glycine max
  unsure (1)..(272): unsure at all n locations; Clone ID: 701131905H1
gagcagaggggctaaacagagaacagtacgtgtaccttgcgaacntgttcggagcaggcggagcggtacgaagagatggtggagttcatgcagaaggtggtggtggggtggacgccggcgtcggagctcacggtggaggagcgcaacctcctctcggtggcctacaagaacgtgatcgggtctctgcgtgccgcgtggcgcatcgtgtcctccatcgaacagaaggaggaagggcgcaagaacgacgaccacgtgtccctcgtgaagcacta

SEQ ID NO: 46227 - DNA, 272 bp, Glycine max
  Clone ID: 701131907H1
tccatttccatttcctctctctcagtttccaagaatcttaagctatgggaaagtcttacccaaccgtgagcgctgattaccagaaggccgttgagaaggcgaagaagaagctcagaggcttcatcgctgagaagagatgcgctcctctaatgctccgtttggcatggcactctgctggaacttacgacgtgagctacgaagaccggtggtcccttcggaaccataaagcacccctccgaactcgctcacggcgctaacaacggtcttgacat

SEQ ID NO: 46228 - DNA, 128 bp, Glycine max
  unsure (1)..(128): unsure at all n locations; Clone ID: 701131908H1
aaagtgcttctctcctctgtcttnttctctctcttgctatccttttggctagtggnactgctgncaagtgcaactnccaagaagcgcngtgccaagccaccatgtntcaacattcaacagaagccttt

SEQ ID NO: 46229 - DNA, 272 bp, Glycine max
  unsure (1)..(272): unsure at all n locations; Clone ID: 701131909H1
gcctcaccacacagattctgtgatataccaatggaggccctcaatgctgctggcttgacccctctatctgtgctctctgatagaacaaaaacaagaactaaacacccttctgtttctgcatgcaaagtctcaaacttttccacctccaccaacaagcaacaancattgctgcaaagttgcatatcaaaaactttgcatgggggggctgattcttgcagcttcggctgttaatggtggagctgccacagccttaacgtacgatgaggcatggg

SEQ ID NO: 46230 - DNA, 269 bp, Glycine max
  unsure (1)..(269): unsure at all n locations; Clone ID: 701131910H1
cgaaaccccgatagcactttcctnctcttttccgaatccgaggagtggcagtagtgtgtggtttttcacantcattacctcgtttcagctcaattttgttaattgggcttccattcattaaagtttacaagtttgcggctttcaaacgattatatggggagttgtgtgtctaagaatcatgctaaggataatgattctgatcatgatgtggattttgctgctgggaatgtgaaacttattaccaccaaagaagcgtgggaccaatcttt

SEQ ID NO: 46231 - DNA, 272 bp, Glycine max
  Clone ID: 701131913H1
aagtggtgatcaatatgtcaaagaatccaaaagttttctttgatattctaattggaaagatgaaagctggacgagtagtgatggagttgtttgccgatgcaaccccaaaaacagctgaaaacttcagggctctctgcactggggaaaaggggattggacgatctgggaaacctttacactacaaaggttctgtatttcatcgtattattccagaatttatgtgtcagggaggagatttcacaagagggaatgggaccgggggtgagtcaatc

SEQ ID NO: 46232 - DNA, 276 bp, Glycine max
  unsure (1)..(276): unsure at all n locations; Clone ID: 701131914H1
ctatngtgctcttctctctcaattacacttttattccaacanctcatcagattgtgcatttcttggagtgtgcaaaccccaacacccccattgccaatccctccctctcccaacatattcccagttgaaatggcaacaaagggagatcataatgttttnccatttnngtntgaacacattcagtnacagacaatggngcactggncaggttanttcagcaatcttnantccaacggggctcannancacccagtgggccactgtggcagcagatgc

SEQ ID NO: 46233 - DNA, 277 bp, Glycine max
  Clone ID: 701131915H1
gctcacatcgtgttctctgcggcgcgagctagctagggtttagaacctcgcagttacagaaaacatggcgactgtggtgccaacctccgaagaagacgctgcactctccgtcgttcgattcgcctctgaacttgcctgggccgatgccggtcccgaggttgctgagccccaagttagcagactctgcgtggaggctgaagaattcattgttatgggaaagtggttggagctagcatcattgatgattacctctgctgaattgattttctcgaaggtt

SEQ ID NO: 46234 - DNA, 281 bp, Glycine max
  unsure (1)..(281): unsure at all n locations; Clone ID: 701131916H1
ggagtttggttttataggaaccctcctattcatccatttatcgatccacgtccatccccatctttcttctcctattctctctgttttcttttcttcttctaaaaagtgagagaagaaaaaagggaattgaaggaagaagattgagaaaaaagggggaatgcccagataattaattcggtgaaatttcggattttcgtaagtgggtgtttctcttttcncgtttttaccttcagtggtggaaggaagggggtttngtttggtgagttgntggacttgatgac

SEQ ID NO: 46235 - DNA, 267 bp, Glycine max
  Clone ID: 701131917H1
agcttttgtcatgaattcacgtacactaacaattttatgtgcttttcagttcaatgatataatcaatgtcccattccaatcaaaagcatttgttgcgggttgtgtggcatatttcttggacaacacactacacaagaaggaagctgctattaggaaagatagaggaaaacattggtgggacaagtaccgttccttcaagactgacacaagaagtgaagagttttattcactgcctttcaacctaaataaatacttcccatctgtgta

SEQ ID NO: 46236 - DNA, 276 bp, Glycine max
  unsure (1)..(276): unsure at all n locations; Clone ID: 701131918H1
tgcagttccaccanatgcaacattaccagattactacttgaattagtttcatggaaaactgtttcagaagtaactgatgacaagaaggtcataaagaagatcctcaaggaaggggaaggatatgagcgtccaaatgagggggccattgttaaagtgaaactaattggtaagctacaagatggtaccgcttttttgaaaaagggccatgatgaagaagagaagctgtttgaattcaaaacagatgaggaacaagttgttgatggacttganagagct

SEQ ID NO: 46237 - DNA, 272 bp, Glycine max
  Clone ID: 701131919H1
gggtcggatacctggttcgttatccgcatccaagttcatggggcatttggatctgagctacaaccacttatgtggaaccatcccaattgggtctccgtttgaacaccttgatgcggcgtcgtttagtaacaatgattgtttgtgtggaaaccccttgaaggcttgttgatgggtgacccgaataagtacgtattgggttgttgtcggtgaatattccaagatataatgatttggttatagtgaaggagcccaagtgtgattttaattttatg

SEQ ID NO: 46238 - DNA, 271 bp, Glycine max
  unsure (1)..(271): unsure at all n locations; Clone ID: 701131920H1
ctggaacagagattgcgtttgtttcgcgaattgtgaagccgctggtgaaatagcaccanatatgaggggaagaagctgcagttacagcccatcaccttcacctccaaggcgttacagccgaagaaggcacagccttagccctaggggccgatatagaggatgtgatagggatttgccaacaagtcttctggttcgaaacctcaacagagattgcaggccagaagatctgcatggtccatttggccaatttggtcctcttaaggatgtttac

SEQ ID NO: 46239 - DNA, 253 bp, Glycine max
  Clone ID: 701131921H1
aaccataatagtcatgggtttgaaggaggattttgagcggtatgctgagaaagcaaagactttgccaccgactcaatcaaacgaagacttgcttatcctttatggattgtacaaacaggccaccgttggacctgtcaacaccagccgtcctggaatgttcaacatgagggacagagctaaatgggatgcatggaaggctgttgaagggaaatccaaggacgaagcaatgggtgattacatcattaaggtgaaa

SEQ ID NO: 46240 - DNA, 269 bp, Glycine max
  Clone ID: 701131922H1
aaattgacagtattggcacttcagttgcttgttgacaatatggtgcgttatgaatcagatttcattaacagatttaaacctatttaaggacatcttatacatgttcttatcattgacgattaacttttaggtttggaagaaagtggtatatgttgatagactactacagctctttagatacataccccgtgaacaattgaccatcccagatttcgtctttcagttgagtctatgttttcatgttataatcatttgttccttttcataat

SEQ ID NO: 46241 - DNA, 272 bp, Glycine max
  unsure (1)..(272): unsure at all n locations; Clone ID: 701131925H1
tacctttctctctactatcttgtgtnctgttgtgtgtgtggnggttcagttcagcctttgnttccgatggatcttcacggaaacccccacaattctgggatgaaganacgaaagccggagcaggatactttgatcagtgatcatggaaattctgtgagtgtgggagagtcatctgggagtggtgatctctgcaagagttctacctcangatcactgaattcaaacaatcaaaatggttccaattctgnatatttcatgtcatgatgatgagg

SEQ ID NO: 46242 - DNA, 272 bp, Glycine max
  Clone ID: 701131926H1
cttgatctcatcataatcgtcagcgtcaattgaagaagatgccgattcagaaacatcgccgtcggaaggcctgaagaggcgactcaccccgacacgttgaaggcggctttggctgagttcatctcaaccttcatcttcgtgttcgccggctcaggctccggcatcgcctacaacaagctcaccgacaacggcgctgccacccctgccggcctcatctccgcctccatcgcccatgcattcgccctcttcgtcgccgtctccgtcggcgccaa

SEQ ID NO: 46243 - DNA, 205 bp, Glycine max
  Clone ID: 701131927H1
tagtgcctcctttcccagaagttaaaatggcccaagaaactttcctattcacatctgaatcagtgaacgaggggcaccctgacaagctctgtgaccagatctccgatgctgtgctcgatgcatgcttggagcaggaccctgacagcaaggttgcctgtgaaacctgcaccaagaccaacatggtgatggttttcggagagatcac

SEQ ID NO: 46244 - DNA, 276 bp, Glycine max
  Clone ID: 701131929H1
aggacatcaacctcagctctcgaacccctctgctcttgctgttatgtttcaccacttctcaccgaggctgtatggttaaccatccccagcaagggaaccaagtgcatgtccgaggaaatccagacacacgttgtcgttttagcagattactatgttgtagccgatgatgtccagggtcaccaacttcaaactatttccgccaaggtgacatccccttatggaaataatcttcaccagaatgaaaatgttacccacggtcagtttgcatttacaact

SEQ ID NO: 46245 - DNA, 279 bp, Glycine max
  unsure (1)..(279): unsure at all n locations; Clone ID: 701131930H1
ccccaacaacctaatcccgtccctcccagacgacgtcgcattgaactgcctaggacgcatccctcggtcccagcacccaaccctctcctcggtctccaaacccatccgcaccctcctctcttccccaatcctcttcaccacgcgaaccctcctccaatgcacccaacccctcctctacctcactctccgctcacgccactcctctctcctccaattcttcacgctccaccgcacaaaccctaatngncccctcctcgctccccttcccccgatanncct

SEQ ID NO: 46246 - DNA, 280 bp, Glycine max
  unsure (1)..(280): unsure at all n locations; Clone ID: 701131931H1
ggcagcatggcggttaagcagggtggagctgcagttggagtctgagaaggctgggcgaaggagggagaagatggaggaaatcgaagcgaaaatcaaagctctgagggaggagcaantcggctgcattggatagaattgaagcagaatatagggagcagttggcagggctgagaagagatgctgaaagcaaggagcaaaagttggctgaacaatgggctgcaaaacacttgcgacttactaagtttctagaacaggtagggtgcagatcaaggctcactga

SEQ ID NO: 46247 - DNA, 277 bp, Glycine max
  unsure (1)..(277): unsure at all n locations; Clone ID: 701131933H1
anccctcttaataccaattntctagggtttatacaattttcgatggcttcttcagatgttgagtacccgttggctttgtcggtgggctcgcttggnccactgacgacnaagctctcgagagagccttctctcagtacggcgaaatcgttgaaacgaaggtctgtttgttgcaggcatcacatctgatctcacacgattcggattcggaattnnctcgatccctttctgatctgtgatctctgatctgtttgcgtnacttgatcttatgatacttgtg

SEQ ID NO: 46248 - DNA, 273 bp, Glycine max
  Clone ID: 701131934H1
tgaagatacttcattggaaagtgggaaggatctcaagattgactacaacctgaggacaaggtcgttttggatggccgcgggaatgttgtgattaagaaccagaacaaagagcaaaacccagagaattatgcagaaacagagcaggaagaaggaaagaatgaaagcagtggcagaccaaaacgtggaagcaacagaccaaggtacctggaggattacgtggccaagtgatgctgagctggcaataccttccagaagcagaatccaccaattctg

SEQ ID NO: 46249 - DNA, 270 bp, Glycine max
  unsure (1)..(270): unsure at all n locations; Clone ID: 701131937H1
ctccggtggtgttgccggtgagtggtgagagactgaccaagccgntcaggccgacgccgattgtaccggtgcctccgtcttcgaagatggctaatttgaacttgaaagggaaagcttctcggacaaatctcattgagcctttgccgttgtcgttgaatctgccatcgccaacgccgcggtctcaggatcagtccgccggcgaatagtggccactcgtccgccgtcatcgtcttcggcggcggcttttcaggctatgtctgcagcgaagtt

SEQ ID NO: 46250 - DNA, 268 bp, Glycine max
  unsure (1)..(268): unsure at all n locations; Clone ID: 701131938H1
gcttgcagttgctgcgtcgcaaggtaccggcggcgacggagagctatcttctcaatttccgntcactgcattggttctgttgacgagggttttgttctacttgacttgcatacttgatggcgtcaaagttgcagaagttgcagtccgcagcatgtcaagcatctcaatttgtatccagtcgtggaactaactactacaggcaattgctggaacagaacaagcaacacattcaggagcctcctacagtagagaaatgcaacctgctggc

SEQ ID NO: 46251 - DNA, 269 bp, Glycine max
  Clone ID: 701131939H1
gggaatagtgctgcaatggcttcaagtcaggaggaggtgacccttttgggagctactggaagcccatttgtgtgcagggttcatattgccctcaagttgaagggagttcaatacaaatatgtcgaagaaaatttgaggaacaagagtgaactgcttctcaaatccaacccagttcacaagaaggttccagtgtttattcacaatgagaagcccatagcagagtctcttgtgattgttgaatacattgatgagacatggaagaacaaccc

SEQ ID NO: 46252 - DNA, 124 bp, Glycine max
  unsure (1)..(124): unsure at all n locations; Clone ID: 701131940H1
ctgattgcaatgcttctctttcccagcagagaaagaagcgacagattcctgcaactttggctcctgttgaagctctagaggcatatacccagatatctagtcacccctttcacanaacanacna

SEQ ID NO: 46253 - DNA, 86 bp, Glycine max
  unsure (1)..(86): unsure at all n locations; Clone ID: 701131941H1
aagcactctctctttcccttancctttttcaggtttcaacgctccaacttatccatggccacnatccgtctggnncagncncgagg

SEQ ID NO: 46254 - DNA, 270 bp, Glycine max
  unsure (1)..(270): unsure at all n locations; Clone ID: 701131942H1
ctcaattgnnagcttctcctttgngttcaacccctgccactgctccttcccttcatacaacagggcacctctctgtaccatcagttctggaaggcaaagccttcgtcattcaaagagttggggctaagaacaagcattggtgccactaaacttaaagttattaaagcagctgcacgcagtgatacagaggtagtttctgaatccacaaaaggtggtggcctacgtggaaaattgaataaggtggtgttggcttacagtggtggcttagac

SEQ ID NO: 46255 - DNA, 267 bp, Glycine max
  Clone ID: 701131943H1
gccttcagaaggaatatagagccctttgtaaagagccagtttctcatgttgtggctcgtccttctccaagtgatattcttgagtggcattatgtgttggagggaagtgaaggaacaccttttgcaggtggatattactatggaaaaatcaagtttcctcctgaatatccatataaacctcctggaatcagcatgactacacctaatggacggttcatgacacagaaaaagatctgtttgtctatgagtgacttcatccagaaagttg

SEQ ID NO: 46256 - DNA, 273 bp, Glycine max
  unsure (1)..(273): unsure at all n locations; Clone ID: 701131945H1
tttgnncttnctctnacattactgtgctcacagtcatagggtacaagcacaagcactgcacctacaangnaaatggtgaaatctgtggtggggttggcattcttggcattgcatgggcctttggtnncatgatcttcatccttgtctactgcantgnctgggatctcagggggtcacattaacccancggtgacatttgggctgttttnggctcncaaggngtcttgatccgagccatcatgtacatggtggctcagtgcttaggtgctatct

SEQ ID NO: 46257 - DNA, 274 bp, Glycine max
  unsure (1)..(274): unsure at all n locations; Clone ID: 701131946H1
aaaaaagatgaacttgagatggatggnagcggtgttgccgctgggaatcatagctggaatgctctgcgtcatgggaaacgctcagtattacattcacagagctgcacatggcagacctaagcacatcggaaacgatatgtgggatgtggcgatggagcgaagggacaagaagcttatcgagcaagcctctccctccaattaacatcgttgttttgccgatgtcattgtgaagaaaataaactggctcacctggatttacggctgtgttcttggg

SEQ ID NO: 46258 - DNA, 274 bp, Glycine max
  Clone ID: 701131947H1
ggttgaatgaacttgactttgtcttttcaactttggtggttggggctattctgaatttcactctcatgtatctattggcacctaccatgacatcatcagcatcaaacctgccagccctatttgcctcatgccccaagagtcacatgtttgagcctggtgcattttcccttttggataggttaggaaccttggtgtacaaagggaccattttttctgttgttggctttggtgcaggacttgttggaaccacactttcaaatgggttaatcaagat

SEQ ID NO: 46259 - DNA, 274 bp, Glycine max
  unsure (1)..(274): unsure at all n locations; Clone ID: 701131949H1
tggatttaaggcaagtngtggcgggtgtgctcaccctcacaatgttcgtcatgcttattcacatgatccaaaagggaccattttgatgctgttcatgataaacttcctggaacagaggatgtcggctttgaaagtacaaactttgatactactcatgttagaaagaacatcgggatttggaagggagatgcagatgagttaaacccatgntgggctaagccatctgaagacaatgcggagactgaggggtttgttaccttttcactaaccaatg

SEQ ID NO: 46260 - DNA, 271 bp, Glycine max
  unsure (1)..(271): unsure at all n locations; Clone ID: 701131950H1
tnncaatggctttggggctctnggngntnatcctcttcttcattgcttcctcttnctctcactcnntacgnnccntccgatgacgccgacgacgccatcttctacgagtcgttcgacgaggattttgatggacggtggattgtatccgacaaggaggattacaatggtgtctggaagcatgccaagagtgatgggcatgatgattatggacttcttgttagtgaacaagccaggaaatatgctatagtcaaagaacttgccgagtctgtca

SEQ ID NO: 46261 - DNA, 269 bp, Glycine max
  unsure (1)..(269): unsure at all n locations; Clone ID: 701131952H1
cctgccagtagtcatatgcttgtctcaaagattaagccatgcatgtgtaagtatgaactaattcagactgtgaaactgcgaatggctcattaaatcagtnatagtttgtttgatggtatctactactcggataaccgtagtaattctagagctaatacgtgcaacaaaccccgacttctggaagggntgcatttattagataaaaggtcaacacaggctctgcctgttgctttgatgattcatgataactcgtcggatcgcacggcctt

SEQ ID NO: 46262 - DNA, 269 bp, Glycine max
  unsure (1)..(269): unsure at all n locations; Clone ID: 701131953H1
agagcactgtgcaagaagatgctggatccaagccacaatggaatgagagctttcttttcactgtcctctgacngtgcatctgaacttaatctaaagataatggataaagacaactttagtcaagatgattgtcttggcgtggcaaccattcaaccggatccagtgtttgaagcgggtagcattccagaaactgcttacaaggttgtgaaggacgaagaatattgtggagagattaaggtggctctcacttttactgttgagaaaaatga

SEQ ID NO: 46263 - DNA, 271 bp, Glycine max
  Clone ID: 701131954H1
ctgaattggattgggtttgcagcagaagcagcgaaggatatggcgattcttccttctcttgcagttccttcaactcccatttctcgggtaaagctgtttcaatgccaaccctgtcaattccatagatgcacagaactatatcttcctcatcaaacatattatactcgaactacatcaattaaagtatcaatggcagaccaaaatgagccgagtgaggttaatatggcagattgggatcatgagggagaaacttaaagaaacactggccagt

SEQ ID NO: 46264 - DNA, 260 bp, Glycine max
  Clone ID: 701131956H1
tttcttctctctctgtgtgtgcgcttcaacggcaaccagaagcagccatggccactgcaaggactgtgaaggatgtttcacctcatgagttcgttaaggcgtactcctctcacctcaagcgatccggcaagatggagctgccagagtggactgatattgtgaaaactgcaagatttaaggagttggctccttatgatcctgactggtactatgtcagagctgcttccatggcaagaaagatctacttgagaggaggactt

SEQ ID NO: 46265 - DNA, 271 bp, Glycine max
  unsure (1)..(271): unsure at all n locations; Clone ID: 701131957H1
gcttggtgatgtccctttctgtnntcttcactcttggtcttgcgagagaaagccatgccagagacgaagatttttggcatgctgtttggccaaacactcccattccaagttcattgcgaganccttctaaagcctggccctgcaagtgttgaaatcgatgatcaccctatgcaaattgaagaaacacagtacccgaaaaccttcttctataaagaagaccttcatccagggcaaaacaatgaaagtacaattcagcaagcctccctttcaa

SEQ ID NO: 46266 - DNA, 268 bp, Glycine max
  unsure (1)..(268): unsure at all n locations; Clone ID: 701131958H1
atgaaagtgcttgtnttgtttgttgctacagttttggtagcatatgaatgccatggctcagactaccagaagttccctctccaaatgaaaactgggtttggtgggcaatacagcaatgaggtggcatgtgccagttggaggcttggcgtggaagcaaacaacgtagtcaagtggcaaactgttcctgcagcttgcggagagtacatagctgactacgttctaggagaccaatatagatcagattccaaaacagttaaccaacaagctt

SEQ ID NO: 46267 - DNA, 243 bp, Glycine max
  unsure (1)..(243): unsure at all n locations; Clone ID: 701131959H1
tatagctatagttgtatctccacaagcannatnattngtcggttatggtgtttanagagcggcactccctccgtgncnccctcgagnaccaagaagaagaagccccttgtcttgttgggcgcacctcatgtctccgccatcgtccttgaagcccttctgaacgcttctacttgtccagattcttcatttgaggttgcggctattgtgactcaacctgctgccagaagggacagggggaagaag

SEQ ID NO: 46268 - DNA, 271 bp, Glycine max
  unsure (1)..(271): unsure at all n locations; Clone ID: 701131960H1
cggaaactaacctttcacactcacacatccatcgtcatatctgaattggcaactcattattaaatcaattacgaaaacgaagaaacccaacaaaacaatggtagtagcttagctaattgcctaattgantgantctcaatggaacctcctctcatcaacgactccacattctcttccgctaacccttccttgtccgagatttggccctctcattttcccacagaccacactcccagtaacaagagacacctctccccctcgactgattgtg

SEQ ID NO: 46269 - DNA, 274 bp, Glycine max
  Clone ID: 701131961H1
ttcccgccgccgctacactgccaccgtcttccccgccgtctccgccagagatggcagaagaggattcaaagcctctgaactacatctccgaggtcattctcaagaagaggaagaacaccgaagcatgggctttaaggaaaaaagaacagttccagcaaaagaaataccaatccatcaagaagccggaggatttcatccacgagtatcgcaacaaggaagtggaccttataagaatgaagcggagggtgaagaggaaagtgcctgaagctaactc

SEQ ID NO: 46270 - DNA, 276 bp, Glycine max
  Clone ID: 701131963H1
ctggtgccagcagccgcggtaattccagctccaatagcgtatatttaagttgttgcagttaaaaagctcgtagttggaccttgggttgggtcgatcggtccgcctccggtgtgcaccggtcggctcgtcccttctgccggcgatgcgctcctgtccttaactggccgggtcgtgcctccggtgctgttactttgaagaaattagagtgctcaaagcaagcctacgctctgtatacattagcatgggataacaccacaggattctgatcctattgtg

SEQ ID NO: 46271 - DNA, 271 bp, Glycine max
  Clone ID: 701131965H1
cacggttcttcaattcaatcaaatcttgtttctatggaaggaaattggtgtttgattcattatcaaggtttctcatcagctaccagcacttcacattctacccagttttgtgctttgcaagggtcaatttgtacctccagactttgttgctgttgttctctaggagaaaggtgccagatagagcctttaacataatggggatccttgtgttttgggtttggttccctctgttgatctcttcactaccaaattggggagaaagggtcagttt

SEQ ID NO: 46272 - DNA, 270 bp, Glycine max
  unsure (1)..(270): unsure at all n locations; Clone ID: 701131966H1
aaatgaaggtccttgttttcttcgttgctacaattttngtagcatggcaatgccatgcgtacgatatgttccctctccgaatgaacactggctatggtgcccgtactccggaggtgaaatgcgcaagttggnggcttgctgtggaagcacacaacatctttggctttgagaccattcctgaagagtgcgttgaagcaacaaaggaatacatccatggcgaacaatatagatcagactccaaaacagttaaccaacaagcttacttttatg

SEQ ID NO: 46273 - DNA, 260 bp, Glycine max
  Clone ID: 701131967H1
atttggatcacttcctgttattcaagatggtgattatactctctatgaatctcgcgcaataatcagatactttgcagagaagtataaagaccaagggacagacttgttgggaaagacaatagaagaaaaaggtctagtggaacaatggcttgaagtagaagctcataactttcacccaccactctacaatttggttattaatgttctgtttgccccattaacgggtgctccttctgaccaaaaagtgatagaagagagtg

SEQ ID NO: 46274 - DNA, 154 bp, Glycine max
  unsure (1)..(154): unsure at all n locations; Clone ID: 701131968H1
cttaaaaacacaattaatcaacctcagccactgcatttacgttttcncattaatcctttcactttgcttgctactactctaatatctatatccctgtatacaatttttcccccctctctctctgtctaacaaacaggatttgagcttcagtggg

SEQ ID NO: 46275 - DNA, 265 bp, Glycine max
  Clone ID: 701131969H1
tgatgatgatgatgggttcaaacacaaaaccccttgtgcacctttctcttctaattttggttctcttttcttcttcaaccgaatccctcagattcgaactccaatctgggcacaccaaatgcatctccgaggacatcaagagcaattccatgaccgtgggcaagtaccaaattgttaactccaacgagggtcagcctcttcccgattcccacagagtcaccgtcaggtgacttcgtcttatgggaacaactatcactacggggat

SEQ ID NO: 46276 - DNA, 266 bp, Glycine max
  Clone ID: 701131971H1
gagagatccatccatcaattccaatggccgatcagctcaccgacgaacagatctccgagttcaaggaagccttcagcctcttcgacaaggacggggatggttgtattaccaccaaggaacttgggaccgtgatgcggtcacttggccagaacccaactgaggcagagctgcaggacatgataaatgaggttgatgctgatgggaatggtaccattgatttcccagaattcctgaatctcatggctcgcaagatgaaagacactgat

SEQ ID NO: 46277 - DNA, 265 bp, Glycine max
  unsure (1)..(265): unsure at all n locations; Clone ID: 701131972H1
tcatccatggccgaggaaccccaaaaaccagcctccgctgaagaagtggtcgctgttcctgcggagaacccaccatctgaagccgaagctgaaaacatcgaagcagagaaggcccagagtggtgtagaagacaagatttcccagtcggtttcgttcaaggaggagaccaacgtggttggcgacctccccgaggcgcagangaaagcccttgatgagctcaagaagcttgttcaagaagcgctcaacaaccatgagctaactgctc

SEQ ID NO: 46278 - DNA, 266 bp, Glycine max
  Clone ID: 701131973H1
aaaaataaaaatcaaagagcataatgtcagggatcattcacaagattggggagacccttcatgtgggagggcacaagaaggaggaggagcataagggtgagcaccatgctggagaatacaaaggggagcaccatggtgaacacagtagtgagtacaaaggagagcatcatggtgaacacaaagctggagagtaccatggtgagcacaagccagagcacaaagaggggttcctagacaaagtcaaggacaagatccatggtgagggc

SEQ ID NO: 46279 - DNA, 267 bp, Glycine max
  unsure (1)..(267): unsure at all n locations; Clone ID: 701131975H1
cgctcgcactgtccagatcttaatcaagaggagtgagttttgtttttccagccatgacgccgctncgtgagtctaagcctttctctcagatttacgcttaacagagttacagtcactcagtaatctactccttttctagatcctgcatgctgggaaaaccaacaaaaattcttacaagacactcattgcagccgagtatgctggcgtccaagttgattttgcccctaattttgagatgggtgtctccaataaaactcctgaatttct

SEQ ID NO: 46280 - DNA, 270 bp, Glycine max
  Clone ID: 701131977H1
gccgcagcacgaggagcagcctcaggaggagaaggatgtctcacaggaagttcgagcacccaaggcacggttcactgggatttcttcccaggaagcgtgctgctcgtcacaggggaaaagtgaaggcattccccaaggatgacccatccaaggcacccaagctcactgcattcttgggttacaaggccggtatgactcacattgttagagaggtcgagaagccaggatcaaagcttcacaagaaggaaacttgtgagcctgttacaatta

SEQ ID NO: 46281 - DNA, 270 bp, Glycine max
  unsure (1)..(270): unsure at all n locations; Clone ID: 701131978H1
cttttcagttctcatcgtaactaccatagttgctgctccgaaaaggnttttcctaacaccgcccatgcaatcaatttccgggttgtacaattcgtgaataggttgttgcttgttctgaaaagtagtggatagtaaaaaatattgaactttttttgagaganaaatgcagagtaaagaagctgttgtggaagatggggaaataaagagtgtgactgctgtagggtctganattgatgggtggaccaattttggggacgatgacataatgcc

SEQ ID NO: 46282 - DNA, 275 bp, Glycine max
  unsure (1)..(275): unsure at all n locations; Clone ID: 701131979H1
tgaggccttgcaagactgggaatacaagtttatgggcaagtatgtaaaagtnggaactgtcaaaaagaccgttccagtaactgaaccagaatccactggcgaagcaggcagaatctaatgtccatgatgctgaatcttcaaagcctactgaagatgatggcccatcagaatcagcagctgctaaaaatgatggaaccccttcaaagattgacgcagataaagagtaaataatcgttggataaagagcaattgtcttgcaaacagtggaaacggtt

SEQ ID NO: 46283 - DNA, 211 bp, Glycine max
  unsure (1)..(211): unsure at all n locations; Clone ID: 701131980H1
cgagttcagccgaaccaaactccgaagctatggcagagctccaaaccaaggttgaacctgttacggtcccggctccggtggatcccgagccaccgctagctgaggctccgccgctcgagaagaaagcggtggcggtgccaccaccncgttccggctgcggcagaggaaaccaaagctcttgttattgtggagaaggagaaggagaatgaga

SEQ ID NO: 46284 - DNA, 261 bp, Glycine max
  unsure (1)..(261): unsure at all n locations; Clone ID: 701131982H1
cggattcgccatcatggggaagaagaagaagagagtttcctcgaaggtgtggtgntattactgcgatcgcgaattcgacgacgagaagatcttggtgcagcatcagaaagccaagcacttcaagtgccatgtctgccacaagaagctctccaccgccggcggcatggccatccacgtcctccaggttcacaaggaatccgtcactaaggtgcccaatgcaaagcctggtagagagagtacggatattgaaatatatggaat

SEQ ID NO: 46285 - DNA, 147 bp, Glycine max
  unsure (1)..(147): unsure at all n locations; Clone ID: 701131985H1
tagtagtgcaatgaatcgaagctgaaacgcttcatcaccggattctcgctctcaactcannataccaactcggagnttcggactcatcgcctccgattcaaaaccctaactcggacctcaaactcaatcgattccacacaacatang

SEQ ID NO: 46286 - DNA, 266 bp, Glycine max
  Clone ID: 701131988H1
gaatgatttaccattgcaaccaggcacagcagatatagttttcagcatttgttataatacagatgattgggagttgattaataagtatgcaaaaagatttgtcatggctggcgtaaaactacgacaaacctcattggaaacatggatggaatttgctgccaaaagaggagacattcactcattgtggaaaatagaaaagttgagatccaattcaatgaagcagcacactttgataactgggttttcttgtgtcaagggtctctgtt

SEQ ID NO: 46287 - DNA, 266 bp, Glycine max
  Clone ID: 701131990H1
cctaactcctctcgtcgtcacaaaaagtcttcttctccgatcgttacgatgttggaactccgtctcgtgcaaggttcccttctgaagaaggttctggaatcgatcaaggagctcgtaaacgacgcgaacttcgactgctcctccaccgggttctccctccaggccatggattccagccacgtcgccctcgttgcgctcctcctccggtccgagggctttgagcactaccgctgcgaccgcaatacctccatgggcatgaacctcaa

SEQ ID NO: 46288 - DNA, 264 bp, Glycine max
  unsure (1)..(264): unsure at all n locations; Clone ID: 701131991H1
gaaangcagcgatggaagaagacttcgacatccccggcggcgaggaaatggatctcggcgaagacgaggtcggcgaggagagggagatcggctctggcggcctcaagaagaagctcctcaaggaaggtcaaggctgggaaacccccgaagtcggtgacgaagtccaagttcattacacggggactttgctcgacgggactaagttcgattcgagccgcgacagggattctcccttcagcttcacgctcggacaagggcaagtaa

SEQ ID NO: 46289 - DNA, 186 bp, Glycine max
  unsure (1)..(186): unsure at all n locations; Clone ID: 701131992H1
tttcacagtgaactcttcanttttcgattctctttttcttgcaccaccctctcctnnnnnnnnnnnnnnnnnnnnnnnnnnnnnnaaacaccttcaccatttgcataccacntagctccaaaaacccatttctgtttctttctgttgatttgatggatccgcagatctaatgatttcacacacttt

SEQ ID NO: 46290 - DNA, 271 bp, Glycine max
  Clone ID: 701131993H1
cctctctgcaatccacagccgaaaatgcctttcaagaggtacgttgagatcgggagggttgctcaaatcaactacggcaaggaatatggcaggctcgtcgtcatcgtcgacgtcattgaccagaacagagcacttgtccgatgcccctgatatggtgaggtcccaagtcaatttcaaaaggctttcccttaccgacatcaagattgacatcaagagggtccctaagaagaaagatcttgtcaaagccatggaggatgctgatgttaagaac

SEQ ID NO: 46291 - DNA, 270 bp, Glycine max
  Clone ID: 701131994H1
ttttccctcactttctcgctcgccaaacgcccctctctctcctccaatggccgaccagctcaccgacgaccagatcgccgagttcaaggaggccttcagcctcttcgacaaggacggcgatggttgtattactactaaggaacttgggactgtgatgcggtcactagggcaaaacccaactgaggcagaactgcaggatatgattaatgaggttgatgctgatggcaatggaaccatcgacttcccagagttcctcaacctgatggctcg

SEQ ID NO: 46292 - DNA, 276 bp, Glycine max
  unsure (1)..(276): unsure at all n locations; Clone ID: 701131995H1
gcggattcagtgtcggtggacatggaagccatctctcctccacctgaggaacatataataagaactncgtccatggtcgtgtctccgttgctgtgtatggggaccaggacaagccagcgctaatcacgtatcctgatttggctttaaattatgtctcctgctttcaggggttattattttgtccagaagcctgttcactgctgctccacaatttctgtatatatcatattagtccacctgggcatgagttgggagctgctgccattgatccagatg

SEQ ID NO: 46293 - DNA, 278 bp, Glycine max
  unsure (1)..(278): unsure at all n locations; Clone ID: 701131996H1
caagatcaaaggcagggacaagcatggccgcaagatccttcgcattatcgccaaattcttcccagcacggttggtgagtgttgaggttctgaaaaagtacctggaggagagggttttcccgaagctgatggggaagaggaaattngcggtgctgtacgtgcacaccggcgtccagaggagcgagaattttcccggaatctccggtctccggtggatctacgatgcgattccggcgaacgtgaaggagaatctcgaagccgtttattttattcaccggg

SEQ ID NO: 46294 - DNA, 217 bp, Glycine max
  Clone ID: 701132001H1
gctaaacccttttttctatctcactaacacaacaatgggagacgagaagaagggcaagcctgctgcttccggcgtgtggtccaccatcaagcctttcgtcaatggtggagcctccggcatgctcgccacctgcgtcattcaacccatcgatatgatcaaggtgaggattcaacttgggcaaggatcagctgcgcaggtcattccaccatgcttaaga

SEQ ID NO: 46295 - DNA, 115 bp, Glycine max
  unsure (1)..(115): unsure at all n locations; Clone ID: 701132006H1
gttgtnactgctgctcttttctctnttnttttctctttagttctctcttcccctttctttttctntnncttcttctnccngagnntgtttaagcttttcttccattaacatanta

SEQ ID NO: 46296 - DNA, 274 bp, Glycine max
  unsure (1)..(274): unsure at all n locations; Clone ID: 701132007H1
ggaagaacaataatgaaggacgccggaaagagccacaaggcgaatgcaaagctgttcgccggagacgcggaaggatncggaaatcggcgacggggctgagtggatcgccgaagaagggaggccacggcgggaagttcacgtggatcggcaacggctacgagaacgtcgagatggagcacggtgctatggacgccaaggacccgaacttcgaggatccagcggagatcgccgccgtgtgatcgcggtggtttccggtgacgagatctgtacatac

SEQ ID NO: 46297 - DNA, 269 bp, Glycine max
  Clone ID: 701132008H1
cttttatcttttacatccttaaacacttggtgcttctttggtttaccgaagatcctaacgacccatgaatcaaaaatttcaaatttttatttttcaaaaaaacgtgcatgtaaatgtgtgtttattcaatttaacgtcgaaactgtgagtttgtttcatacgttgttgttggttgtgtttttctttttttacgttgttgttgagttatggctgatgaagcttctggagatgttgatctaaggttgggagagcccaaggggcctaaagag

SEQ ID NO: 46298 - DNA, 270 bp, Glycine max
  unsure (1)..(270): unsure at all n locations; Clone ID: 701132009H1
ggnnattgaatgcntcagggttntcattattgttgttncccatcactatgcaactncctncatctcncntngataaacttaccgaganccataantaagtacggtgcggcagaagatcgacgcatttttccatttntcttcgaggtngaaccgantcangtacggttnccaaagtggtagttttgaaatagcttttgattctcatgccaaccgtgtggagtctgagtgtttacagaggtggaaaattactctgaaaaaagtaactgattt

SEQ ID NO: 46299 - DNA, 266 bp, Glycine max
  unsure (1)..(266): unsure at all n locations; Clone ID: 701132010H1
gaaggaccccatagcaagcacgacacactatcctgttcttttctattgnccttntnnanncactttactccttgcatccaattctctcgcgaaattaataaaggaactttaactttcgcgagcgacacaaacgcaatcaaatcaaatcatagattgatttggcaaccccaatttcncnnnnnnnnnnnnnnnnnnnnnnngaattaatcgcaatgggtttggttgcttagngtttttttggtcgnacgaaagatgattnnctgggg

SEQ ID NO: 46300 - DNA, 257 bp, Glycine max
  unsure (1)..(257): unsure at all n locations; Clone ID: 701132012H1
cgctcgatgggaattgcgcttcaaggcgtctcgtagggctaatccgcctcacnagggtcaccaacggcacgtgcctttggggggccgaggccccctactgctggtcggcaaacggacggcgggcgcacgcgtcgcttctagcccggattctgacttagaggcgttgagtcataatccaacgcacggtagcttcgcgcncantggcttttcaaccaagcgcgatgaccaattgtgcgaatcaacggttcctctcgtac

SEQ ID NO: 46301 - DNA, 264 bp, Glycine max
  unsure (1)..(264): unsure at all n locations; Clone ID: 701132013H1
angatagtagacagagtaaaaaagaaaaagatgttcttgttgttgatgtcgatcccaaaaaaacctgacccagatgatgctcctgcctcaatncctggggagtcttaaatactatctcagctgatttgggtggagctccctttcttcactatccttctttttcattttttctgctctaaatttctattccgtatttcttttgtgctaccttctacattattgaccattggatttgttaatctcaaatacttacaagttgttgtt

SEQ ID NO: 46302 - DNA, 266 bp, Glycine max
  unsure (1)..(266): unsure at all n locations; Clone ID: 701132014H1
acactgcataccttatgtcttccgaattcgaagttaatttgcaagatggctaaggaaaaggctcagatcaacattgtggtggttggtcatgtggaccctgaggaggcaaccaccattaacgagctgaagaagcctgttgtggagaaagangctccagggcatgccatatgagggcatgcacgtacggnctcggaggggaaccagaaaattatgttaacaaaataatctggaaccctaatgtatcagtgtcatcatcagtgtgtagt

SEQ ID NO: 46303 - DNA, 264 bp, Glycine max
  unsure (1)..(264): unsure at all n locations; Clone ID: 701132016H1
caanctgangacggtgcnactgcgagcnagcgagcnagcgananagagagaatcgaaggcgacacaacttgcatccgattctganaagaagaagacgagggttctcctcctgttctctttcgaatacaatctttctgcttcatgatgttgaacaaatgatacannatttattctgtgcacagaaaattctggtacatatggcangncttatgcctggagagttgtcacatcatggaacatctgatggcaactctggtaaaagtt

SEQ ID NO: 46304 - DNA, 287 bp, Glycine max
  unsure (1)..(287): unsure at all n locations; Clone ID: 701132017H1
ggaggcactgtggcagaagtcctaggagtgtaaaacagagacgcaaaatgaagacgatcttgtcgtcctgagaccatgaatattcccgacggcgtgagcatnaaggttcacgctaaggttatcgaggttgagggccctcgtggaaaactcgtgcgagacttccaccatctgaacttggacttccaacttattaccgacgatggcggtaaaaggaagctcaagattgattcttggtntggttctcgtaaaacctccgccgccatccgcaccgccctcagccacgttga

SEQ ID NO: 46305 - DNA, 281 bp, Glycine max
  unsure (1)..(281): unsure at all n locations; Clone ID: 701132018H1
ctgacagacagcatagtctctggtgcaagaatcaattgagcaagcatgggaatgttgttggtggtggtctcatacgctgtccttttcctggttctnttcctcggcgtgaagtttgttttccaaagcagaaaattgagaaacataccaccaggtcctcctcctcttcccataataggaaaccttaacctcctcgaacagccaatccaccgtttcttccaacgcatgtcgaaacngtacggcaagtggtttccctctggttcggttcacgtctggccgttgtc

SEQ ID NO: 46306 - DNA, 276 bp, Glycine max
  unsure (1)..(276): unsure at all n locations; Clone ID: 701132019H1
ggagggaggangatggtgtaataccatcagaaactgtgtctatagaaaaaatactcgtcgtggatcctcaaaatacatggaaaatcaaataccattcacgggaatattgagcaacaaacctgaagaaaaccctgatttctttaactggaatagagttaaattacggtactgtgatggagcatctttcagtggagatagtgaagatgagtctgcacagctccagtttcgaggacaaaaaatatggctagctgcaatggaggaattaatgtccaaagg

SEQ ID NO: 46307 - DNA, 265 bp, Glycine max
  Clone ID: 701132023H1
gggagtttcagttaacgtacctagttgttggtctttatatttagttattgacatcaacaaagtcatggaggaagttaatgtggttcaaaccaagaatggaactgtttcagtagcttctgcgtttgctggccataaggaagctatacagcaaagggaccacaaatttttaagaattgctgttgaagaagcgtataaaggggtagactgtgaagatgggggtccctttggtgctattatagtttgtaatgatgaaattgttgctagt

SEQ ID NO: 46308 - DNA, 229 bp, Glycine max
  unsure (1)..(229): unsure at all n locations; Clone ID: 701132026H1
gggcanagagggantaagaatnatcgcatgattggtcgactagctatttntgtcaaatgctngcttgtttgtggatgatgcagaagcatatgacgtgtaccagagagaaccagaatcttatgaaactgaacagaatgggaataggaatgctgctgaagatggcccctgctcctcagcaacagctgcttctgatggtgaagatcnnncngacatagatgannatgatgag

SEQ ID NO: 46309 - DNA, 253 bp, Glycine max
  unsure (1)..(253): unsure at all n locations; Clone ID: 701132028H1
caaccaaccatgttgcattgtctcaacacttcctgttnggacatcacngtcntngaaagacaacgggaagcaaccatcaagtgccagaaccaccaaccaccctacttaacggactttaacgccgtcttccnnnnnnnnnnnnnnnnnnnnnnnnnnnnnnnnnnnnnnnnncnntagtcagggcttgctcatgatgtgctcggattcctcgctcggccaggtcctaactcactccgtcnaacccgatccgggc

SEQ ID NO: 46310 - DNA, 264 bp, Glycine max
  unsure (1)..(264): unsure at all n locations; Clone ID: 701132029H1
tncattttttagtgagatcagagtaaaactccaagtaattagcaaatagaaaagtacaacnnttataggagcaactaagattaaaccaagattaaaccagtagttgtaaaagtttacactaacagtgaatcaagattaaaccagtagttgtaaaagtttgatctatgattgtaagtatgtttattttaactaaggtttctctagcatganacttgaaatttagttctgatgcttccgtggtcattatcaagttttagatctaat

SEQ ID NO: 46311 - DNA, 263 bp, Glycine max
  unsure (1)..(263): unsure at all n locations; Clone ID: 701132030H1
gtccctccttcctctgccttataattcttgtgacccttttngctggtagcattgaaagtgcaccagcaaacgtgaagccaagccattatgctgcacccttcaataggagtgtttttccttctggttttctatttggaataggctctgcagcttaccagatagaaggagcagcagctatagatcaaagaggaccaagtatatgggacacctatactaaacagcaaccagggaagatttgggatcatagtgatggaagtctagca

SEQ ID NO: 46312 - DNA, 268 bp, Glycine max
  Clone ID: 701132031H1
gtcacacttcagtgaatacatcaagcgtgggatagaagctgatggtattgaggcactgtataaaaatgttccatgctgccatccgggctgatcctactctcaagaaatctgataagcagaccccgaaggagcacaagaggtacaacttaaagaagctgacatatgaggagaggaaggctaagttgatttcacgtgtggcagctctcaactctgctgctgataatgatgaagatgatgagtgaaagttcattgcagatgccttctcatg

SEQ ID NO: 46313 - DNA, 273 bp, Glycine max
  unsure (1)..(273): unsure at all n locations; Clone ID: 701132032H1
ctngagcngttgtaatcaagggagaganaaaatttcangcacaaanaatggtnggagaaganagtggtgatcctaggaggttgtgttgacggtgccaaccttggcaaaaactatanccacgtncaagccaacgtcacccttattgatccgaaggaatattttgagattccatgggcaagtttgaggggattggttgagccaacttttgctgtcangatagtgatcaaccatagagagtacttcaaaaagggtaacctgttgtatccagtgctg

SEQ ID NO: 46314 - DNA, 284 bp, Glycine max
  unsure (1)..(284): unsure at all n locations; Clone ID: 701132033H1
gctatggtnggaaaagggttcagagccattaaccgaaaccgagaaggcagaccttgaagccattgctgcactcaaagagtctgcagcctttgaattcaaggaaaagggtaatcaatatgtgaagatgggcaagaagcattactctgatgccattgattactacacgagggcaattgatcagaaagccttgagtgactctgagacctctattctctttgcaaatagagcccatgtgaatttgcttctagggaatcttagacgtgctctaacagattctaatgagg

SEQ ID NO: 46315 - DNA, 280 bp, Glycine max
  Clone ID: 701132034H1
ggactcaattctttggttacttaatagtagttcctttttaactatctttcttcaatggctgactcagcctcagcctcagcctcttcttccagaatgtggtgctccatccccgaaaggtttcagctgcatgcggccatgttggccctgcagtttggctatgccggcttccatgttgtctcaagagctgcccttaacatgggcattagcaaacttgttttcccagtctaccgcaacattatcgcttttctcttgctcgttccttttgcctacttcttggaaa

SEQ ID NO: 46316 - DNA, 263 bp, Glycine max
  unsure (1)..(263): unsure at all n locations; Clone ID: 701132037H1
caggtggataagtctgcatggatgactgatgaagaatttgctagagaaacgattgctggtgtaaatccaaacgtcattaagattcttgaggagttcccaccacgtagcaagctagatacacaagcctacggtgatcanncctgtataataacaaaacaacatttggaacctaacttgggtgggctcnctgttgagcaggctatccagagcaagaagctgttcatcttagatcaccatgactatctcancccatatttgaggaa

SEQ ID NO: 46317 - DNA, 50 bp, Glycine max
  Clone ID: 701132038H1
gccggtacgttatgtttatcattgctgtgacaatggatgtgtttgcatgc

SEQ ID NO: 46318 - DNA, 266 bp, Glycine max
  Clone ID: 701132039H1
gcaaagttgggttatgctagtgaccttgcaggaagtcaggaacttgctgaaggtagtcgtgcaacacaggctcttctgactaattatgcacagacacctggccaaggaatgactcctttgcgaacccctcagagaacaccggctggtaaaggtgatgctatcatgatggaagctgaaaatctggccaggctgagggagtctcaaacaccattgttaggaggagagaacccagagttgcatccttcagatttttccggtgtcactcc

SEQ ID NO: 46319 - DNA, 55 bp, Glycine max
  unsure (1)..(55): unsure at all n locations; Clone ID: 701132042H1
ggctctgtgcattcttctctcgcnctctgccttccacacaacatacgacnnnnnc

SEQ ID NO: 46320 - DNA, 265 bp, Glycine max
  unsure (1)..(265): unsure at all n locations; Clone ID: 701132047H1
gngcagccgnagcagtaactcgtggnattgctancaatggcgaggatcaangtttacganntgantgcagannacganggctgatctgttgnatcngctgnangacctcaaggccgagcttgccttgcttcgnnttgctaaggtcaccggcggtgcacctaacaagctctctaagatcanggtngtgangttgaacattgcccaggttttgacggngatttctcagaagcagaaggccgcgttnagggatgcctacaagaacaag

SEQ ID NO: 46321 - DNA, 266 bp, Glycine max
  unsure (1)..(266): unsure at all n locations; Clone ID: 701132048H1
ttcgcattatcgccaaattnttcccaggtagattgattaattaattaattaaatccctaattcctttttttttatgtgcatgaattttttaaatcttcggtaattgtttncnattgaggacagcacggttggtgagtgttgaggttctgaaaaagtanctggaggagagggttttcccgaagctgatggggaagaggaaattcgtcggtnctgtangtgcacaccggcgtccagaggagcgagaattttcccggaatctccggtct

SEQ ID NO: 46322 - DNA, 279 bp, Glycine max
  unsure (1)..(279): unsure at all n locations; Clone ID: 701132049H1
ggaacttcgtgtttcattttgcgaacttcatttttctctctcgtatttcgctctggtgtgtctcattcctgtgcttttgaatcatattcttcgatctgttcttcaacatattttctgctttcaaccgttcgcgtcgtgactcagcttcgaattgttcagtataagttggaacttggaacatgtacgggagnaaagctagtcaacttgtgaaagaatttgcaagtggagaaaaaggtcagcttaccacatacaataatgacttgattcgagaagtagttg

SEQ ID NO: 46323 - DNA, 266 bp, Glycine max
  unsure (1)..(266): unsure at all n locations; Clone ID: 701132053H1
gcacccctctaaaaatcacaaagattctaccttttgatgcaaatgggatcaacccaccaaccctagggtcacataccagcaagattcattctttcattcaatctcaaaccaaacaacccccatttcaattatggcaccatttcccacttcccattacttcagggccttcactttctccattttgttcctcaaaaccctagcttttgacccaattcctctgttttcctatgctggctttgnaaaagatctgaaatttaagcccaacg

SEQ ID NO: 46324 - DNA, 272 bp, Glycine max
  unsure (1)..(272): unsure at all n locations; Clone ID: 701132054H1
gcccattgtgagggagaagccaactgttgaccttgttaaggtaacagatgaaatgaaggcattcaaagcttattataagcttcgtcttgaacgcaccaacaaacgccactacggtgcgcgcctaaagaanggccgcagaagcagagaaagaggacaaaaaatgaggtccttgagaagacagtttgtaattcatattatagttgtgaganaattttgtttgatgttctgcacccttagctttatggagatcatgagttttaaaacaccgctat

SEQ ID NO: 46325 - DNA, 261 bp, Glycine max
  unsure (1)..(261): unsure at all n locations; Clone ID: 701132056H1
tntctctcttgtncgganacaagtaantnctgttccgtnaaacncttccttantcatcantntcgtcnttccctatttcttctctcgcntctncctgattatgantatggttantattattagtatcatttcaattgtttcatgatttcttcgatttnngattctntctnggatgcattggagtatngatttcaactttgatgaatagctttctcacttttcattccaacacatacngnaccnannnanatngcaatgnnc

SEQ ID NO: 46326 - DNA, 258 bp, Glycine max
  unsure (1)..(258): unsure at all n locations; Clone ID: 701132062H1
atcaagaaccctaactacaaagggaaatggaaaactccatggatagataatccagaatttgaagacgaccctgatctttatgtgcttaagcctatcaagtatgtgggcattgaagtttggcaggttaaaggcggttcagtttttgacaatgttttgatttgtgatgaccctgattatnnaaaacaagttgttgaggaagtgtttgccaacagggagattgaaaaggaaggttttgaagaagcagagaaagtaaggaaa

SEQ ID NO: 46327 - DNA, 262 bp, Glycine max
  unsure (1)..(262): unsure at all n locations; Clone ID: 701132063H1
tnaaagcggggntngctganttcatctccaccttgatcttcgtgttcgcnggttcaggttccggcntcgcctacaacaagctcaccgacaacggcgncgccactcccgncggcctcatctncgcttccatcgcccatgctttcgccctcttcgtcgccgtctccgtcggcgccaacatctccggnggccacgtcaaccccgccgtcaccttcggcgccttcgtgggcggcaacatcaccttactccgnggcatcgtctacgt

SEQ ID NO: 46328 - DNA, 228 bp, Glycine max
  unsure (1)..(228): unsure at all n locations; Clone ID: 701132064H1
gataaggtgatcatagagcatattataaganagtgaaaactaatggnggttggcctcaagaaggagaacatggggtttgaggaaactgagttaaggcttggactgcctggaaacggaggcactgaagaagtgctcatcaggaagaggggtttctctgagactgaaactggtcatgaagatgagtctgccaccactgtggatttgatgcttaatctttcttctaaggag

SEQ ID NO: 46329 - DNA, 280 bp, Glycine max
  Clone ID: 701132067H1
ggagggaggaggatggtgtaataccatcagaaactgtgtctatagaaaaaatactcgtccgtggatcctcaaaatacatggaaaatcaaataccattcacgggaatattgagcaacaaacctgaagaaaaccctgatttctttaactggaatagagttaaattacggtactgtgatggagcatctttcagtggagatagtgaagatgagtctgcacagctccagtttcgaggacaaaaaatatggctagctgcaatggaggaattaatgtccaaaggaat

SEQ ID NO: 46330 - DNA, 269 bp, Glycine max
  unsure (1)..(269): unsure at all n locations; Clone ID: 701132070H1
tgtggagccggaggaaggtcacgcacttcgggagtggcgccgtcaaaatgccattcagcttgaggagaaggagataaggnaaaaagaaatgagactgaagattattgaggaagctgaggagtataaggtggctttctatgagaaaaggaagcttaatgttgagactaacaaggtgcaaaacagagaaagggaaaagttatacttggctaatcaagagaaattccacaaagtggctnnaaacaaattactggaaagctattggggagatc

SEQ ID NO: 46331 - DNA, 260 bp, Glycine max
  unsure (1)..(260): unsure at all n locations; Clone ID: 701132071H1
ggcaagcatattanttgaccatcacattnttanaatctggnagtngctatctgaaccaaacanaccactctcaaggttaatcaaatcatggttcttntcatttcaccagcttctacttttcttgttctgaagcaggggaaaatgacaatggtntnttggtagtggtaatttgtgaaacattgatttggtaaagatggcgtggagaaaagggtgtgangaagtggcnaattcgaagcctctgttccacacaacatacgact

SEQ ID NO: 46332 - DNA, 259 bp, Glycine max
  Clone ID: 701132072H1
gtccccataaggaggtatcctaggaaaagtgaagcaacatacccctcaaggtcaatgtatgtgtacgggtcaatatgggatgcatcttcttgggcaacagaggatggaaaatacaaagctaattataattaccaacccttcgttggtaggtacaaaaacttcaaactgcaaggttgcactagtgaaagctctgcctcgtgcaagccaccttctttctccccatctggctttggtagcctcagtcctcagcagtttaggg

SEQ ID NO: 46333 - DNA, 255 bp, Glycine max
  unsure (1)..(255): unsure at all n locations; Clone ID: 701132073H1
cagcaatggtgtactaacaaggctcagaaatcaaaagcctacttcaagagatatcaagtcaagttcaagagnagaagagagggaaaaaccgattaccgtgccaggattcggttgattaatcaggacaagaacaantataacactccgaaataccgatttgttgttcgtctttagcaacaaggacattgttgcncaaataatatctgctagcattgctggcgatattgttcttgctgcagcatatgcacatgagct

SEQ ID NO: 46334 - DNA, 258 bp, Glycine max
  Clone ID: 701132075H1
tgggaacttcctctcatggaatgagaggtttaatgtgattctcggaacagcgaaggccttggcacacttgcaccattccaacattattcactataacattaagtcaaccaatgtccttcttgatagttacggtgaaccaaaagtaggggactttggcctagcaagactgttgccaatgcttgatcgatacgttttgagcagcaaaattcagagcgcactcggctacatggcgccagagtttgcctgcaagacggtgaa

SEQ ID NO: 46335 - DNA, 253 bp, Glycine max
  unsure (1)..(253): unsure at all n locations; Clone ID: 701132077H1
gtaaccgtctctctntcatcatcgtatttatgtccattcacagtaccannccnactctcnctctctctctgattcttcttcactgnnctctctcngngnaaaaccgaggatccctcatagtatnggtcaaatattggctaatgtggatggggcattcatctatgtacnagcgcactccttcgagagataattcnaacatgnaggncgtggaagaaaactcagatctntnagacntcggcctggacaagggaac

SEQ ID NO: 46336 - DNA, 249 bp, Glycine max
  Clone ID: 701132079H1
gcttgttttgtttgttgctacagttttggtagcatatgaatgccatggctcagactaccagaagttccctctccaaatgacaactgggtttggtgggcaatacagcaatgaggtggcatgtgccagttggaggcttggcgtggaagcaaacaacgtagtcaagtggcaaactgttcctgcagcttgcggagagtacatagctgactacgttctaggagaccaatatagatcagattccaaaacagttaa

SEQ ID NO: 46337 - DNA, 271 bp, Glycine max
  Clone ID: 701132082H1
gtcgattgacataacacccgaatccaagtgaaacgacaaaacactcatcatcatggattcagttgcattaaatggcaaaagcaatctaagcctcttcacgttgccatgctcccatggctggccatgggtcacatatacccttacttcgaagtcgccaagattcttgctcaaaagggtcactttgttaccttcataaacagccccaaaaacattgaccgcatgcccaaaaccccgaaacacttagaaccattcatcaaactcgtgaagctac

SEQ ID NO: 46338 - DNA, 276 bp, Glycine max
  unsure (1)..(276): unsure at all n locations; Clone ID: 701132084H1
tggagttggacggcgttctcctcggcatgtgcaaccctctcctcgacatctctgccgtcgtcgacgacgctttcttgcaaaaatacggtatcaagttgaacgatgcgattctcgctgaggataagcacaaacctatgtatgaagaattngctaacaatcctaatgtggagtacattgctggaggtgctactcagaattcaatcagggttgctcagtggatgcttcaagcaccaggtgccacaagttacataggttgcatnggaaaggacaaatttg

SEQ ID NO: 46339 - DNA, 271 bp, Glycine max
  unsure (1)..(271): unsure at all n locations; Clone ID: 701132085H1
gtgctctgtgtctctacgatctggatccaacggtccaaaatgttcggggcttgtgctgcttgttttcccaggttttagagctccaaaccttcagatccacctcattcgtctccagatcttccntccttgataacgttttcgggttcgagaaggcacttgtttgtttgtcgtacgaaatggagactaaaccgagttcggtgatggttacgctcagttacggcgcgttgacgtgcgccgcggaagttctcgcgactttgctagcttctgctgt

SEQ ID NO: 46340 - DNA, 256 bp, Glycine max
  unsure (1)..(256): unsure at all n locations; Clone ID: 701132087H1
gtggctgcatcgaaagctgcaaaggctgcaaganctgcagccgaggaaaaagccgagactgcagcaaaggcagttgcagctgccaagagggctttggatttggttgcctctttctctgaagaggcagtgagcagcaaggagaggagcctgaagaagaacaagctcaagaagcacctcccagttcatctcttgtacaaaaaataccaacccattgaaaattgtgggactgatgaagaattggccaggaagttacatc

SEQ ID NO: 46341 - DNA, 92 bp, Glycine max
  unsure (1)..(92): unsure at all n locations; Clone ID: 701132088H1
ggattgttngangcaagttggcncgatgctgganatggcctcnatcatggactccaccattgggcttccttctacttctaccgattccaccg

SEQ ID NO: 46342 - DNA, 249 bp, Glycine max
  Clone ID: 701132090H1
gctacccactctcttcttccaagtccaaccacgcttttctctacagtcatgggcaaggtcaagatcggaatcaacggatttggaagaattggccgtttggttgccagagtcgctctgcaaagagacgatgtggagctcgttgccgttaacgaccctttcattaccaccgattacatgacatacatgtttaaatacgacagtgttcacggacactggaagcatcacgatgtcaccgttaaggacgagaag

SEQ ID NO: 46343 - DNA, 256 bp, Glycine max
  unsure (1)..(256): unsure at all n locations; Clone ID: 701132091H1
gantgatgtatcctagtcatgctcgcatgtggatggcacctatccggactgggatagtagatcacaaattgggcgattacgagtcgactatggatgattggcaccactttgttgatgaaacaaaaacctactatggtgttgatatgagcactttaacgaggcctttttcggaggagcagagaaaatactatctacagacatcattgtggaacaaccttcatccacatcaagtcgtaggaactgctggtataataaa

SEQ ID NO: 46344 - DNA, 253 bp, Glycine max
  unsure (1)..(253): unsure at all n locations; Clone ID: 701132092H1
gctgacacatacaaacatccatcatcattattattttactccgaacgagttgacacngattccactcactcaaccatncanccgattcaggngttttgagctcatagaacaaccacctttcttccactcctgctactctttccccttccttcgtcctccaagactcactctctttcgacctcgacctcttgccatntcccagccacntcgacgctttcgcagatctggtgcacgcgccgtcgttcgcttaccg

SEQ ID NO: 46345 - DNA, 251 bp, Glycine max
  unsure (1)..(251): unsure at all n locations; Clone ID: 701132093H1
gagaagcgtgaganacttctcgtttatgatgagagctaagatagtttagttgtcaagtcataaatcagtatcatcactttaaatttcattagaagctgtcaaaatgtcacggaagggtttgatggagcaagacctgagtaagttggatgtaacaaagttgcatccactttctctagaagtcatatctcggcaggctactattaatatcggcactataggtcacgtggcccatggcaagtcaacagttgtga

SEQ ID NO: 46346 - DNA, 262 bp, Glycine max
  Clone ID: 701132096H1
tgaaaactggctatggtgagcgttcttcggaggtaaaatgcgcaagttttaggcttgctgtggaagcacacaacatccgagcctttaaaaccattcctgaagagtgcgttgaaccaacaaaggactacattaatggcgaacaatttagatcagactctaaaacagttaaccaacaagctttcttttatgctagtgaacgcgaagtccatcacaacgacatatttatattcggcatagataacaccgtactctctaatatccc

SEQ ID NO: 46347 - DNA, 168 bp, Glycine max
  unsure (1)..(168): unsure at all n locations; Clone ID: 701132101H1
gagagtttgggtttggtctctccacggtctccttggtgacccnaccgtgattgccccatcgaatgctcagttcctagatacatatgttcacgctgctgatggtactccgttactcatcaagaacgcaatctgtgtctttgaacaatatggcagcatcatgtggcgtca

SEQ ID NO: 46348 - DNA, 198 bp, Glycine max
  unsure (1)..(198): unsure at all n locations; Clone ID: 701132102H1
gtctgtcaggagcttggcttacaggggcanaatgtcngagtagcactcttggagacagacagctattacttccgagcacgnttagcaaaattctggatgttgtaaacagtgacaacttgtcaagggcaattgagtattattccaattttgtcagggatgctcacattgaaaaggatagatctttgggagacgtactac

SEQ ID NO: 46349 - DNA, 178 bp, Glycine max
  unsure (1)..(178): unsure at all n locations; Clone ID: 701132108H1
ttcacctccatcttttaacagttannccttcgaaacttctncngatgggtggcattgcattcggacgcttggatgattctttcagtttaacctcaatcaaggcctatattgctgagttccattcaaccttgctctttgtttttgccggtgttggttcagccatagcctatggtaagtt

SEQ ID NO: 46350 - DNA, 197 bp, Glycine max
  unsure (1)..(197): unsure at all n locations; Clone ID: 701132110H1
gtcaaatcnaaatatggcactttcttcttcatcatcttcaacatccatatttgctttagctttgttcactcttttgcttataggaagttcttcagctcaactctctgagaacttctatgatagtaaatgtcccaaggttttctatgccgtaaaatccgttcttcaatctgctttggctaaagaacctcgccagggag

SEQ ID NO: 46351 - DNA, 99 bp, Glycine max
  unsure (1)..(99): unsure at all n locations; Clone ID: 701132112H1
tcngaggtggtntgttccanatncacaatgancggcgattncagacncncaatnaacaaccaagaccaaaggaagaaacatgnatacacggaagaacag

SEQ ID NO: 46352 - DNA, 197 bp, Glycine max
  unsure (1)..(197): unsure at all n locations; Clone ID: 701132114H1
gctcanaactgctatacttaacaattanacaacatactagagcatcctgngattaatanataatacgatttttttgtgatgagcaaanattgcaaaaggatataggatgggcccacttctatcatcttgaaaaaagcaccaagatgccctggttgtctaataaccattcagcagacgatgcccttcttcttgctatt

SEQ ID NO: 46353 - DNA, 193 bp, Glycine max
  unsure (1)..(193): unsure at all n locations; Clone ID: 701132115H1
acagaagaacaacaacngaggaananagaaaaagnanaatgttagnggtgaagagaatcggtgtggtggggagtggccanatgggatcgggaatagcccaagtcgctgccatgcacggcatcgacgtttggcttcacgacctcgaccctcaagctctctccaaagcctcctcttccatctcttcctccatcaa

SEQ ID NO: 46354 - DNA, 191 bp, Glycine max
  unsure (1)..(191): unsure at all n locations; Clone ID: 701132116H1
tnaaccaccacacctcnccctcgttcacgctacccctttctgctcttncttctacctttccaagttttaaaagtntaaagatggcagagacattcctatttacctcagagtcggtgaacgagggacaccctgacaagctctgcgaccaaatctccgatgctgtcctcgacgcttgcctcgagcaggaccca

SEQ ID NO: 46355 - DNA, 194 bp, Glycine max
  unsure (1)..(194): unsure at all n locations; Clone ID: 701132118H1
cttttatcatatatagtattagtatagtccacttgtttaaaccacctgtgttgcatattctgaatccctntcatcttgtggctttgntgtctagagcattggaacatgattacatagggttggcngagaatccgtcaatggatggtaaaaactcatcatcactgaacttgnaggagacagagctgaggcttggc

SEQ ID NO: 46356 - DNA, 195 bp, Glycine max
  Clone ID: 701132120H1
gtttccttcttcaccgcatcaatggagttggacggcgttctcctcggcatgtgcaaccctctcctcgacatctctgccgtcgtcgacgacgctttcttgcaaaaatacggtatcaagttgaacgatgcgattctcgctgaggataagcacaaacctatgtatgaagaattggctaacaatcctaatgtggagtac

SEQ ID NO: 46357 - DNA, 194 bp, Glycine max
  unsure (1)..(194): unsure at all n locations; Clone ID: 701132123H1
cgcgttcactgcaatgttatatcccctactcatcagttctatgggcattattgtctgtttgattactactctntttgcaactgatttctttgngatcaaggctgtcaaggaaattgaaccagctctaaaaaagcagcttatcntctctacagtactcatgnctgttggaattgcnattnttagttggattgctc

SEQ ID NO: 46358 - DNA, 63 bp, Glycine max
  unsure (1)..(63): unsure at all n locations; Clone ID: 701132124H1
ctcgcgncggattcnangctcttcgancctattttcaccactttaantgnggtaagaaggngc

SEQ ID NO: 46359 - DNA, 193 bp, Glycine max
  unsure (1)..(193): unsure at all n locations; Clone ID: 701132125H1
tntttctcttttctgagtcgcgataggnttacttcttcattggctacnnnncattgccttggccatcctccgggatgaatttataccacaactcatttttatccttaaacccaccattccaaaccagaattcaacttcctttttctgcaaatattccattttcacaccctctcacttcaatctctccccactt

SEQ ID NO: 46360 - DNA, 196 bp, Glycine max
  unsure (1)..(196): unsure at all n locations; Clone ID: 701132126H1
ggtggntccgtgtnatgntgataaanagatttgactacactgcacatgttcccttcttgtcttcnancagaaanaagaaaaaggcagccatcatcatttgcttttgaattctggttttacnnatttttagatctttcttgtgtaatggttgtttttcagtttcagtgtcctatatatcattctgtngttacctgtt

SEQ ID NO: 46361 - DNA, 197 bp, Glycine max
  unsure (1)..(197): unsure at all n locations; Clone ID: 701132127H1
gngaatctagacatgcaaatagntccagagacaaaagaataacaaagcgttcactgacacttttgaccacttatcctggttcctngtnaggctntnattagtctatcacattaactttgtcattgngttttgtttctaaaattgcatagttaattcatttttgctctgcaggttctgattgccattttattatgccc

SEQ ID NO: 46362 - DNA, 192 bp, Glycine max
  unsure (1)..(192): unsure at all n locations; Clone ID: 701132128H1
ggnattctccattcacacgttgaagcttttgacgtcatggctacaccattggtgaccagggattgcngtggcggctgcggcttatgctggtagatatggtatccnnncttggcaagcattcaaagctagaccaccgagtatgcgtnnattttatganggtggtttccaggctaccatgactagaagggaagc

SEQ ID NO: 46363 - DNA, 187 bp, Glycine max
  unsure (1)..(187): unsure at all n locations; Clone ID: 701132130H1
gaaacttttctcttctctttgattcttctctaccagtgtaccttacctncgatggtnaacatnnngcgaganngnggtttcttcattttctaaactttccctctcgttttgnttcttcaatacatttcaggtaacaacatccttcgttctatgcttctttgcttccccaaaganattagggttatta

SEQ ID NO: 46364 - DNA, 171 bp, Glycine max
  unsure (1)..(171): unsure at all n locations; Clone ID: 701132132H1
gttattgcatccagactgtattantactattcgtatagctntgagcttacaggagatcttgctgaaattcggggcaacctccttgcattgcaccgatttgcgactctccgccatgatgagctgggacaggaaacacttcttaatttgttacttcgaaactaccttcactac

SEQ ID NO: 46365 - DNA, 192 bp, Glycine max
  unsure (1)..(192): unsure at all n locations; Clone ID: 701132133H1
tgnggcatcaccattgccacaatggttacaggtcgccaaaggagaacgnctaagactctaagtccaggggttcnantcntggntacaagnggtccacgtcanatcaatacccangcacctccctaatccagattgagatgtaaactctaaggaagnngttgcgtggtactgtgggnagcgcatggcttacat

SEQ ID NO: 46366 - DNA, 196 bp, Glycine max
  unsure (1)..(196): unsure at all n locations; Clone ID: 701132134H1
ggcatcatatcattggaagtgtantagcactccacaacttgnttnaccaacaaggtgagntacactcccctaaaattttgctggcatgtatcattgatgtttgctgattactttatattttggatttgttatcatattatgnaaataacagttttgcaaggttggagaaaaaaacttantcctccatttgtntatt

SEQ ID NO: 46367 - DNA, 190 bp, Glycine max
  unsure (1)..(190): unsure at all n locations; Clone ID: 701132136H1
gaattacaggnaaacctgaagagcagattgnattggacactgantgtgcataattttatgnatcttgggaagctaaggnatatggtttagttgatggtgttattgatgatggaaaaccaggattggttgcaccaattggagatgcatctccgccaccaaaaactcgggtatgggatcagtggaaaattgc

SEQ ID NO: 46368 - DNA, 196 bp, Glycine max
  unsure (1)..(196): unsure at all n locations; Clone ID: 701132137H1
tcganccgagcagccaaacactctctctctgtctctgcggcaaattctncagtttgcagagaanatctgaatcatgtcgtggcaagcgtatgtcgacgatcancttctgtgtgacatcgacggtaaccactacactncacgctgctatccatcggccannacggcagcgnttgggatcagantaccgacttcnctc

SEQ ID NO: 46369 - DNA, 194 bp, Glycine max
  unsure (1)..(194): unsure at all n locations; Clone ID: 701132138H1
gggcgcctcaccgcaactgcaantgaggttgaagtcctctttcatcggagatcgtctctttacgctgttcaattcaaggcaccaacctcttcctcaactattccgttacaaccctggaaccaagcatgtttcgatgcagttatctagaacactttctggcttgaccaatctcttttttaatagaaganatttgg

SEQ ID NO: 46370 - DNA, 189 bp, Glycine max
  unsure (1)..(189): unsure at all n locations; Clone ID: 701132140H1
gggctcnngnggntcaagcngattnacttggngctaataacnggattgatgctgttgcanggncgccttacggcgccctggtcgatntcaccgnngtntnactttcctctgcctggttgtgaggcacgtggtgagntattagncattcacactcgtaagtggaagcatcctccttccaaatgagctgaa

SEQ ID NO: 46371 - DNA, 193 bp, Glycine max
  unsure (1)..(193): unsure at all n locations; Clone ID: 701132141H1
gtgttatccttccttgctatcttatggcctggatgattcgcatannnncngcatctngnggcaaagacaagttataaccctgtgcttattctaatattgaagtntttgtattgttttcatttcatttttncctttttcatattttgattaatcatatgatgccgtttggtaggccacttaagatgataagatt

SEQ ID NO: 46372 - DNA, 143 bp, Glycine max
  unsure (1)..(143): unsure at all n locations; Clone ID: 701132142H1
aaagttccgtgcttttgtttgtaancatgaagnanttgantgttgattctctgggtgtctcatgccgatttgtcaccaacaggttaattgacaaattgaaattcggtntaatttatttccatnattcaaatcagaaacagtcc

SEQ ID NO: 46373 - DNA, 192 bp, Glycine max
  unsure (1)..(192): unsure at all n locations; Clone ID: 701132143H1
taccacccacccttctcccatccctacactctctcgacgcanccctaagcttcnctttcaatctgatcagctcctttcgtggttgcgcgaaaccctaatttngantctgcacaacatgtctgcagctatggatatntcgntcgcagacntaatccacnaacaacanaaantctggntccggacgttcccgtg

SEQ ID NO: 46374 - DNA, 190 bp, Glycine max
  Clone ID: 701132144H1
ctcgtcttcaacgccgtcggcggtggcctcggttccggtctcggatctctcttactcgagcgtctctccgtcgattacggcaaaaaatccaaattagggttcaccatttacccttccccacaggtttcaaccgcagtcgttgaaccctacaacagcgtcctctccacccactccctcctggaacacaccg

SEQ ID NO: 46375 - DNA, 189 bp, Glycine max
  unsure (1)..(189): unsure at all n locations; Clone ID: 701132146H1
tnagagcagtacgtgtacttngcgannctgtcggagcangcggacggtacgaggagatggtggagttcatgcagaaggtggtggtggggtcgacgccggcgtcggagctcacggtggaggagcgcaacctcctctcggtggcctacaagaacgtcatcggctcgctgcgtgccgcgtggcgcatcgtct

SEQ ID NO: 46376 - DNA, 188 bp, Glycine max
  unsure (1)..(188): unsure at all n locations; Clone ID: 701132150H1
gngaatatgaagttgtttgttttctttgttgctgcagtagttttggtagcatggccatgccatggcgcaggctaccaaaggttccctctccgaatgaaaactggctatggtgagcgttcttcggaggtaaaatgcgcaagttttaggcttgctgtggaagcacacaacatccgagccntaaaaccatt

SEQ ID NO: 46377 - DNA, 192 bp, Glycine max
  unsure (1)..(192): unsure at all n locations; Clone ID: 701132155H1
gggaagctgcagtaactgttgatgtntttgtaaaccaggactgggagnaggacttcccaaaagatcccttccgggagttttgatccagttcaagaattttatcaggtcaaattatgagatgtgcaaatgggtaggcctgtcacttgtttctgtacagggactctctttattattggcaatgatactcaaagc

SEQ ID NO: 46378 - DNA, 190 bp, Glycine max
  unsure (1)..(190): unsure at all n locations; Clone ID: 701132157H1
cttcaccatgtcacttgctgggaaaatcaccactgaaatcggggtncatgcaaccggtacaaagtggttcnaacctcttcgcaacacaactccatcatgttcaaaacctaactgatagagtgcatgganccaagctgcatcaaggtgaagactggcatcacnacgagaccgtcaagcactggacttatac

SEQ ID NO: 46379 - DNA, 192 bp, Glycine max
  unsure (1)..(192): unsure at all n locations; Clone ID: 701132158H1
tctttgcattccaaatggccactgttntngttgcacaacaaanancaacaactgtgnncagnnantncnagcnaacgaggtacaccaagattgaggnaactaccccagaacaaccncctncccaggttactaccaccgaanaaccaaaggnngaaaccancanagaancnaaagaggnagaagaagccccag

SEQ ID NO: 46380 - DNA, 179 bp, Glycine max
  unsure (1)..(179): unsure at all n locations; Clone ID: 701132162H1
gcnnggcactgcncctnctttttggacccaaggtcggtttcgnccggtcgatcagngcggaagacattgtncngtggggngtttggctggggcggcacatctgttaaaagataacgcaggtgtcctaagatgagctcaacgagaacagaaatctcgtgtggaacaaaagggtaaaagct

SEQ ID NO: 46381 - DNA, 185 bp, Glycine max
  unsure (1)..(185): unsure at all n locations; Clone ID: 701132163H1
ttaccttaggtcttccgaattcgaagttaatttgcaagatggctaaggaaaaggctcagatcaaccncncggtggttggtcatgtggaccctgaggaggcaaccaccattaacgagctgaagaagcctgttgtggagaaagaagctccaggncatgccatatgagggcatgcacgtacggcctcg

SEQ ID NO: 46382 - DNA, 189 bp, Glycine max
  unsure (1)..(189): unsure at all n locations; Clone ID: 701132166H1
gtccttcggggcctcntccccgggcgtcgaacagtcanctcagaactgcncacggacaangggacatccgactgtttaattanancaaagcattgcgatngtccctgcggatgttgacncaatgtgnttnctncccagtgctctgnnngtcanagtnaagnnattcaaccaagcgcgggtaaanggcgg

SEQ ID NO: 46383 - DNA, 185 bp, Glycine max
  unsure (1)..(185): unsure at all n locations; Clone ID: 701132167H1
ttatcccctttctccttctaacgagtgaggcaaaatggngcgtaagnagatncagagngtatgaactccacagangttantgccggagcactttaananacncnctggcaaggagttgcagatacaagtctgaacaagttaccgccgccaacngntttnnnngagntacaagagaaggaanccng

SEQ ID NO: 46384 - DNA, 191 bp, Glycine max
  unsure (1)..(191): unsure at all n locations; Clone ID: 701132169H1
atgagcaacccatttgttagaagttgantangatcagcgttngaantattcanncttgttccntcctcgttcangtnatggcgagtgggngggttccgtcattgcaatgcnagtccagagcataccaagncgtntatcatcccagttccagctgcagaaacaccgttcagaacatccagagacgtagtcgt

SEQ ID NO: 46385 - DNA, 188 bp, Glycine max
  unsure (1)..(188): unsure at all n locations; Clone ID: 701132170H1
ggtccaaatacttcttctctgtgtaaaaacatttagcactgnggaagaagctattgatctagcaaatgacaactgtctctngcttgggttctgctgtaatatcaaatgatctagnangatgtgngcgcattactaaggcttttaaggctggaattgtgtggataattgctctcaaccatgcttcactg

SEQ ID NO: 46386 - DNA, 187 bp, Glycine max
  unsure (1)..(187): unsure at all n locations; Clone ID: 701132171H1
gcactggcctaagtgggtgtaagtgngtcttgggagtgagtnactcttcctgcagaacccagatcngtagaccatatgggaancactggtttgctacatttgatatgccttgtcattgctttagtaagtgtgtcgcttgtgcaagcagangatgcgtataagtatttcacatggacggtgacttatg

SEQ ID NO: 46387 - DNA, 189 bp, Glycine max
  unsure (1)..(189): unsure at all n locations; Clone ID: 701132172H1
gggcgcaacgccctncgacctattctcaaactttaaataggtaggacggtgcggctgctctgttgagccgcgccatggaatcgagagctccaagtgggccatttttggtaagcagaaccggcgatagcggggttggaaagacctcgttgatgaatcaatacgtgcacaagaagtttagtcagcaatata

SEQ ID NO: 46388 - DNA, 76 bp, Glycine max
  unsure (1)..(76): unsure at all n locations; Clone ID: 701132178H1
ttcgcgncagtacgtgtncttgggcgcnntgctcggagcnngcggagcggtacgcggcanatnagtgaacgtcncc

SEQ ID NO: 46389 - DNA, 183 bp, Glycine max
  unsure (1)..(183): unsure at all n locations; Clone ID: 701132182H1
ttgggccttggtgttgagtactacttgcantacacacttgtgttngttgttctatcaggagtnntggntcttgcantgtatcatttgttgattcaaaggttcangcttgagtattttcgtcgagtgacggctgntgggtatncctgtgttgtttttgggtggatgacaantctttctgtgaag

SEQ ID NO: 46390 - DNA, 186 bp, Glycine max
  unsure (1)..(186): unsure at all n locations; Clone ID: 701132184H1
gttcctctcgcccagaatccgagatcaaccctgacccctaaggccaggggtttttcncggcttcttcagattccctgaaatggcgtctgtttcagctttagccaagtacaagctcgtcttcttgggtgaccaatccgtgggntaaaccagcatcatcactcgcttcatgtacgataaattcgataa

SEQ ID NO: 46391 - DNA, 187 bp, Glycine max
  unsure (1)..(187): unsure at all n locations; Clone ID: 701132185H1
gttnggttctgcacgctctgcttccagcgagtgttctttcttcgtttcaacaccttanatttgcacacgctgcttcttcagcttgagaaatggcacaagaaacctttctattcacatctgaatctgtaaacgagggtcaccccgacaagctgtgcgaccagatctctgatgcagtgctcgatgcgtg

SEQ ID NO: 46392 - DNA, 185 bp, Glycine max
  unsure (1)..(185): unsure at all n locations; Clone ID: 701132186H1
tcaaactcattgcttcactaccaatccacccatccaaaacttgcttcgtccatcgcttgatgcgaatcatgcacnattctggcttcttctctcaacaaaagcatgacttggagaatgagctagaagccaagtatgtgctaaccgatgcatctgtactattgcttaagaaccataccgatgagtgt

SEQ ID NO: 46393 - DNA, 187 bp, Glycine max
  unsure (1)..(187): unsure at all n locations; Clone ID: 701132193H1
tnnnatntggcngntaaacgncttcatctnttctcttctgctncatnnnannaatnccanatntncaaggagccacagatngnnaaaggntataggatgggcccacttctatcatcttgaaaaaagcaccaagatgccctggttgtctaataaccattcagcagacgatgcccttcttcttgctatt

SEQ ID NO: 46394 - DNA, 266 bp, Glycine max
  unsure (1)..(266): unsure at all n locations; Clone ID: 701132201H2
ctcttactctctctgtaacaacaccaccatcaacaaccctttcaagccggcctaaaccccattacccaaaannnnnnnnnnnnnnnnnnnnnnnnnnccngcaacactctttatnggatcatctngtatttcattccncctttacaattncctttcaaaaaaaattttaaaaaatattaaaangngctcttttttgngaattttgncccatttggccacngacagatttcgatcttctccgngccaaagttgnaatcttttcgact

SEQ ID NO: 46395 - DNA, 273 bp, Glycine max
  Clone ID: 701132202H2
ctcaggcgttcattaggttgtcaattggttctctggggttgcgatgcactggaattgaactgagcactgcaaaatctggaattcaaacactctctttaccttgtgtttgtgagatacggcttcgaggttttcctgttcaaacatcatcaatccccttgatatcctccacagaagttatacctgatactcagaacgttgcttctagcttttatcttgaggaatccaatttaaaagcgttgttagctcctggttgcttctacaacactcatactt

SEQ ID NO: 46396 - DNA, 273 bp, Glycine max
  unsure (1)..(273): unsure at all n locations; Clone ID: 701132203H2
caanatgagccttgctagctagaggtccggccctgcttccaggaaacatcaaaggncggagatttcaaaattnttaaccacattattgcataaatttccttaagagattcagtctaaatgatatatgttcatagcctcatcactcatgtatagcatgacattgtactgaaggataatgcatttattgcttggtagatcaaattacccttacagtactttcttcgtcttttttttatttgttgaagttgttgacagcaaggtccaactacctat

SEQ ID NO: 46397 - DNA, 96 bp, Glycine max
  unsure (1)..(96): unsure at all n locations; Clone ID: 701132204H2
cgtagagcctcatccttacaaaaaatcttncgtagcttctntctcttcctcctnntntgggtcgtgagtgtacacgcatcacgcatggnagctttc

SEQ ID NO: 46398 - DNA, 269 bp, Glycine max
  Clone ID: 701132205H2
aaagtcggttcataactgccgtggctttcttagccatcggagtgatattctcaccggagacactggggtcaaaatcaaccacactttccacctacctcaaactcgctcacctcctctgcttctccaccgccttcggcgccgctctgtgggtaacattcatcggcggcatcatcatgtttaaaaatctgccgcggcatcagtttgggaacctgcaaagcaagatgtttccggcgtatttctcgatggtgggtgtctgctgcgccgtatcg

SEQ ID NO: 46399 - DNA, 271 bp, Glycine max
  Clone ID: 701132206H2
gaaaagtaaacactgcaatagcaagagttttcaaatggcagagggaaaaggtagagtttgtgtcacgggaggcactgggttccttggttcatggatcatcaagagactccttgaagatggatatgctgttaataccactattagatctgacccaggacgcaagagagatgttagcttcctcacaaacctacctggtgcatcagaaaagctaaaaattttcaatgctgatctcagcgacccagagagttttggtccagcagttgagggttgt

SEQ ID NO: 46400 - DNA, 270 bp, Glycine max
  Clone ID: 701132207H2
cagacacagagagaggggtttgggattggagggattgacgctgcgtctcttcctcttctctttcgatccatccctcattcctaatcctccaatccaaccacctcagcctcacactcacatatacacatatctgaacgcgtatcgtccctcctatggcttcaaagcgcatcctcaaggagctcaaggacttgcagaaagacccaccaacttcttgcagcgctggtccagtagctgaggacatgttccattggcaagcaacaataatgggtc

SEQ ID NO: 46401 - DNA, 270 bp, Glycine max
  Clone ID: 701132208H2
cttcaaacaactggaatatttactgtgtcactgtttcaagccttgaatagcctcaagaattccttgagaatgagtgactcgtgacaagtagtccattcagataaaatgaaaaacatctcaagctatatattagacatatacatcacaaacttcatttactatgtatgaaagacctagagagaactggcatagtttaagggctttatttagtttcttcttttattcaatatatttattatcaggtatgtgtacatctaagagagagatatc

SEQ ID NO: 46402 - DNA, 272 bp, Glycine max
  unsure (1)..(272): unsure at all n locations; Clone ID: 701132209H2
cntaggtcnggncagtcctcttctaggcaccatgcactcagcngncggaagcaacanctntcgnccnttgtggnccggccccagtctanaattgatccagaaganattagagcnccgagcaaaacaagctgcacaagatcagcagcgtatgaaggttggngtttnattttttaagttctgacatttatgattgttttaatcctgttttgtggctctttaagcacaatatattgtgcaaatggcttttaactgaatgatttnttngagtttta

SEQ ID NO: 46403 - DNA, 266 bp, Glycine max
  unsure (1)..(266): unsure at all n locations; Clone ID: 701132210H2
agaggttaaagagacggcaacactttgctgtccgccttgaccgagcagagcttcgtcttggccctcgattttgccctaaagtactctcagtcacaacagacacnnnnnnnnnnnnnnnnnnnnnnaatggcaccgaagcagaccaaggctgagaagaagatcgcttacgatgcgaactgtgcgacctaatggaggagtacggccagatcctcgttgtgaactccgataacgtgggatcgaaccagctccagaacattcgcaagggt

SEQ ID NO: 46404 - DNA, 269 bp, Glycine max
  unsure (1)..(269): unsure at all n locations; Clone ID: 701132211H2
gtctttggatctctctctctgcgtctcctctgagctccagatcctctgctgtggagcctttctgnctccgctacacccccaatttcttctcctnctcgcttanggttttcatctccatttccgaaaccggttaaccggttcaattttttctgttttcgtgctgaattttgaagtcgcagntcgatcttcgatctggggtttcgggtnnantgaccgacacggtaggtagccggtgacgttgctttgtgttggatctgttccnagaaaaa

SEQ ID NO: 46405 - DNA, 259 bp, Glycine max
  unsure (1)..(259): unsure at all n locations; Clone ID: 701132212H2
ggagcatttaaagatggcaatcaaanagatccagccatcagaagttcactcctacccaaagctgtcaacaaaatttcaaagggcagtccactgctgtgatataaaggatgaattcaatgatatgcagtgcgacagtagatctactcagttcaacatttggaagttcataaaatcttgcacatcgttcctctatcagattccatttgtcatctttaatttgagaactgctcaaagtagttaaccacagtcctcagagaaa

SEQ ID NO: 46406 - DNA, 268 bp, Glycine max
  unsure (1)..(268): unsure at all n locations; Clone ID: 701132213H2
caattgtcgtttttgcttttgaaagggtctcacttctcttgtgtctgtnacactctgctctttttctntttctaattttttgtgattgtccaatctcctgtgatttaagattgatgaaagtgacgcacaacatctgaaggagcccataaatttgttatttntttgtgatcccattgtgaattgtggggatctgaattgcgaagatgatccagcttctgttcacggtgatattttcggagacggcgatgatagcgttgcttctgttcaa

SEQ ID NO: 46407 - DNA, 268 bp, Glycine max
  unsure (1)..(268): unsure at all n locations; Clone ID: 701132214H2
ctcttttcttttaggtttccactctcacacactctncctctnctctttctctgcaataatctctcttctcttcttcactctctcaactcctgccaaacccccatttccgcagatgaagggcagtgccatgcctcgatggtagcatctgcatcttcaccatccctgaactgtttctccctaaatgangccggatttaaagaatgcnattncctggnattgttagattgctcttcggtggacagttctactgtcccgaatttgtctgatg

SEQ ID NO: 46408 - DNA, 268 bp, Glycine max
  unsure (1)..(268): unsure at all n locations; Clone ID: 701132215H2
gccccgacaagaccgtctccaccgacgatgtncccgaaaccacacccttagacggtcatttcctgcgctacaaatggtgagtatcgtgtacagaatgataaaaaagttgctgtctgtagcatacatccatcagagcaagccaccctgcaatgcctaggctgtgttaaggccaaaatacctgtttccaagagttaccattgcnccacaaagtgtttttcggatgcatggcagcatcatcgtgtcttacatgatcgtgccgcaagtgctc

SEQ ID NO: 46409 - DNA, 268 bp, Glycine max
  Clone ID: 701132216H2
cagcattccatacgaggccgaagggaagagtttttgttgggtttgggaggctaagtagggtttgcgttgagaaagagagagatgggaagagaaaaggagacaacaaaggtagcttacacagtggagcagcttgtagccttcaatccatacaatcccgatattcttccagatctcgaaaactatgtcaacgaccaggtttcgtcgcaaacttacagcctggacgcgaatctctgccttcttcgcctctaccagtttgaaccagagaaaa

SEQ ID NO: 46410 - DNA, 276 bp, Glycine max
  unsure (1)..(276): unsure at all n locations; Clone ID: 701132217H2
cctgtctatcctctttctccctctccaattncctctgcacctcttcccatttcnatttgttcttcatcttcccaccttnctaactanacgaatannatgcaaacccaccaaacgtagcaaaccaaaacgccaccacgtttcgaaagtgacatgcaacagtaaccaaaacacnccaacaccaaacccagaagaagaaagaccatcatacaacattctaggaaaatatagaagggatgttcnccttggcattgggggcctttacggtgcatctgctct

SEQ ID NO: 46411 - DNA, 269 bp, Glycine max
  Clone ID: 701132219H2
gaagaaagcatccaatagtttgaaagggaaggttaaactgggccatgttgactgtgatgctgaaaagtctctaatgagcaggttcaaagttcaaggattcccaactatcttggtgtttggtgctgataaagatagtcctattccttatgaaggcgcaagaactgccttggctattgaatcatttgcattagagcagctggaaacaaacgttgctcctccagaagtgacagagctacacagtccagatgttttggaagagaaatgtggtt

SEQ ID NO: 46412 - DNA, 267 bp, Glycine max
  Clone ID: 701132220H2
aaaaaaagggccgttattgttgttaccatccaaaaaatggccggtcttgttgtttcttcccaatgctttctcaaactcttgcttgtagtttcagtctttcatgtttcctttgctgctaggaggttgaatgagctggttcaggaccagtctcagttgctacattaccacaatggtcctcttctatacggcaaaatcgccgtcaacctcatctggtatggtaacttcaaaccatcccaaaaggctatcatcaccgatttcgttacctca

SEQ ID NO: 46413 - DNA, 270 bp, Glycine max
  unsure (1)..(270): unsure at all n locations; Clone ID: 701132221H2
caaaaattaggtttttttgtggcatataaaaagggttctgcttgctgcaatcggattcactccgcagctgcagagctncaaaaccctaganaggaggaagagagagcgtgcaagttccggccaccaccgaccatgacattcaagcgcaggaatggaggtcgcaacaaacacggccgcggccacgtcaaattcatccggtgctccaactgtggcaaatgctgtcccaaggacaaggccatcaagaggtttctggtgaggaacattgttgaa

SEQ ID NO: 46414 - DNA, 268 bp, Glycine max
  Clone ID: 701132222H2
ccaatgcaaattttagggacatagacgtggagaaagcccggtttggttcccattggttagatagttggatggaagaaaattcatggagacaaactagagatgcttcattaaaaattggacgccttgatgatgagaagagtgacaagattcttgaagtggatacttggaagccacacttgaactcacaccatagtagtggcagctcatatcagacatcatcacatcattacttgtattctgattacaacaatgagaattttgtggcata

SEQ ID NO: 46415 - DNA, 267 bp, Glycine max
  unsure (1)..(267): unsure at all n locations; Clone ID: 701132223H2
gttggttgangcttccgctatcctcatatggattgcttcagcccttcatgctgctgttaactttggacagtatccatatggaggtttaatcctaaacaggccaactattagcaggagattcatgcctgaaaaggggtctcctgaatatgatgcgttggctaagaaccctgagaaggagtttttgaagactattactggcaagaaggagaccctcattgaccttacagttatagaaatcttgtcaaggcacgcatctgatgagttcta

SEQ ID NO: 46416 - DNA, 268 bp, Glycine max
  unsure (1)..(268): unsure at all n locations; Clone ID: 701132224H2
gccgctcccacttctctccctctctattgcagcatggtgtcttcctcccaacacattctgntcaccggtggtgccggtttcattggcacccacaccgtcgttcagcttctcaaagctggcttcagcgtttcaataatcgacaatttcgataactccgtcatggaagcagtggaccgcgtccgccaagtggttggccctctgctttctcagaacctccaattcacccagggcgatctccggaatagggatgacttggagaaactcttct

SEQ ID NO: 46417 - DNA, 266 bp, Glycine max
  unsure (1)..(266): unsure at all n locations; Clone ID: 701132225H2
cgtccggctgctgctgttagtcgacggagctctcctactattcaaaacagaagctatgaaatcgttcaatataantggaaccacttctttctgttgcactctacactgacgtaacaaattcaaaagaactcttggaaagtatgcaagccgggacattggagccagaagttgcattcctcaatgctttacttattccagatattttccctgttctagcagctgcacacaaaacacttgtagccaagtctcgagactctttgaccaca

SEQ ID NO: 46418 - DNA, 264 bp, Glycine max
  unsure (1)..(264): unsure at all n locations; Clone ID: 701132226H2
acttgatcggtctcttaaacttcctaacattcctgctgtcgattccgatcctaggaggcgggatatggctgagcagcagggcgaacaacaccgactgcctcaagttcctgcagtggccgcnnnnnnnnnnnnnnnnnnnnnnnatggtcgtgtccctggcggggttcgccggcgcgtgttaccgcaacaccttcctcatgcggctctacctcgtcgtcatgttcctggtcattgccgttctgatcgggttcatcatattcgcct

SEQ ID NO: 46419 - DNA, 264 bp, Glycine max
  Clone ID: 701132228H2
atccactcagagagctagaagaattcaacaatgcctcgctatgatgataaatacggcaatacccgcctctatgtgggacacttgtcttcgaggactcgttcccgtgatctggagcgtgcctttagcagatatggaagagttcgaggtgtggatatgaagaatgatttcgcttttgttgattttagtgatcctcgagatgctgatgatgcaagatataacctggatggtcgggatgttgatggaagtcggattattgtggaattt

SEQ ID NO: 46420 - DNA, 264 bp, Glycine max
  unsure (1)..(264): unsure at all n locations; Clone ID: 701132229H2
ctctgctgtccgtacaccactttctcccctctcaaaggagggnaaagatcggttgcttgagtggtgtcagaacttcattttgtggtcaagttgtgtgcaattcaagtttctgtgggagacaaataactagaagccatggaaaccgtcttgttgttcactcactgcttggaaggaaggtgaagtctgtgaagagcagagagactgtaattcctgaaccagattacaggattccaattgtgctactcggtatagctggtggattgg

SEQ ID NO: 46421 - DNA, 264 bp, Glycine max
  unsure (1)..(264): unsure at all n locations; Clone ID: 701132231H2
cagtagtgtcatttacgcttctcttctctgcagcaactatgcctaaccctaaggtcttcttcgacatgaccatcngcggtcaatctgctggccgcatcgtgatggagctctacgccgacgtcactccccgcaccgccgagaacttccgcgcgctttgcaccggcgagaagggcgtagggcggagggcaagcccctccactacaagggctcgtccttccaccgcgtgatcccgagtttcatgtgtcagggtggcgacttcaccgc

SEQ ID NO: 46422 - DNA, 268 bp, Glycine max
  Clone ID: 701132232H2
aagagagccctaagaagcgcacacgcgcttcgcaaggcaccacgtgcagccgcagctgctgggcagcggaacgcgcttttgcgacggaggcggcgaaatcgatatccccgtcggcggatcgcgtgaagtgggactaccgagggcagaggaagataatcccgttagggcagtggctccccaaagtggccgtggatgcttacgtagcacccaacgtggtcctcgccggccaagtcaccgtctgggacggagcctccgtctggcccggttg

SEQ ID NO: 46423 - DNA, 270 bp, Glycine max
  Clone ID: 701132233H2
cgctcatagagagttcgacgcggcggttgcagaagaagattgcaagatgaagttcaacatcgcgagtcccaccactggatgccagaagaagctcgagatcgacgacgatcagaaactacgagcattttgggacaagaggatctcacaggaggtcagcggagatgcacttggtgaggaatttaagggctatgtcttcaaaattactggaggttgtgacaaacaaggattcccgatgaaacagggagtgcttactcctggtcgtgttcgact

SEQ ID NO: 46424 - DNA, 269 bp, Glycine max
  Clone ID: 701132234H2
gcaaattatggaatcccatgatgaagagcatgctgccaaactacttagagctcaaacccacatatggaatcacatatttagcttcataaactccatgtcccttaaatgtgtggttgacttaggcataccagatatcatacacaactatggccaacccatgccactctcaaacctcattgcttcactaccaatccacccatccaaaacttgcttcgtccatcgcttgatgcgaatcatgatccattctggcttcttctctcaacaaaagc

SEQ ID NO: 46425 - DNA, 267 bp, Glycine max
  Clone ID: 701132235H2
ctaagcctccactctgcaggtctgatgatgatcctgatgctgtttggggagttaaaatgaaagtttgcatctcacgttattcagatcaaatgcacaaagcaaaaggaagtgatttggctccttggcctgctcgattgactactccacctcctcgtctggcagaaattcactattctactgaaatgtttgagaaggacatggaagtttggaaacaacgagttcgtaattactggagcaagctagccagtaagattaagccagacacaa

SEQ ID NO: 46426 - DNA, 267 bp, Glycine max
  unsure (1)..(267): unsure at all n locations; Clone ID: 701132236H2
atctcgttccctcctcttctttcttctttgtnccttcacnctcatatctaccttcagccaccgctgatgatgatcatgtgtacgacactgacggcgataagcttcaatacggtgtcaattatttcgtgttgccagtgataagaggaaatggcggtggaatacaagtagcaaaagcaggaaacgaaacttgccctctgactgtggtgcaatctggcaacgagctctctgaggggttaccgataaagattgcatctcgatcagcaggag

SEQ ID NO: 46427 - DNA, 267 bp, Glycine max
  Clone ID: 701132238H2
ggttagggctatggctgatgagagcgtcgttgagtccccagtgaagaggcagagagatgatgatgaagaaaatgaggtctctgtttccatggatgtggagggtggcaaagaccctcttagtaacggtttatcatctgtgattcctgggtggttctctgaaattagttcaatgtggcctggagaggctcactccttgaaggtggaaaagattttgtttcaaggaaagtctgaataccagaatgtcatggtcttccagtcatcaacata

SEQ ID NO: 46428 - DNA, 95 bp, Glycine max
  unsure (1)..(95): unsure at all n locations; Clone ID: 701132239H2
caggtggtnaagtctgcatggntngactgatgaagaatttgctagaganacgattggcnggtgtaaatccanancgtcattnattttcttggcgg

SEQ ID NO: 46429 - DNA, 263 bp, Glycine max
  unsure (1)..(263): unsure at all n locations; Clone ID: 701132240H2
gtgttggacggaccttgaatactgcaagcaaaaggggttgtattatcccattgcaaagactctagcagagaaagcgggttgggactttgcgaaggagacaggttttgatgttgtcatgataaaccctggtacagcattgggccctctgcttcctccaagaatcaattcaagcatggcngtgcttgttagtgttctcaaagggggcaaagagacctacgaggacttctttatgggaacggctcacttcaaagacatagcattgg

SEQ ID NO: 46430 - DNA, 262 bp, Glycine max
  unsure (1)..(262): unsure at all n locations; Clone ID: 701132241H2
ctcgattttccatttccataaccttagtcatcttcttctttcatctttctccctaacggtatcgagggaaaantatggcggaagaacacagatgccaggcaccgcgcttctgcgccaacaattgcggtttctttggcagccctgccacgcagaatatgtgctccaagtgctaccgcgatttccagctcaaggagcagcaatcttccaacgccaagatggttctcaatcagtcgctggttccttcaccgccaccggggtgatt

SEQ ID NO: 46431 - DNA, 263 bp, Glycine max
  Clone ID: 701132242H2
cgaacgagacctcagcctgctaaatagctatgtggaggtaaccctccacggccagcttcttagagggactatggccgcttaggccacggaagtttgaggcaataacaggtctgtgatgcccttagatgttctgggccgcacgcgcgctacactgatgtattcaacgagtctatagccttggccgacaggtccgggtaatctttgaaatttcatcgtgatggggatagatcattgcaattgttggtcttcaacgaggaattcct

SEQ ID NO: 46432 - DNA, 261 bp, Glycine max
  Clone ID: 701132243H2
gacagtttggaaagcgaacattgaaattcagatagggttcattgattgatacgaataaaaattgaacacgacttatcgtctgaagcatctggcaggttgattagttagtcccttttgtgacaatgatttggtgattttgaatcttcgggtgcagcaagataatcgtgaaaattgggtctccaaaatttgtttgaggggattttgtttcttgagctaaaccaaaacatgaatgaaaatactgtgaggtctgctggtgcagat

SEQ ID NO: 46433 - DNA, 233 bp, Glycine max
  Clone ID: 701132246H2
caatcaatttcaagatcgtaacactggtattatatggcctccttcagagcattctggaacagtccagttggtcccaaaacaactcacttttggggacctattgccaactggggatttgtggcagctggattggctgacttgaacaaacctccagaaatgatctctggcaacatgacaggagcaatgtgtgtctattcagcattgttcatgagatttgcatggatggtacagcc

SEQ ID NO: 46434 - DNA, 263 bp, Glycine max
  unsure (1)..(263): unsure at all n locations; Clone ID: 701132248H2
cgagggtctacttaatttggatatcactctaaatttagcagaactggtaggtgaaactttcttattttgtttccacaataaagaactccaccatgtttgatgtaatgggagttgcattgggagaggattttgatttattctatgtatcaataaaaaagttacatgaactagctgtagcatccanaaaccanaagcaaattgaaactagttcattccgtgaccaaattaccatactgccatggattannttcaattgatttaac

SEQ ID NO: 46435 - DNA, 266 bp, Glycine max
  unsure (1)..(266): unsure at all n locations; Clone ID: 701132249H2
gaaggtgttctctttttggcttaatggggatccaaatgcgaaaaaaggtggcgaattagtttttggtggtgttgacccaaagcacttcancaggaaaccacacttatgttccaattactgaaaaaggttactggcagattgaaataggagattttttcattggaggtgtttcaactggtgtttgtgagggnggctgtgctgctattgtggattcaggaacatctttgcttgctggtccaactcctgttgtggctgaaatcaaccat

SEQ ID NO: 46436 - DNA, 266 bp, Glycine max
  unsure (1)..(266): unsure at all n locations; Clone ID: 701132250H2
aaaatttgaagggcttacggataaggtagcgccatggtatggaactgcatattccctttanaaaatcactggctcggnaattcaggggngggtgctttcngctccagatgaaaatatgcatctnccagctcctaacaaattcattccaactgacttgtcnctnaaaattgtgcaagaaaaagtaaagtttccagttttgttaagcaggtctacttattcagccttatggtataagccagatacattgttttctacacccaaggcnt

SEQ ID NO: 46437 - DNA, 248 bp, Glycine max
  unsure (1)..(248): unsure at all n locations; Clone ID: 701132251H2
tctcgagaggggaaaganagacagacngagagagagtgtttcggtgtcacacacgnnaacccagaaagtagcaaatgccaaatggtagtncggtattagcattgtagcgtagtgttagagagagaaagagaagaaaganaanaggcactaccgtcaccacaaccaactaggcctcggtcggaaagttgctacaaaaaagctctctataattgaccctcgtgaagatgaagcttcttttcttctccaga

SEQ ID NO: 46438 - DNA, 263 bp, Glycine max
  unsure (1)..(263): unsure at all n locations; Clone ID: 701132254H2
gaaccttcactctgctatcccccatattcctgtgtttcctttgaaaaaaaaagaagaagaaaaaacatgtctaggttaacntggattcttctttgtgggtcttacgttgatgttggtcggtgtggcaaatgctatggctaactcttccaacaaatttgatcaactcttccaaccaagttgggcttttgaccacttnattcatgaaagggatcttctcaaactcaaacttgacaaattttccggggctggttttacttccaaga

SEQ ID NO: 46439 - DNA, 262 bp, Glycine max
  unsure (1)..(262): unsure at all n locations; Clone ID: 701132256H2
cttgcttcttgcttctattacttgcttctttcttcaccatgtcacttgctgggaaaatcaccactgaaattggggttcatgcaaccgctgcaaagtggttcaacctctttgcnnnncaacttcatcatgttcaaaaccttactgatagagtacatggaaccaagctgcannncggtgaagactggcatcacaacgagacagtcaaacactggacttataccatagatggtaaggctacaacatgtctggagagtattgaatc

SEQ ID NO: 46440 - DNA, 261 bp, Glycine max
  unsure (1)..(261): unsure at all n locations; Clone ID: 701132258H2
gagtattggcgcttcatcaagatgggtatttctagggattccatgcacaagaggcgtncccactggtggcaagaaaaaggcttggagaaagaagagaaagtatgagcttgggcgtcaggcagcaaacaccaagttatcaagcaacaagacaatcaggaggattcgtgttagaggtggcaatgttaaatggagggcattgaggctggatactggcaattactcatggggtagtgaagcagttactcgcaagactcgtattct

SEQ ID NO: 46441 - DNA, 230 bp, Glycine max
  unsure (1)..(230): unsure at all n locations; Clone ID: 701132259H2
gaagcctaccctactattatccctttcctncctgcctcactttgctttcctggctctttcagaagangttgaacaagttgtggacataagtggcaaccccattttcccaggtggcacatattacattatgccatcaacttggggcgctgccggtggtggattgaaactaggccggacaggaaactcaaactgcccagttactgttttgcaagattactcagaaatcttcc

SEQ ID NO: 46442 - DNA, 250 bp, Glycine max
  Clone ID: 701132261H2
ggcatctgtgatccaactaagaaaaatgcaaaggcggtgaacattgatgggtacgaggatgttccaccgtatgatgagaatgccttgaagaaagctgtcgctcgtcaacccgtaagcattgctattgaagcctctggcagagctttgcaactttatcaatcgggtgtatttactggtgaatgtgggacaagtttagaccatggtgtggttgttgttggatatggctctgaaaatggtgtggattactggc

SEQ ID NO: 46443 - DNA, 87 bp, Glycine max
  unsure (1)..(87): unsure at all n locations; Clone ID: 701132262H2
gagagaganagtntgtgctttcattttgttccaaaaggatcattcaagtagaagtagattcagaccagtttggaacccaaaagaaca

SEQ ID NO: 46444 - DNA, 259 bp, Glycine max
  unsure (1)..(259): unsure at all n locations; Clone ID: 701132263H2
cttngtgttggtataagctcaagccacgcttggaatctgcaggccataaggtcacagtacttgaccttgcagcttctggaaccaacatgaagaaaattgaagatgttgatactttctcagagtattctgcgcctttgttgcagctaatggccacaattccctcaaatgagaagttngttctagttggtcacagccttggagggctgaacatagcacttgcnatggagaaattcccagaaaaggtagcagttggtgtttt

SEQ ID NO: 46445 - DNA, 261 bp, Glycine max
  unsure (1)..(261): unsure at all n locations; Clone ID: 701132264H2
gaagctctctcaatcttattttctgattaacactaacaaataacaatgacggatgctgctgaagacgctacacgccgccgtaatgcggtggccgagtaccgcaagaagcttcttcaacacaaggaattggantccagagtacgatccgtccgagagaatttgcgtgcctcaaagaaagagttcaacaaaactgaagatgatctgaagtctcttcaaagcgtaggacagatcattggcgaagttcttaggcctctcgacaat

SEQ ID NO: 46446 - DNA, 263 bp, Glycine max
  unsure (1)..(263): unsure at all n locations; Clone ID: 701132266H2
agtattggcgcttcatcaagatgggtatttctagggattccatgcacaagaggcgtngccactggtggcaagaaaaaggcttggagaaagaagagaaagtatgagcttgggcgtcaggcagcaaacaccaagttatcaagcaacaagacaatcaggaggattcgtgttagaggtggcaatgttaaatggagggcattgaggctggatactggcaattactcatggggtagtgaagcagttactcgcaagactcgtattctaga

SEQ ID NO: 46447 - DNA, 230 bp, Glycine max
  unsure (1)..(230): unsure at all n locations; Clone ID: 701132267H2
gaagcctaccctactattatccctttccttactgcctctacttgctttcctggctctttcagaagatnttgaacaagttgtggacataagtggcaaccccattttcccaggtggcacatattacattatgccatcaacttggggcgctgccggtggtggattgaaactaggccggacaggaaactcaaactgcccagttactgttttgcaagattactcagaaatcttcc

SEQ ID NO: 46448 - DNA, 249 bp, Glycine max
  Clone ID: 701132269H2
ggcatctgtgatccaactaagaaaaatgcaaaggcggtgaacattgatgggtacgaggatgttccaccgtatgatgagaatgccttgaagaaagctgtcgctcgtcaacccgtaagcattgctattgaagcctctggcagagctttgcaactttatcaatcgggtgtatttactggtgaatgtgggacaagtttagaccatggtgtggttgttgttggatatggctctgaaaatggtgtggattactgg

SEQ ID NO: 46449 - DNA, 86 bp, Glycine max
  unsure (1)..(86): unsure at all n locations; Clone ID: 701132270H2
agagagacagtntgtgctttcattttgttccaaaaggatcattcaagtagaagtagattcagaccagtttggaacccaacnagaac

SEQ ID NO: 46450 - DNA, 259 bp, Glycine max
  unsure (1)..(259): unsure at all n locations; Clone ID: 701132271H2
cttngtgttggtataagctcaanccacgcttggnatctgcaggccataaagtcacantacttgaccttggcagtttctggnnccaanatggagntaagngaagatgannagncnntctcagagtattctgcgccttngttgcagctaatggccacaattccctcaaatgagaagttngttctagttggtcacagccttggagggctgnacatagcacttgcaatggagnnattcccagaaaaggtagcagttggtgttt

SEQ ID NO: 46451 - DNA, 258 bp, Glycine max
  unsure (1)..(258): unsure at all n locations; Clone ID: 701132272H2
gaagctctctcaatcttattttctgattaacactaacaaataacaatgacggatgctgctgaagacgctacacgccgccgtaatgcggtggccgagtaccgcaagaagcttcttcaacacaaggaattggannccagagtacgatccgtccgagagaatttgcgtgcctcaaagaaagagttcaacaaaactgaagatgatctgaagtctcttcaaagcgtaggacagatcattggcgaagttcttaggcctctcgac

SEQ ID NO: 46452 - DNA, 256 bp, Glycine max
  Clone ID: 701132275H2
gctgtcactgagaaaggatctctatctacgaaggagcggaataaaacccttctctctgtgattaagagaatggcttcagatcggaaacttcacacttttgaggaggtggcaaagcacaaccagaccaaggattgctggctcatcatttctggcaaggtgtatgatgtcacccctttcatggaggatcatcccggaggtgatgaggttttgttatctgcaacagggaaagatgcaaccaatgactttgaagatgtgg

SEQ ID NO: 46453 - DNA, 255 bp, Glycine max
  Clone ID: 701132276H2
ggaaaacaatcatcagatgccacctgttccagtcagaacaaccagtgctcctacactttccagtatggagatgggagtgggacatcaggctattatgtgtcagatatgatgcatttgaacaccatttttgagggatccatgaccacaaattctactgcgcctgtagtttttggatgtagcaatcagcaaactggggacttgacaaagtctgatagagcagttgatgggatatttggatttgggcaacaggaaatg

SEQ ID NO: 46454 - DNA, 254 bp, Glycine max
  Clone ID: 701132278H2
ctaccgtctgatcccacttatttacactcttttttattttgctcatacaaggggcactccagtttcaacccctactttctttgctgatccaaaagatcccagtctgaggaaacttgaaaattcttttttgcttggtccagtcttagtgtatgcaagcaccttacgtagacaggggttggataagttggagattactttgcctaaggggatatggttgaattttgatttcaacgatgcacatccggatttgccag

SEQ ID NO: 46455 - DNA, 253 bp, Glycine max
  unsure (1)..(253): unsure at all n locations; Clone ID: 701132279H2
tggcaacacaggggctcgatccctctcagacctctttcttccaggtgcttaacattcctaccaagattaacaagggtactgtggaaatcattacacctgtggaactcattaggaagggagacaaggttggatcttctgaagctgcattgcttgccaagctaggcataaggcccttctcatatggnctgtggttctctctgtttatgataatggttcagtgttcagccctgaggttctgatctactgaggatga

SEQ ID NO: 46456 - DNA, 259 bp, Glycine max
  Clone ID: 701132281H2
tcgttttctctctctttctcagtttctcagtttctcagtcatcaccatcgcagcagcaagatgtggaaccaaccattcggaaaaaccgatttggaaagcggttctcggcctctgtatccgatgatgctcgagagccctgaactgcggtggtcgttcatcagaaaagtgtactccataatcgccatccagttgctcgtaaccatcgtcgtcggcgccgtcgtcgtcaccgtccgcccaatcagtgtcttcttcgccacca

SEQ ID NO: 46457 - DNA, 258 bp, Glycine max
  Clone ID: 701132282H2
aaatatcccaatccaataggcactttgtggtttggatcttatgtgactatatggaaaagcctaagatttctaattcaaatggttcactgttcattagaagtcgcattcaagaatatgaagcatataatggcaagttcgcataaagttgagtgttgtcacttctcatcagatggaaaacttcttgctacaggtggccatgataacaaggcttctttgtggtgcacagaattgtttaacctgaaatcaacacttgaagag

SEQ ID NO: 46458 - DNA, 256 bp, Glycine max
  unsure (1)..(256): unsure at all n locations; Clone ID: 701132283H2
gttcgtttttgttgatcctgtgaacttatggctgacggggtggttctgttggatacatgggccagcatgtttgggatgagggttaggattgcattagctgaaaagggtgttgantatgaatacaaggaagaaaatctcaggaacaagagtcctttgcttttgcaaatgaacccaattcacaagaaaattccagttctgatccataatggcaaaccaatttgtgaatctgcaattatagtgcagtacattgatgagg

SEQ ID NO: 46459 - DNA, 256 bp, Glycine max
  unsure (1)..(256): unsure at all n locations; Clone ID: 701132284H2
agggacacttgtgtcctcatccttgtgatgatgatgatcaccctctattttctcctcgatcttctctttcagccctnnnnnnnnnnnnnnnnnnnnnnnnnnnnnnnctccatcttctccttcctcctcacttgaagagctagagctgctgtcagatcggtgaagcttatagagaagaacaaagatgagacattgagaaaccgctatgggccagctaaaatgccttacactctgctctatccttctagtgaggagg

SEQ ID NO: 46460 - DNA, 257 bp, Glycine max
  unsure (1)..(257): unsure at all n locations; Clone ID: 701132285H2
gagaatatgaagttgtttgttttctttgttgctgcagtagttttggtagcatggccatgccatggcggcaggctaccaaaggttccctctccgaatgaaaactggctatggtgagcgttcttcggaggtaaaatgcgcaagttttaggcttgctgtggaagcacacaacatccgagcnnttaaaaccattcctgaagagtgcgttgaaccaacaaaggactacattaatggcgaacaatttagatcagactctaaaa

SEQ ID NO: 46461 - DNA, 255 bp, Glycine max
  unsure (1)..(255): unsure at all n locations; Clone ID: 701132286H2
agcgctacagcttttcaaatggagtgcacagattttgggtatactccacggacaagcctcatatgcaaggcagcaatacgaagccacgaactganattcgnatcgccggatangattatacatccggtgtgtggcaatttcaagggtttttttacgtgcctagtggcacaagcggggtgtgcatccagcaagtgtttggtggagtaacttctgccacaacctcgcagactagggtctatggtggttctctcactc

SEQ ID NO: 46462 - DNA, 126 bp, Glycine max
  unsure (1)..(126): unsure at all n locations; Clone ID: 701132287H2
gctactattcagnctcnanngtgcttancttctctgcnagnnttggagctgggtgatggatattgaacccttgtgggctattggggggtggtctnttctntcaaattattgcatggcagaacctaa

SEQ ID NO: 46463 - DNA, 253 bp, Glycine max
  Clone ID: 701132289H2
aacaaaccctttctttctggcttcagtttttgcagtgaaaatggcggtgactttaacatcaaccctctttatggctttgctatttgctgcttcagcttttgctgctcttcagcctagagtacctgaagcttaccttcaaaatggaaactttgaggagcagccaaaccccaaaaacctccagaaaacaaagctcatggggaaatattctttgcccaaatgggaagtcaatggtctggttgagtatgtctctggg

SEQ ID NO: 46464 - DNA, 255 bp, Glycine max
  unsure (1)..(255): unsure at all n locations; Clone ID: 701132290H2
cgttgccatagagctgccactgaaatacggtccattcattgagtcagtgaacaagagagggctgaacctctctgaggtggtgtgttccacattcacaatgggngngtnggagaaaccaaggacagaaggacagtgagagtggaatgcttcatgaaagaaagcagccccaatatctgggtgaggcctatcagtggactcacaatggtggttgaccttgaactcatgaagatcgttcagtatcacgacggtggcatt

SEQ ID NO: 46465 - DNA, 255 bp, Glycine max
  unsure (1)..(255): unsure at all n locations; Clone ID: 701132291H2
ggagcgttcgcgtttgtnctgcttttcctatcggcctcagcagacgacgtcgttgtgctctctgaagataactnccgagaaggaagttggtcaggacagaggagctctcgttgagttctatgctccttggtgtggacactgcaaaaagcttgctccagaatatgaaaagcttggtagcagcttcaagaaagccaaatctgttttaatcggcaaggttgactgtgatgagcacaagagtttgtgcagcaaatatgg

SEQ ID NO: 46466 - DNA, 254 bp, Glycine max
  unsure (1)..(254): unsure at all n locations; Clone ID: 701132292H2
actcgctcagttacacatgtgtcactgctggtgctgcaggcgtcctctttgtcggaatatacttgatggttgatgtctgtggatgtcgtcgcatgnctttggttatggaatggatgggcatgcatgcattaatgatttatatccttgctgcttgcaatgttttcccaattttccttcaaggattttattggggaagtcctcacaataacattctcaagttaattggagttggcacttgaagaaaggcacataaa

SEQ ID NO: 46467 - DNA, 255 bp, Glycine max
  unsure (1)..(255): unsure at all n locations; Clone ID: 701132293H2
ccagagcaagtngcaccattactgtgtgcgggtgtgacagtgtacagtccactggtacactttgggctgaaagagagtgggctgagaggtggaatattggggcttggaggagtgggacacatgggggtgaagatagcaaaggcactgggtcaccatgtgactgtgataagctcttctgacaagaaganacaggaggcacttgagcaccttggagctgatcaatatcttgttagctctgatgtcactgccatgcag

SEQ ID NO: 46468 - DNA, 254 bp, Glycine max
  unsure (1)..(254): unsure at all n locations; Clone ID: 701132294H2
gaaagagcaatgcaagctgcgtcttcaggcatcggatacggtctaaaatatcaggctaggtgcatatcggntgttaaagcagacacagatcacactagcttcctcgctggcactctcagcctcaaagaagaaaatgaggtacatctgattcggctttcgtcgagtggaactgaactcttctgcgagggattgttctctcaccccaacgagatctgggaccttgtctcttgtccctttgatcaacggatcttttc

SEQ ID NO: 46469 - DNA, 279 bp, Glycine max
  unsure (1)..(279): unsure at all n locations; Clone ID: 701132305H1
aaatttctccatagttatgggnanttccanttctcgacggccngaanggtnnngntgnangnttcngggganaagtacctngtcntggccnacggnttcggnacggaccaatccgcgtggnagcgcgtgctcccttacttnacccgcaactacagcgtcattctctacgacctcgtctgcgccggcagcgtcaaccccgaccattcgactaccgccgttataccaccctcgacgcctacgtcgacgacctcctcaacatcctcgacgccttccgttccc

SEQ ID NO: 46470 - DNA, 269 bp, Glycine max
  unsure (1)..(269): unsure at all n locations; Clone ID: 701132306H1
tggaaatccgttttcacagctgatgagaaagagcgtnngaagaatgttgaggnngcaattgaggctctgcagtttcttgagaatgagataaagcgacaanaagtnctttggaggagagganattgggntngnagatattgctgctgtctacatagcattttggggtcnctatggttcaagaaattgcagggttggagttnttcncaagtgagaaattttcctaagctccacgaattggagccaagaattttgaaccatccnattgtcaa

SEQ ID NO: 46471 - DNA, 278 bp, Glycine max
  unsure (1)..(278): unsure at all n locations; Clone ID: 701132307H1
ttcatgtctcctcttttccatccatttcattgttatcatgtcaagttccttacccacaaatagtgatgaagtgtttgcaaaacagtctccaatgtctccatccacaaaacccgtggaaaaaatcacccaactancacttctatttccataacaacgtaacggngaaaaacccaactgctatgagaattgttgggcctcccaagggcttcattactcagtttgggactgttgtgatgatggatgaccctctaactgaaggaccaagtccaagttcaaag

SEQ ID NO: 46472 - DNA, 277 bp, Glycine max
  unsure (1)..(277): unsure at all n locations; Clone ID: 701132308H1
ctcgtgccggttngtgctggtatcagacatggcttccactatgaancaggtttnccctctaatttcatcaggccactcggtgaccgtccaaatcttcaaggcgtcgtccaatcntcagatgtttgcatacctctcatcgatctccaagaccttcatggccccaatcgctcccacatcatccaacagattgaccaagcttgccaaaattatggatttttcaggtgacaaatcatggagttccagagggtgtgattganaagataatgaaggtgacaag

SEQ ID NO: 46473 - DNA, 274 bp, Glycine max
  unsure (1)..(274): unsure at all n locations; Clone ID: 701132309H1
ctgaactctgaaactcaaccttctttcttctcttctctctcgtgtttaactgttcagggcatcctagtttctctcagttagccaaaatggtagctgcaaatgagagggtcgtcgctgtgatcatgnttggangacncactaaaggtactagantccgaccattgncattcaacgtacccnagcnnctttttccattagcaggacaacccatggttcatcatccaatttctgcntgtaaaagganncctaatttggctcagntttatctgcttgg

SEQ ID NO: 46474 - DNA, 275 bp, Glycine max
  Clone ID: 701132310H1
tccaatctagcttcttccataaatcatgtctcagttaagcaaaacacatttctcaaacaaaatgttgaagtaaactaattgatccaaagcaaaaatatgaaagttcgtccatcaatacacaggtccatctagtgaaactagaaaagagtaaataagacttatttcttcttgtctccagccccaccagccctcatcttcctaagaacattggacatttcctcacgcttcttctttgcacgtttgtgggttccaagctttctctttgcaaccttaag

SEQ ID NO: 46475 - DNA, 274 bp, Glycine max
  unsure (1)..(274): unsure at all n locations; Clone ID: 701132311H1
gnttatccttattgagagaaaaaatggccaaatcaatcaaattctttgagttgaacacangggccaagattccttctcttgggttagggacttgncaagctgancctggtgttgtagctgaagctctcaccacagccattcaggttggatacaggcatattganngtgctagtgcgtataagaatcaagcagagattggttctgctcttaagaagctttttgatgatggnatggtgaancgtgaggacttatggatcacttccaaactctggtg

SEQ ID NO: 46476 - DNA, 243 bp, Glycine max
  unsure (1)..(243): unsure at all n locations; Clone ID: 701132313H1
gtcagntcctatggacntttgtaccattgaantgtctggtgaacacattgacgctggtgacggagagcttcatcttgagatctgtttgaaggacttgcaggatgatttcatgggtggagctgagatcattaaatctgaccctgttgtgtcatcagggagactgtcctggagagatcatgccgcactgtgatgagcaaaccacccaacaagcacaatcgtctgtcacatggaagcnagaccatg

SEQ ID NO: 46477 - DNA, 277 bp, Glycine max
  Clone ID: 701132314H1
gctccagtagccggcactaaacaacatggcggacaaggcagtcaccatccgaaccaggaagtttatgacaaacaggcttctctccagaaagcagttcgtcgttgatgtccttcatccagggagggctaatgtttccaaggctgaactgaaggagaagctgggaagaatgtatgacgtgaaagacaccaacactgtatttgtcttcaagttccgaactccattttggtggtggcaagtccactgggtttggtttgatctatgattcagttgagaatgc

SEQ ID NO: 46478 - DNA, 277 bp, Glycine max
  unsure (1)..(277): unsure at all n locations; Clone ID: 701132316H1
tcaacatgagctcaatcgttcagggttncaccaagtcgcnggccatgaccattctgctctgngatcggcgacaaaactttttttgcagctgcgatcctggctatgcgacacccaagacgcctagtcttatcaggttgcttatcggctttgattgtgatgaccattctctctgttctgttggctgggctgctccaaatctgatctctcgtacatggactcatcacattacaacatttttattcttgggatttggactttggtcctaaaagacgctata

SEQ ID NO: 46479 - DNA, 141 bp, Glycine max
  unsure (1)..(141): unsure at all n locations; Clone ID: 701132318H1
gttagatactcaagcctatggtgatcatacctgtataatagcaaaagaacatttggagcctaacttaggtnggctcactgttgagcaggctatccaaaacaagaagttgttcatcttagatcaccatgactatctcattcc

SEQ ID NO: 46480 - DNA, 290 bp, Glycine max
  unsure (1)..(290): unsure at all n locations; Clone ID: 701132319H1
cttgaacttcaaacatggcagatgaggtggttctgctagatttctggtccaagtcccatttnggatnagggtcaggnttgcacttgctagcaaagggnatcaagtatgagtaccnangcagaggacttanngnacaagagtcctcttctcntccaaatggancccggttcacaggaagattccggttctcatccacatggcaaacccatttgtnaatccctccattgctgntcagnaccattgaggcaggtnnnancatggacaganatcccttgttnccttctgnaccc

SEQ ID NO: 46481 - DNA, 279 bp, Glycine max
  unsure (1)..(279): unsure at all n locations; Clone ID: 701132320H1
gncatccgcaggtaagcaatggttaagcataataatgttatccccaatgggcacttccggaaacactggcnaaactatgtgaagacttggtttaatcaaccagcccgaaagaccagaagacggttngctcggcagangaaggctgtcaagattttccccaggcctactgctggatctctcaggcctattgttcatggccagactctgaaatacaacatgaaagtccagagccgggagaggattttcactggaagaattgnaggctgcaggaattcccna

SEQ ID NO: 46482 - DNA, 274 bp, Glycine max
  unsure (1)..(274): unsure at all n locations; Clone ID: 701132322H1
gtgccttttggtgttctactctctggaggtttggactcttctttggttgcatccatcacttctcgttacttggccaacacaaaggctgctgagcagtggggatcaaagttacattcattctgtgtaggcctgagggctcaccagatttgaaggctgcaaaagaggttgctgactatctaggcactgtccaccatgagtttaccttcactgttcaggatggaatagatgccnttgaagatgttatctaccatattgaaacatatgntgtgactac

SEQ ID NO: 46483 - DNA, 282 bp, Glycine max
  unsure (1)..(282): unsure at all n locations; Clone ID: 701132323H1
gtgggttccaagttcaacaatcatttttgaatcttaaataagagaacagcccaaaacctttcaaaatacacatgctgcaaattgctcacccaatcaccagccatgggagaggntgacgcagcattcatccaagacccaccacacaggccaaanctctccancatccaagccgnnggnattcccatgaattgatctctctccaataaccaanccacagagtttcagacccttgctgctattganggcttagtgnaggcgatnggtagtgcatgnccncgagtg

SEQ ID NO: 46484 - DNA, 118 bp, Glycine max
  unsure (1)..(118): unsure at all n locations; Clone ID: 701132324H1
gtttgagggaagacaatgtagagggaagggatctgaagaagccatttcttcacacaggaagttggtatcgtatgngtgggagacaatccagtgtgtttggttccacacaacatacgng

SEQ ID NO: 46485 - DNA, 273 bp, Glycine max
  unsure (1)..(273): unsure at all n locations; Clone ID: 701132326H1
gtccaaagcttctctctcttccatttcccacctataaaactagatggaaaaaatacacactgncgcttctcatgatgatagtgtagctgaanctccttctgcagcagcatttatgatttggacacaaaaaagttccanacttttcagttctctgagtttctgtctttgtagctgaggtatggaaataatttcatctggcttcataaacacagcatctttcaaggacagtatggnacttatcaattttgaaggagttcatactttgccctatag

SEQ ID NO: 46486 - DNA, 274 bp, Glycine max
  unsure (1)..(274): unsure at all n locations; Clone ID: 701132327H1
ctccccttccgccgaggaacacaaacaacaacctcaacttaacgacttgtagcannccngtgcatgatggaggagatgaaagtttctcggcgggtggagtggtggcagaacatgatgttccccgttcggagggtttggtttgtcgttgccaagcgcctcggcnttcncaaaactgggttactgaagctaagtantgatgtgagggcatgcgaatatgaggacattcaagtgatgtgggngatactaaacaganacgaatcagagtttggtcgtt

SEQ ID NO: 46487 - DNA, 275 bp, Glycine max
  unsure (1)..(275): unsure at all n locations; Clone ID: 701132328H1
ttctatcagntttatataaaaanattttcaaggccnagttcacatgtcctcccgtggttctnttcaagtgcaaagaagctaatcaacaaaatccttgattcccaatcctgtccactcggattacatttgctgnggtcatgagantggctggttcaagangggatataagcctcccgtatttnancaggctaatgttagncttgatganttnnantctacnttcantgantctacggnatcacaaaatcttgttgtagagaggcgtgaagagngnc

SEQ ID NO: 46488 - DNA, 276 bp, Glycine max
  Clone ID: 701132331H1
cttttgtggggttggattggagagtctgacagtgaatatgctgatgtagccaaaggttgggcttcagttcagagtattcctagaactgtggagactgataggaagactggcagcaacttgcttcagtggcctgttgctgaggtggagagtttgagattgagaagtgatgaattcaaaaatttgaaggctaaaccagggtcagtcgtgtcaatagatattgaaacagccacacagttggacattgttgccgagtttgagatagacaaggaaaccctt

SEQ ID NO: 46489 - DNA, 279 bp, Glycine max
  Clone ID: 701132332H1
cagaatcaaatatggacaatatttaagaaatatgaaagctcaattgaagtcgaaatacagcaaagatctgttgaatattttgcattgagtagaaaaggtgcagctctaatggatatattggccgaaatgcctaaattccctgaacgacagtctgcattgatcaaaaaggctgaagacactgaagtcgatacagcggaactaagtgctataaagttacgagctcagcagcaatcccaaacatcaaatgctttggttgtaacaggccaaagtcatgctatg

SEQ ID NO: 46490 - DNA, 245 bp, Glycine max
  unsure (1)..(245): unsure at all n locations; Clone ID: 701132335H1
tnaacatagctatcagctactcaaaacttaagcatgnncctccattcttcaattgctgatgtttgctttnacaatgatgttcacgttcatgggagagcgancantagntgggngnatanttgganccagtcnatgggcncttgcccntgtcaccntntatggngatgcgactgcttctgccactatgggaggcncatncngatacgggnnnntntnncnaaaaggngcggaacagatacagtggc

SEQ ID NO: 46491 - DNA, 274 bp, Glycine max
  unsure (1)..(274): unsure at all n locations; Clone ID: 701132336H1
aaactattcaagttgtgaaagcacatcacaagaaaattcgcaagcnatgnntccgaagctaaaagaggtttctcagctcttcgatcgctttaaggnttcgtttatcaggaacgactttgatacctgttccaatctccttctcagctaaaggtgttacttacaggtttcagaagccttccaccgttgtttgcagatacacctaatgcagttcatgaattaacaatagcaagggatatatacgagcatgctgttgtcctagtgtgaaaaatgagga

SEQ ID NO: 46492 - DNA, 277 bp, Glycine max
  unsure (1)..(277): unsure at all n locations; Clone ID: 701132337H1
ttcgagccgtagctttcctttccagttcatacttcatcctattatnactttccctctttgcattccaaatggccactgttgaggttgcacagcaaacaccaacaactgtgacagagaatgaaacaacgactgaggtaaccangattgaggnaactaccccagaacagccagccaccgaggttactgccccagaaacagtcaacgaagaagcaccagaggaagcagcagttgagactaatgaggcancagaagttacnnaggnngggaaggctgcgac

SEQ ID NO: 46493 - DNA, 271 bp, Glycine max
  unsure (1)..(271): unsure at all n locations; Clone ID: 701132342H1
tgtcacctttattctctttcagtagaacaacagcaacctctctgncttccaaacccacattctggaatttggttccantgaaacaatcttcttctccggggcacttggccttanncttngacaatgncacgtagaacncttcacgtgtcntgtggctccacatcaccatatgctcncccagagaggcancaattcaggggggtgaagntnnnncaggggnntgttggnnagtangcagtntgnnnattgaaccgnaatcgtactgctnagg

SEQ ID NO: 46494 - DNA, 268 bp, Glycine max
  unsure (1)..(268): unsure at all n locations; Clone ID: 701132343H1
ttcttcacctgcaactatttggattgctgatttttgttaataccatattnnngnntattggcgcatttctttgagaaagttactaattcctagatagnggcnaaaatgttggganttttcaaggagaanttggttaanggcacccaaagngctgaacagtccagcttcnntgaattcatgcactacgccnnngctnagtcacganatccttcaggntttcatgtcctgcaattcctccaatgcttctcaatgtgcttngggntgaagc

SEQ ID NO: 46495 - DNA, 274 bp, Glycine max
  unsure (1)..(274): unsure at all n locations; Clone ID: 701132344H1
gaaagttaatgcatgcttcttatcttctgtctanctactgagtttccacactgcataccttaggtcttcccgaattcgaagttaatttgcaagatggctaagganaaggctcagatcaacattgtggtggttggtcatgtggaccctgaggaggcaaccaccattaacgagctgaagaagcctgttgtggagaaagaagctccagggcatncccatatgagggcatgcacgtacggcctcggaggggaaccagaaaattatgttaacaaaatna

SEQ ID NO: 46496 - DNA, 275 bp, Glycine max
  unsure (1)..(275): unsure at all n locations; Clone ID: 701132346H1
gncgtcggtggtaaagaacgtactcaaatccgtcagagaaaagggtttcggcgctttcctcagagagctcaaggatgaaggctacctgagatgccttccggatggaaatctcttgcaaaccaagatccacaatattggggcaacgcttgttggtgttgataaatttggtaacaagtattatgagaagctggagacacacagtnnggaaggcacaggtggattgaatatggcagagnagactagatataatgcctcccaggttccagctgaatggc

SEQ ID NO: 46497 - DNA, 273 bp, Glycine max
  unsure (1)..(273): unsure at all n locations; Clone ID: 701132347H1
taaaatcagcaacaaccgaacctatcatttttctcattattgttgttggagttggagttggagttggaccacaagaatagttntgagaatcattgttctagtgtcgatagatggatggggaattgcatccactcatgttgtagtttcttttctcttcgttctgaaatttcgtttctctctccaacgctacaatgtcggaagctaagacccaaattgaatccataaggaagtgggtcgtcgagcacaagctccgtactgttgggtgtctgtggc

SEQ ID NO: 46498 - DNA, 286 bp, Glycine max
  unsure (1)..(286): unsure at all n locations; Clone ID: 701132349H1
anggccttccccaatgattacaanagcattgaggttcttgagnngtgatggcaaatcacctggttctattccgccacataagttatggtgnaggttcaccacttgngaagtcatcctttgagangattgaggctgttgatgangaaaggaaggtagtgtcgtaccactatcattgatggagaactcctcccagcactacaaaacattccaagggagccatttccgtgnctccagttggcgatgnangcgngttgaagtggcgtgngtgtacgaanaggtnancnnc

SEQ ID NO: 46499 - DNA, 278 bp, Glycine max
  unsure (1)..(278): unsure at all n locations; Clone ID: 701132353H1
ttctctccaatggccaaagacntcgaaacggagattcaaagtgggttgcctcacaaggactaccnagaaccacccnccgccccatttctacgaccccgacgagctccgaaagtggtccttcttccgagccctcatcnacgagttcgtcgccaccctcctcttcctctacgtnaccatcctcaccgtcatcggctacaaccaccagacagccaccnccgccgcgccctgcagcggcgtcggcgtcctcggcatcncttgggcctttggaggcatgattt

SEQ ID NO: 46500 - DNA, 270 bp, Glycine max
  Clone ID: 701132355H1
tcgtctcgttaggtggagttggcattgtcaatatggtacacaagatccagaatcatgaatatatgggatttgaggatctttgcaaatacgggtcatagcacatattggaagattatttttttcgtatttacattactattcaaggtccctaccaaagccaagaaccgaggtcgccaaaattgacttcaattacgtgtcatggctcaatcgtgttagttaggtgtcatttattgtattgtttgttgccaagtcatggagtgattccgtggg

SEQ ID NO: 46501 - DNA, 272 bp, Glycine max
  unsure (1)..(272): unsure at all n locations; Clone ID: 701132360H1
ttgactttcaagcgcaggaatggaggtcgcaacaaacacggccgcggccacgtcaagttcattgcgatgctccaactgcggcaaatgctgccctaaggacaaggctatcaagaggtttctggtgaggaacattnttgaacaggctgcagtcagagatgtgcaggaggctgtgtctacgaacaatacacgcttccgaagctgtatgtgaagatgcagtattgtgtttcctgtgctatccactctcatgttgtgagggttcgatcccgcactga

SEQ ID NO: 46502 - DNA, 238 bp, Glycine max
  unsure (1)..(238): unsure at all n locations; Clone ID: 701132361H1
aactatctctaccgagagtgcctccgcaaccatgcagccancctcggtagctacgctaccgacggctgtggggagttcaccctggacgtggacagcgtctcgtccccctccctccagtgcncagcctgcngctgccatcgcaacttcccaccgcaangttcacgtncccccgcggtggaaggagggttgcaggccgtgactggngggagtggggacatgatggagtatccgggggcgg

SEQ ID NO: 46503 - DNA, 273 bp, Glycine max
  unsure (1)..(273): unsure at all n locations; Clone ID: 701132362H1
gtcaggcaattgtnggcttcaagagctgcctcttacctgaggatctctgtgtttcacagaggcttttctaatgttattaaagatttcaagtatgttgattctcatgagtgggtgaaagttgatggaaattacgcaaccatcggcataactgatcatgcccaagatcatttgggtgatgttgtatatgttgaattgccagaagtgggagcagctgtgacacaaggaggtagttttggtgcagttgaaagtgtgaaggctactagtgatattnac

SEQ ID NO: 46504 - DNA, 273 bp, Glycine max
  unsure (1)..(273): unsure at all n locations; Clone ID: 701132366H1
gntttgaagtgggttattgttgtttgtggatttcttcattgttttgctctaaaaatggagagagattttctgggtctgagctcaaaagaaccattggctatgatgaaggaagagatgaatattgatattggaagcaangacacaggtttcacaaatggagcagtgncnaaaatggccnctcatgaacaaagtatatgtccatcccttttgatgtcattcaatcctcctcaggtgaattctgtgaaccatctcaggtatgaagatgttttcagt

SEQ ID NO: 46505 - DNA, 265 bp, Glycine max
  Clone ID: 701132367H1
cgagatcttaattgatctaaaggcaaggcgcattgtctccgacaatattcactccgggaatggcttccctaccctttccgttgatgaacaagtcgttgccatagagctgccactgaaatacggtccattcattgagtcagtgaacaagagagggctgaacctctctgaggtggtgtgttccacattcacaatggggtggtttggagaaaccaaggacagaaggacagtgagagtggatgcttcatgaaagaaagcagccccaata

SEQ ID NO: 46506 - DNA, 273 bp, Glycine max
  unsure (1)..(273): unsure at all n locations; Clone ID: 701132369H1
gctaaaatccttttagctcttgatgaagcaaaaagcagcagaaaaagaccaaagaatctacaataatttcttgatcccccttattataatagcctttgagcattgaaagttttcctcaaattgccatgatttgattcgtcaacaccnnnnnnnnnnnnnnnnnnnnnnnnnnnngttaaaatgggttttactaggaaaccaatgctgtttcctttttgccggttttgttcataactattcttcttgaggccaccccagttgcaggatctgctt

SEQ ID NO: 46507 - DNA, 269 bp, Glycine max
  unsure (1)..(269): unsure at all n locations; Clone ID: 701132371H1
tagctagttgtttaaagtaagagngaagaaagnagcaaatggcnaactttccagttgttgacatgggncaagctaacaccgaagagagcacctggagccangnagattataaaagntgcctntgaacaactggggtttctttgagttggtgaaccatgggatatccattgggcttatggncacagtggagaagcncacaaaagagcnttacnagangacnatggngcanggntcncagaantggtgaccncancggtctgagtcngttc

SEQ ID NO: 46508 - DNA, 267 bp, Glycine max
  Clone ID: 701132372H1
tttaatccatggttaagttggcacaagattcttagcttctccgagtgtctctgtctgtctgcggaatccaaaccctccaaggtttctttcctgtgctcctcctcgtgtggtgtccctacgcacgaggtttttgtagctaccaccgtgcccaattcacatcgcatgtttcgaacgctttgtgctgcaactgaaatcgaaaatcagagaaagcggagaagagagagagagcatggctgatctctttgcgtggctcatctccttcttcat

SEQ ID NO: 46509 - DNA, 276 bp, Glycine max
  unsure (1)..(276): unsure at all n locations; Clone ID: 701132373H1
gnatctctctctattctttgaaaccaaagttcaaactctgtcttccctgggttctatttcgaaatcaacgacgatgagttccacagaggcagcagccacagagaagaaaggtggaagagggaaaccgaagacttcnaagnccgtttcccgttcctccaaagctggccttcagtttcacgtgcgnccgtgtcgctcgctacctacaaggccggtncgctacgcccagcgcgttggctaccggtncccctggntatctctccgcggttctcgaatanc

SEQ ID NO: 46510 - DNA, 269 bp, Glycine max
  unsure (1)..(269): unsure at all n locations; Clone ID: 701132374H1
ctgataacgaaggggatagaggggaagaccttcgtggtcaccggtggactgggattcgtaggatctggtctctgcttggagctcatacgtagaggtgccgtagangtgcgagcctttgacctccgcctctcttctccttggtcgcgtcctctcaaggacaagggagtcctctgcatccaaggggatgttgcccgcaaagaagacgtggaaagggcccttcgcggtgccgactgtgtatccaccttgcggccttcggaatgtcaggcaaa

SEQ ID NO: 46511 - DNA, 270 bp, Glycine max
  Clone ID: 701132376H1
gaaggtgttggcgccatctttctcgactccaattcagagactgtcggacttggaggtacaaaagcaaagaaagtgaaagtgctgaagggagattccgttcctgttggaacggaagtgagagcgaacgtgggagcttcccagaacaaaattcttgctgacataagcaactttccccaacaaccaaagcaacacatctctgttgaccaccttctcaaggaaaaggaaattttgatcaagcatcttgctactagagatgccgttatagaatcg

SEQ ID NO: 46512 - DNA, 270 bp, Glycine max
  unsure (1)..(270): unsure at all n locations; Clone ID: 701132379H1
tttctatctcaccattttgatcaataaaccaaagcttctctctctctctttggtcctttttccatcactaggaggatngccaaattggtcattgagggtggctcaaaagctctgcttctggtcaaacgggacaaagtggatctcactcatatgaagagactttcaactttggtggatgggnttttggttcttgcattgttcagttgtagcacatggacagtgtggancagctcatgctgcaatcagatacnctcgtacgantccggcctc

SEQ ID NO: 46513 - DNA, 274 bp, Glycine max
  unsure (1)..(274): unsure at all n locations; Clone ID: 701132380H1
cngaatcgcacctcaccacaacctctctttctcgtctccgtccgtgcaacctgggaantaatggcatggagaggaaatcttttgaaaaacatnnaagaacttcggtttttgatgtgccagtcatcacctgcaagctcacccacaanggnttttgtggaaaggaattataaggaactaaagacattgaacccaaaattgcccatattaatccgtgagtgcagtggagttgaaccccanttatgggcaagatntgattgggtgttgaganaggcat

SEQ ID NO: 46514 - DNA, 169 bp, Glycine max
  unsure (1)..(169): unsure at all n locations; Clone ID: 701132382H1
ggagntccancataatagttagggttatagcatgcttcnaacctctcacagnttgtcangctgaatacttccgtcatttgcncaaaccgtccacgnaatagntcttttgctttgtncgttttgggntaagccnnnggtttaattgttttccgtgtnggcgnacnnncna

SEQ ID NO: 46515 - DNA, 244 bp, Glycine max
  unsure (1)..(244): unsure at all n locations; Clone ID: 701132383H1
gctagtttatcgtgagnccgaatatgaagttgtttgttttctttgttgctgcagtagttttggtagcatggccatgccatggcgcaggctaccaaaggttccctctccgaatgaaaactggctatggtgagcgttcttcggaggtaaaatgcgcaagttttaggcttgctgtggaagcacacaacatccgagcctttaaaaccattcctgaagagtgcgttgaaccaacaaaggactacattaa

SEQ ID NO: 46516 - DNA, 273 bp, Glycine max
  unsure (1)..(273): unsure at all n locations; Clone ID: 701132384H1
ctaaccccttcggtgatgctttctctgggcctgagatgtgggcccgnntcaccgcagaccgccaccactagggcttacctccaacagcctgatttcntgaagatgangcnggatatccagagagatcntaataacctcaacttgtncttgnaggaccagagaatcatgcaggccctaggagttttgctcaacgtcaagattcaaacccctcccacgggggctgacaccgatatgccggantctccatcnnctctgcggcacgttctgangcgc

SEQ ID NO: 46517 - DNA, 276 bp, Glycine max
  unsure (1)..(276): unsure at all n locations; Clone ID: 701132385H1
gncaaatgcaaaaacaaaaaaacactgttttctttctctcaagactttcatatctcagctaagaacaccagnnagaaagagaactacaaggnganganaaacaagangggganggcttgaagatgggnatcacnaaccccttcaangaccactccctctaccctcatacaaganactnnttccttggaccctctatgctcttacttcccatagtttnacttcgcttgtacttctaccctctaacccttccctccatctncagaaactgagttcctc

SEQ ID NO: 46518 - DNA, 268 bp, Glycine max
  unsure (1)..(268): unsure at all n locations; Clone ID: 701132387H1
ggcttctgcagtagctttaagctacgaaagattttccttgaccatggggcanaagcatttagtgacggtgttctgtttatgggctttaacatgtncccttcttccatctttctccttggaattctgaganttggtttgaagaagagacctctagatcttgatagtattaatgctgctagaaaggcaagagaaggtctaagatctgtnagaccaatgatgggtgcacatgatcagtntattggtcagtcnaaaggtgaagatatagtac

SEQ ID NO: 46519 - DNA, 50 bp, Glycine max
  unsure (1)..(50): unsure at all n locations; Clone ID: 701132388H1
tgttctcttcactcttggtcttgcgagcagcacagnnatnnccagangaa

SEQ ID NO: 46520 - DNA, 270 bp, Glycine max
  unsure (1)..(270): unsure at all n locations; Clone ID: 701132389H1
gggccatccaaacagttgcaaagatatctgggtgcagtgaattagctgccaaaagccaattctatttgattgataaagatggtctagtcacaactgagaggaacagtctagacccagctgcagctccgtttgctaaaaatccnagagncatagnagggctactgagggtgctagtntaattgaagtggttaagaagattagggccacatgtgctccttggtttgtctggcgttggtggtattttcnatgaggcggtgcttaaggncnatg

SEQ ID NO: 46521 - DNA, 265 bp, Glycine max
  unsure (1)..(265): unsure at all n locations; Clone ID: 701132390H1
gcatcccctgttactgctccttcccttcatacaacaggtgttgccctacgtggannattgagtaaggttgtgctggcttacagtggtggcttagncacatcagtcattgttccatggctcagagagaattatggttgtgnagtcgtttgcttcactgctgatgttggccaaggtatacaagaattggaaggtttagaagcgaaagctanagccagtggggctagtcaattagtggtaaaagactganggaggaattgttagtgcc

SEQ ID NO: 46522 - DNA, 269 bp, Glycine max
  Clone ID: 701132391H1
gcagtcactgctctgtttcaccgagtttgggcgtttagatcagaaccaaatcgtgttctcttccattggcaaacatggcaactcaaatgagcaagaagagaaagtttgttgcggacggagtgttctttgccgaactgaacgaggttctgacacgtgaattggcggaggacggttactccggcgtcgaagttagggttacgccgatgcgcaccgagatcatcatcagagccaccagaacccaagccgttctaggtgagaagggaaggaga

SEQ ID NO: 46523 - DNA, 270 bp, Glycine max
  unsure (1)..(270): unsure at all n locations; Clone ID: 701132392H1
ggnctcccaagggtttaacctttctggctgtgttaatatgcgtttcagcactgtcactgagtccttctgttgcgggggaagggcaaaataatggccttgttatgaacttctacaaggaatcatgccctcaggctgaagacatcatcacagaacaagtcaagcttctctacaagcgccacaagaacactgctttctcctggctncaggaacatcttccatgactgtgctgttcagagttgtgatgcttcactgttgctggactccncaaga

SEQ ID NO: 46524 - DNA, 261 bp, Glycine max
  unsure (1)..(261): unsure at all n locations; Clone ID: 701132393H1
caggtttcaagatgcattgtcatggttggagatctgtatactgcatgccaaaaaggnctgcttttaaaggttcagctcctataaatctctcggatcgtctgcatcaagttcttcggtgggctcttggatctgttgagatctttttcagtaggcattgtcccatatggtatggctatggtggcggcttgaaatcgctggaacgattctcttacataaactcagttgtttatcctctgacttcaattcccttaattgcctatt

SEQ ID NO: 46525 - DNA, 269 bp, Glycine max
  unsure (1)..(269): unsure at all n locations; Clone ID: 701132394H1
gaatatcttgttgtttggagcgatccgagaaaaactctgtaaacatgttggtttaccaggacctccttacaggtgatgagcttctctctgactccttccgttacaaggaaattgagaatggaatgctgtgggaagttgaggggaagtgggttgtnaaaggagcagttgatgtagncattggtgcaaacccttctgctgagggtggagganaagatgagggagttgatgatgcanctgtnaaggttgttgacattgtngnnacattcanc

SEQ ID NO: 46526 - DNA, 267 bp, Glycine max
  Clone ID: 701132396H1
ggaccaacaagaagtgtaagttttcattcaatggccagcgctcagctctcagcaatatcttcgtcgatctctacggcgtcgtttgaagggcttcgaccttcggctgttcagtttgcttccgcgggcagaattagaattggcaatctctcccaaaggtctttccggggcttggttgtcaaagccgccaccgttgttgcccccaaatacaccgcgattaagcctctgggagacagagtgctgataaaaattctggaagcagaggagaaa

SEQ ID NO: 46527 - DNA, 265 bp, Glycine max
  unsure (1)..(265): unsure at all n locations; Clone ID: 701132402H1
tttaacactaataacagcaaactaaaggtgaagtttgccaganncangatgggaaggnancattttcagcagcaacacttacnctgatgggagcatgtggatggagagtcagggtcagcaacagaggtatgccttcaagaagagtcttggagccctgataacaactatggccacaaccacaagcaattcccaggcttgcacatgaacatgaacaacaacancnacaactaaaggcnnggaacccnntgctgctgtggactctgtc

SEQ ID NO: 46528 - DNA, 263 bp, Glycine max
  unsure (1)..(263): unsure at all n locations; Clone ID: 701132404H1
gtacgcaacacactttcactgagaaaggatctctatctaccaaggagcagaataaaacccttctctctggtaagtgaataagagaatggcttcagatcggaaacttcacactttccgaggnggtggcaaagcacgacagaccaaggattgctggctcatcatttctggcaaggngtatgatgtcacccctttcatggaggatcatcccggaggtgatgnggttttgttatctgcnacaggganagatgcaaccaatgattttg

SEQ ID NO: 46529 - DNA, 259 bp, Glycine max
  unsure (1)..(259): unsure at all n locations; Clone ID: 701132406H1
gtcgatcttcgagtacaacggaagcgccgtgntggctatggtcggcaagaactgcttcgccattgccagcgaccgaaggctcggcgttcagntccaaaccataacnanggntttccaacgcatttccaagattccgacaagctcttcatcgctctctctngcctcgccaccgatgctcaaacattgtatcagcgtcttgttntccggcacaaactgtatcancttcgtgaagagagggtatgaaaccagagactttgcc

SEQ ID NO: 46530 - DNA, 258 bp, Glycine max
  unsure (1)..(258): unsure at all n locations; Clone ID: 701132407H1
cgccnttcttctacgtttccgtttcctcgttcgaattccgctttttgatctgcgnaaatgagagngtgccnctgcgatnccaacattngncagagctggtatccaggtcggnaatgcttgctgggagctctangcntcagcacggcatcgggcccgatgggcaaatgccaagtgncaagacagttggcggtngtgatnatgcttcantacttctcagngagantggngctgnaaacgagtgcnagtgcngtgtctgna

SEQ ID NO: 46531 - DNA, 262 bp, Glycine max
  unsure (1)..(262): unsure at all n locations; Clone ID: 701132408H1
atagtnatagctnannntctgcttcggctttggcnnnagagtttgtgtaaccaacttcacntttccttncntccttccttcttccgatttcgaagatggcngaagcagangatgccgtangacgccgtaatgcgtcgccgagtntcgaaagaaacttctccagcacaaggnattggaatccagagtccgatccgtnaggatgnatttgcgagcntcaaaganagagtttantgnaacagaagntgatttgnngnctctncaa

SEQ ID NO: 46532 - DNA, 252 bp, Glycine max
  Clone ID: 701132411H1
caacgatcagcgcggttcaggtggagttcctggagtttccagcggtggttacttcaccagcctccggcaagacctatttcctcggcggcgcaggggagagaggattgacgattgaggggaagttataaagttcacaggcataggagtatacttggaggataaggcggtgccatcactcgccgctaagtggaagggtaaaacttcagaggagttagttcacaccctccacttctacagggatatcattcaggg

SEQ ID NO: 46533 - DNA, 262 bp, Glycine max
  unsure (1)..(262): unsure at all n locations; Clone ID: 701132412H1
gttcctctttggttcttcgtcnccttcccaatcttcaactttagggttcctttaatctcgttattcctcttcactcccaaacnccgttcactccaacaacactctgattnaganatggatggaccggctggtcgggtggtgctggactggacatgtttctgnccaaattatnaattgggaaaaacacttgggattggatctcttggcaaggnnnanaattgcagaacatgtattnactggcatanggttgcgatcaagatct

SEQ ID NO: 46534 - DNA, 262 bp, Glycine max
  unsure (1)..(262): unsure at all n locations; Clone ID: 701132413H1
gtcgcccagagcctcgcctcctccgccggcgtgcgcgtcgccaattcgcgatgtgtccaggaatgctggatccgcacgcgcctcttcgggggcgccacccagaagacggatctagattcctccgccggcggggatccgcaatttcgccaggcccaactgctgggcccagtccacttactcgagcctcgccggggaatttctcggcgacggttgcagcnagagcccaatcatcttgggcctgatttcgatcatgaagtcaacg

SEQ ID NO: 46535 - DNA, 260 bp, Glycine max
  unsure (1)..(260): unsure at all n locations; Clone ID: 701132414H1
ggagctgaaaaaagctgcctctaagggtcatgagaaaatggtaacatcacaagaagagcaggcaaagatcactgaggttagagggttgatagggccactatcagataaggaatctgtgtactgttctgatgctccatctcaaggtatttaaggtcgcgaaattggantgtcaagaaggcagctcaaatgttgaagcgagcctaaaatggagaaaagnatacaaacctgaagagattcgctgggaagaggttgctgaggac

SEQ ID NO: 46536 - DNA, 254 bp, Glycine max
  Clone ID: 701132415H1
gttcatagcagacaagtttgctgctgatgctaacagcaagactgtgccggcatcaagcatcccagatgggtggatggggttggatattggtcctgattccatcaagacatttggtgaagcattggtacgactcagaccattatttggaatggaccaatgggtgtttttggacttgataagtttgccacaggaacagaggctatagccaagaaactggcagagctgagtgggaagggagtgacaaccatcattgg

SEQ ID NO: 46537 - DNA, 263 bp, Glycine max
  unsure (1)..(263): unsure at all n locations; Clone ID: 701132416H1
tcaactctgcttcttttcaatcagttacattttctttggtattnnaatggccactgttgaggttgtgtcagcaanggtttccctcccagaggacacaaaagaggcatcattgaaggctgatgagaagaagaaacagaagaagttgttgagactccaacaccaacaccagaaaatgtcgtcactgagcaaacaaaggaggaaagtactgaggccccacaacctgcagcttcagaagacaagccctcggttgaagttgtgtctgg

SEQ ID NO: 46538 - DNA, 263 bp, Glycine max
  unsure (1)..(263): unsure at all n locations; Clone ID: 701132417H1
cttctcctcatccaaatggccgactccacccctctcctctcccaatccaacccatcatcatcatcgtctcccgacacacaagaagcaccgccatcgaaccaacaccatccctctctggggtccacagtagaacttgcataggcgagttcaactggtcccagttcctccagtcgattctggtctccctcgcatggatattcgacgcccagcagaccttcatctccgtcttcancgacgncctgcccgagtggcactgcaccgag

SEQ ID NO: 46539 - DNA, 261 bp, Glycine max
  unsure (1)..(261): unsure at all n locations; Clone ID: 701132419H1
gaaattgagtttctgagataaccacttttctctttgattcatcaatggcaaccgcgaggaccgtgaaggatgtttcgcctcacgatttcgtgaaggcttacgcctcccatctcaagcgttccggcaagatgganttcctgagtggactgatattgtaaaaacagcaaaatttaaggaattggctccatatgatcctgactggtattatgttagggctgcctcaatggcaagaaagattatttganaggcggtcttggtgtt

SEQ ID NO: 46540 - DNA, 263 bp, Glycine max
  unsure (1)..(263): unsure at all n locations; Clone ID: 701132420H1
gctggttttgagncctcagctaccacctacattgctggtgcngagattatgttgcaatgcaagagcagggttagcaacgaggttgtgtacacgaagaaggggtacaccgactcaaccggagcatacacaatgtagtggatgaggatcacgcagatcagatctgcagtgccaagcttgtaagcagccctcaccctcaatgcaaggaagtcaccccaggccgcgacgaagccgttcgtgatctcacccgctacaacggcattgcc

SEQ ID NO: 46541 - DNA, 263 bp, Glycine max
  unsure (1)..(263): unsure at all n locations; Clone ID: 701132423H1
aagcatctcagaccagaaccaccgaacccactcagaagcaaattccganaacccctcatntaatagtactggtattcagcngttcatgncaaaagcctgaaccgntncatgtcagaaggtgcagaaattgatgacgtgtggaccttgacgaggaaaattatatggnagagatggatgatgatgntgnagancaaatagntgatgatggagtggatggaggtgangatgnaaatgctgcnggtagtgttgaagnncatgaatat

SEQ ID NO: 46542 - DNA, 264 bp, Glycine max
  unsure (1)..(264): unsure at all n locations; Clone ID: 701132424H1
tggtgaaagaagttgggntggattcatacagattttccatctcatggtccagaatattccccaagggcaagggagncagttaacaccttgggggtcaagttctacaacgatctcattaattcngattatagcaaatgcttaaagccatttgtcacgctgtttcattgggacctcccacaagctcttgaagatgaatatgggggatttctcaaacctgaaatagtggaggacttccgtaactatgctgacttttgcttcaagaca

SEQ ID NO: 46543 - DNA, 263 bp, Glycine max
  Clone ID: 701132425H1
cacagcaagagtgttcaaatgggagagggaaaaggaagaatttgtgtcactggaggcacaggattccttggttcatggataatcaagagcctccttgaacatggatatgctgttaataccactataagatctgcccaggacgcaagagagatgttagcttcctcacaaacctacctggtgcatcagaaaagcttaaaattttcaacgctgatctcagcgacccagagagttttggtccagcagttgagggttgtgttggaatt

SEQ ID NO: 46544 - DNA, 264 bp, Glycine max
  Clone ID: 701132426H1
gcagcacagcaatacgtatcattgaggaagtttcctgtggatcgtctccgaaaatgaacgacgcagacgttctcaaagcaaatccagcagatggttcggttcatccgccaggaagctgaggaaaaagccaatgagtctctgtctccgccgaagaggaattcaatatcgagaagctgcagttagtcgaagccgagaagaagaagaccaggcaagagtacgaacgcaaagaacgccaagtcgaaattcgcaagaagattgagtact

SEQ ID NO: 46545 - DNA, 262 bp, Glycine max
  unsure (1)..(262): unsure at all n locations; Clone ID: 701132427H1
tgcctacaagtatgtttcggagctatggcgcaagaagcagtctgatgttatgagattcttgcagcgggtgaggtgctgggagtatcgccagcaaccttctattgtccgtttgacaaggtctactcgcccagataggctcgtcgcttgggtttcaaggctaagcagggttacgtgatttaccgtgttcgcgtacgaaggggtggccgtaagagancagttccaaagggtattgtttatggtaagcccaccaaccaaggtgtta

SEQ ID NO: 46546 - DNA, 261 bp, Glycine max
  unsure (1)..(261): unsure at all n locations; Clone ID: 701132428H1
gggnaaaactggaattccaatgattcttaatttcttanaatccaatctgcaaactgagtnngatatataacttgtttttgatttcttcctcatcattttgcatanacaaagattaaaancngaagggttntntggaattgcttcaatatgatnttgctgatgttgtgcttcaccaacttgagcatagcttttgctcaaagtcatatgaatggattggagagcagccatggccaagattgccattcacaagaccgttttggc

SEQ ID NO: 46547 - DNA, 262 bp, Glycine max
  unsure (1)..(262): unsure at all n locations; Clone ID: 701132429H1
gcttgctgncgaggttcaagggacngagggttgttttcctgaagcagctcccatctggattgcttcttgtaactggtccctttaagatcaatngggttcctctcagaagggtgaaccaatcgtatgtcattggtcatccacaaaggtggacatctctggtgttaatgttgataaatttgatgacaagtactttgccaaggaagccaagaaaaagaacgaaaagggcgaaggcgagttctcgaggcagagaaggaggagaaaa

SEQ ID NO: 46548 - DNA, 262 bp, Glycine max
  Clone ID: 701132430H1
tttagattgtactcattccaattaccagactcaatgagcccggtattgttatttattgtcactaccttccccgtgtcaggattgggtaatttgcgcgcctgctgccttccttggatgtggtagccgtttctcagctccctctccggaatcgaaccctaattctccgtcacccgtcaccaccatggtaggccactatcctaccatcgaaagttgatagggcagaaatttgaatgatgcgtcgccggcacaaaggccgtgcgat

SEQ ID NO: 46549 - DNA, 239 bp, Glycine max
  unsure (1)..(239): unsure at all n locations; Clone ID: 701132431H1
agacttagattttgtgaatggctgaagtggaagagggacaggtcatcggcgtccacaccgttgatgagtggangctgcaactccagaatgcaaaagactccaaaaaactgatgtggtggattttactgcttcctggtgtggtccatgccgttttatggccccagttcttgcagagattgcaaagaaaactcctgaattgatcttcctcaaagtggatgtggatgaagtgaggctgttgc

SEQ ID NO: 46550 - DNA, 264 bp, Glycine max
  Clone ID: 701132432H1
ttcgatttcagtcgaggttttaagcagcagcaagatgtctgggcgtggaaagggaggaaagggattgggaaaaggaggagcaaaacgacatcgtaaggtgctccgcgacaacattcagggaattacgaagccagcgttcgtcgtttggctcgcaggggtggcgtgaagcgtatcagcggtttgatctacgaggagactcgcggtgttctcaagatcttcttggagaatgtcatccgtgacgccgttacttacacggagcacgct

SEQ ID NO: 46551 - DNA, 261 bp, Glycine max
  Clone ID: 701132433H1
ggtctttatatttagttgttgacatcaacaaagtcatggaggaagttaatgtggttcaaaccaagaatggaactgttgcagtagcttctgcgtttgctggacataaggaagctatacagcaaagggaccacaatttttaagaattgctgttgaagaagcctataaaggggtagactgtgaagatgggggtccctttggtgctattatagtatgtaatgatgaaatagttgctcgatgtcacaacatggttctgaggaacac

SEQ ID NO: 46552 - DNA, 260 bp, Glycine max
  unsure (1)..(260): unsure at all n locations; Clone ID: 701132435H1
gggtgataaagcgggtcaacccgcctcctctgcctaaagcaaggtgggatgagttaacccatcatgaaagtaggnancaaaagactcttcctgtttagatttttttttgtcaacaaatgttagatgttatttgtagttttttattagcgggagaaccgaatctgagattttttttttcttttattctctttttancacccanctaaccttataattccatactcaccccgtttagatgatgagaaatgaattagatttca

SEQ ID NO: 46553 - DNA, 249 bp, Glycine max
  unsure (1)..(249): unsure at all n locations; Clone ID: 701132436H1
ctctgaacaacgcccaccatgcaggccagtgataggtttaacatcaattcccagcttgagcatctccaagccaaatatgttggaactggccatgccgatttgaacagatttgagtgggcagtgacattcaacgagatagctatgcatcatatattggacactacccttactgggattctttgctattgctgaaaatgaatctattggaagngaacgctacagctttatgcagaaaatgctcctgccttg

SEQ ID NO: 46554 - DNA, 260 bp, Glycine max
  unsure (1)..(260): unsure at all n locations; Clone ID: 701132437H1
tttcccagcagtggtaagcttataagacatttgttaatattcttcatacaattcctttgattgttgttgagtcaaggagggaagtggatgatgtganggaactaattgtcatagtcaaagagtatgttttggcatgcagatggagctgaagaggagggaagttaaggacaatatantacggcagcaggagcttgcagcatatttcactcactgcaaccttcagacacctcacttgaggttagcnttgcagaatgcnatgc

SEQ ID NO: 46555 - DNA, 260 bp, Glycine max
  unsure (1)..(260): unsure at all n locations; Clone ID: 701132440H1
gccgtccctatatgtgtggaactagctttcgtcattctaactgtcttgatcagtacaagaaagcttatactaaagtaatttcacctaataggcaacctatgcaaggcactccaggtgtgctacaagattcaacttgcctcttganaagagtgaagccacagagcttgcatgtcctctatgcaggggtcaggtgaaaggttggactgttgtggaacctgttcgggactatctgaatgcaaagaaaagaggctgcatgcagg

SEQ ID NO: 46556 - DNA, 260 bp, Glycine max
  unsure (1)..(260): unsure at all n locations; Clone ID: 701132441H1
ctctcctctgatatttctatattttggtgctctgtgtctctacgatctggatccaacggtccaaaatgttcggggcttgtgctgcttgttttcccaggttttagagctccaaaccttcagatccacctcattgtctccagatcttccttccttgataacgttttcgggttcgagaaggcanntgtttgtttgtcgtacgaaatggagactaaaccgagttcggtgatggttacgctcagttacggcgcgttgacgtgcgc

SEQ ID NO: 46557 - DNA, 259 bp, Glycine max
  unsure (1)..(259): unsure at all n locations; Clone ID: 701132442H1
tgngttgggcactccgagtnaacagccancaaactacttctgcanaattttgacagccagtgacactagcactcatgggggattctctgttcctcgcagggcagctgaaaaagtttttcctccattggactttcacaacagcctccttgtcaagagttaattgctagggatttgcatggtaatgagtggaaatttagacatatcttccgtggccagcccaaaaggcatctacttacaacaggatggagtgtgtttgtga

SEQ ID NO: 46558 - DNA, 261 bp, Glycine max
  Clone ID: 701132444H1
gtccagatagaaaaatattgcttgatcgaagtccaggagtcgatgagttatacattgaaggatatatccaagccatgcttgatacagtttatagacaagaataccttagagtgagagttattgacaatcaggtatcctgaaaaacctacctccaaatcattctcttatcaatgagataacgggtcgtgttaaggagttcctgtgagcaaggcattgctaaaaggagatccctcaaccacatcgcgccctttaagccgtctt

SEQ ID NO: 46559 - DNA, 236 bp, Glycine max
  unsure (1)..(236): unsure at all n locations; Clone ID: 701132445H1
tnaaggcaaaatgtgaagtgaataatgctgtttcatggccgacaaagatactgtaatattgttgtatcttttatagaagttcttgtaaacggtatagtatctatgtctgatcataatctttcagattaagttatttcttctaccancattaatcatcagtgtatgttatataattttatagaatagaattctatacattttatttttgtctatttacctatattttgcttgaattt

SEQ ID NO: 46560 - DNA, 160 bp, Glycine max
  unsure (1)..(160): unsure at all n locations; Clone ID: 701132446H1
cttcccttncctaacgatctncaggaagacaccaagcttctctccacgcccttcttgggtnnatctgaagtgcagngatggcggatggattgcactcgcggcatccatcagtagttcagaagttatctggacagcttatttgttgtctaggcttgcccct

SEQ ID NO: 46561 - DNA, 261 bp, Glycine max
  Clone ID: 701132449H1
cggaaatctccttatgctccttcaggagaagaagggggaagtgttccagccgaggatgcacctttccaaccagtaagcgcccaatcagtcttttgatgatgtgctgactattgttctaatacctgagtgagtagtatcacttctttgttttcaacaataaaggaagcttgtcatgtattcatattagcacaagacaaatgattgatctgcacctacgcaatagacatttacttgggattttgatttttgtgttaaaaaaaa

SEQ ID NO: 46562 - DNA, 258 bp, Glycine max
  unsure (1)..(258): unsure at all n locations; Clone ID: 701132451H1
aaacaccatggtgattaagtctgtgtngttcagcttcatttnncccncganaacttntntggtggtntggnggttgantgtnacaagnttcctgntactngctaatgcttncntgtcagaaattagagggaacatttganctattcaaagttttggaatgctaatccctctgcnnannagcaggtcaagttgtctagcanagctggcatncttttgctgtacatcctgcttnncntgctgnccatgcatncttcnggg

SEQ ID NO: 46563 - DNA, 260 bp, Glycine max
  unsure (1)..(260): unsure at all n locations; Clone ID: 701132452H1
ttaacatctaatgggtttttgaagagatcaccgtccactcaaattaggtcttctgtgtcttcaagcacagttttgaagcatgctaaaggcacatctaaatcatttgatggtggtacaaggtcattagaaagggtaaaattcttctaaatggaaaacctccaagttactcattcaaccagtcttccgaaggnaccaaagtcagggncgaaaangataaatgganaggnnattcagntgatnaaccaaatgacttcccaaca

SEQ ID NO: 46564 - DNA, 259 bp, Glycine max
  unsure (1)..(259): unsure at all n locations; Clone ID: 701132453H1
ctccattccacaacatcaaggttnccnatcatgtcggggaagaggcnccggccaatgatcggaaagttgtcggagttgttgntctcgagaggccgcacggtggcacttttggacaccactggaagcccaanagcccattagncatgaagatgatgcaatcaccaagaggcttaaaaaattatgatcttggtggcgttggtcttggaattgtggtggctcttgataaatccnataacgaggttgctgcacgtgaagtttt

SEQ ID NO: 46565 - DNA, 260 bp, Glycine max
  Clone ID: 701132455H1
gctcgaagtgatccactccaggtgggccatgctcggggccttgggctgcgtcttccccgaactgttgtcccgcaacggggtcaagtttggagaagctgtgtggttcaaggccgggtcccagatcttcagcgaggtgggctggactacttgggcaacccaagccttgtccacgcccagagcatcctcgccatctgggccacccaagttatcctaatgggtgctgttgagggttatcgtattgctggtgggcccctcggtga

SEQ ID NO: 46566 - DNA, 90 bp, Glycine max
  unsure (1)..(90): unsure at all n locations; Clone ID: 701132456H1
ggccctcttctcttcctcccagaatcggtcactcaatcccgataatcatgaagctccgnatcacgactagtctcgaatcgtttcccacac

SEQ ID NO: 46567 - DNA, 261 bp, Glycine max
  Clone ID: 701132457H1
cacagtctctaagaagatattagtgttgaagactctacaactatatatttaaacctcctcttacttggatcaactcacaaccactctcttttattcttagctttcctttccagttcatacttcatcctattatactttccctctttgcattccaaatggccactgttgaggttgcacagcaaacaccaacaactgtgacagagaatgaaacaacgactgaggtaaccaagattgaggaaactaccccagaacagccagcca

SEQ ID NO: 46568 - DNA, 260 bp, Glycine max
  unsure (1)..(260): unsure at all n locations; Clone ID: 701132458H1
gngctgcctccaaggatcgcgagancttcgtctacatcgccaagctcgccgaacaggccgagcgatacgaagagatggtggaatcaatgaagaacgttgcgaatctcgacgttgaactgactgtggaggagcgaatttactttctgttgggtacaagaatgtgattggtgctcggagagcatcgtggaggatcctgtcttccattgagcaaaaggaagaaacaaaagggaacgagttgaatgcgaanggattaaggagta

SEQ ID NO: 46569 - DNA, 260 bp, Glycine max
  unsure (1)..(260): unsure at all n locations; Clone ID: 701132459H1
ctatgaggngcattcctgcatatgagaatgctatgaaagactgctttgaacgttgtttggatttgtatttatgtcctcgagttcggaaaaaacgtctcaatatcgatcctgaatctttaaagccaaagcttcaagtcgaaaggagcttaagccttatcccacaacatgctatatcgagtataaaggccatgaagatgctgttacatcaatttcactcgaagcttcaggacaatggatggctcaggttcaagtgatggaac

SEQ ID NO: 46570 - DNA, 259 bp, Glycine max
  Clone ID: 701132461H1
tcctaacactttcttctctctgttttccttcttcctcgcatcaatggagttggacggcgttctcctcggcatgtgcaaccctctcctcgacatctctgccgtcgtcgacgacgctttcttgcaaaaatacgtatcaagttgaacgatgcgattctcgccgaggataaacacaaacctatgtatgaagaattggctaacaatcctaatgtggagtacattgctggaggtgctactcagaattcaatcagggttgctcagt

SEQ ID NO: 46571 - DNA, 259 bp, Glycine max
  unsure (1)..(259): unsure at all n locations; Clone ID: 701132462H1
tgctgctattganaagcctatcactttgaaacctggtgaggaatggaagggaagactagaactttcaactgtttcttctagttattgtagtggacagcttgatcccaaaagagttattcaaggaagctgaagatcatcgttgtgttttgtgtcctgtacaggtagcttgttgccaaaacgatgaacgttgaaaggaaagtgtctccaacaatttccccccttcatgttccacttaaacctcttcatgttggacggatga

SEQ ID NO: 46572 - DNA, 265 bp, Glycine max
  unsure (1)..(265): unsure at all n locations; Clone ID: 701132463H1
ggaacataaggcggggaagagttagtttnttctctctncgatgnaaggcggggaagaggttctcccttcggccactgccacctccgnacgccanccggcaatcccaccgcttcgcctcctccgctcgctgatctgtcggtgcncccgatctcgctgctgcctcggacgacgtcgttacccaacctgaaattcacgcgctgatttcagacgaagagtcacgatcacgagcatgaacatgacgatgacctcgagcacgngcacgatt

SEQ ID NO: 46573 - DNA, 252 bp, Glycine max
  unsure (1)..(252): unsure at all n locations; Clone ID: 701132464H1
gttcgttcactttcactttaccaactcctaacaatttctctctgtttccttcttgcaccgcatcaatggnatnngacggcgttctcctcggcatgtgcaaccctctcctcgatatctctgccgcgtcgacgacgctttcttgcaaaaatacggtatcaagttgaacgatgcgattctcgctgaggataagcacaaacctatgtatgaagaattggctaacaatcctaatgtggagtacattgctggaggtgc

SEQ ID NO: 46574 - DNA, 258 bp, Glycine max
  unsure (1)..(258): unsure at all n locations; Clone ID: 701132465H1
atggataaagcanttcaaagacagagagtcctgcttgatcatcttcaacccatttcttcaagttcaaatttttcttctcaaacccatcaatctacggatctctcagcttcattangttttgccaagaattctcgcacggncaaataggtggatcagatgacgacgtggtgattgtagctgcntatcgtactgccatctgcaaagcaaagcgtgggggctttaaggatacccttccagatgacctgcttgncacagttc

SEQ ID NO: 46575 - DNA, 260 bp, Glycine max
  unsure (1)..(260): unsure at all n locations; Clone ID: 701132466H1
tagatatcaatattttcgtattttgtcacaagtggcttatttagangacatggtcaacaactgggcttattcattgctaagtctggagcaggattcccctgagcataaaacaaaggttataccagaaagtgtgggccattntacagtcatctcacgcgggaaaatcaccaaactgaagatgaggactgtcatttagttgttcctgtggatggtaatgatttggagacattncnnnnnnagtcacaaggaaattccttctg

SEQ ID NO: 46576 - DNA, 258 bp, Glycine max
  unsure (1)..(258): unsure at all n locations; Clone ID: 701132467H1
ttcgtcgaagaccacttcgaactcgccgtggaccttctttctcnggccattcacctcgaacccaacaaagccgaactctacgccgaccgagcccaagccaacatcaaactcaacaacttcactgaggctgtgctgatgctaacaaagcaattgaattgaattcttctctaccaaaagcatatttgcggaaaggtactgcgtgcatgaagcttgaggaatatgagactgctaaggctgctctagaggtgggtgcatcat

SEQ ID NO: 46577 - DNA, 256 bp, Glycine max
  unsure (1)..(256): unsure at all n locations; Clone ID: 701132468H1
gattgctctgttactatcaaaaggccttctttcctcatttcggatgcacnctccccatncatgtntacttgngtaaaatcccgagatgtttgtattgttggtgttgcacggacgccaataggtggtttantggcaccctatcatctctttctgccacagagttangctcaattgctattaagactgctctcaagagagcaaatgttgatccatcatcgtgcnagaggtgttttttgggnatgttctnagtgccaat

SEQ ID NO: 46578 - DNA, 257 bp, Glycine max
  unsure (1)..(257): unsure at all n locations; Clone ID: 701132469H1
gaatatgaagttgtttgttttctttgttgctgnagtagttttggtagcatggccatgccatggcgcaggctaccacangttccctctccgaatgaaaactggctatggtgagcgttcttcgnnggtaaatgcgcangttttaggcttgcngtggaagcacacaacatccgagcgncttaanaccattcctgaagagtgcgttgaaccaacaaaggactacttaatggcgnacaattagatcagactctaaaacngtt

SEQ ID NO: 46579 - DNA, 257 bp, Glycine max
  unsure (1)..(257): unsure at all n locations; Clone ID: 701132470H1
ggactcggttcgagccacttggatgccacaaggtgagaaaagaaagaagctagaggagaagggcattatgcatgcgctttgtaattggacacagtgctacatacaggtggtattctagacagagctattgagcagaggacagaaagcatggagatttcttgaggctgaatcatgtggaaggataccttgaattgtcnccaaagacaaaaacctactttgccactgctgtgaacttatgggatgctgatttctatgtc

SEQ ID NO: 46580 - DNA, 258 bp, Glycine max
  unsure (1)..(258): unsure at all n locations; Clone ID: 701132471H1
tccaactcctacaacgcttttctctgcactcatgggcaaggtcaagatcggaatcaacggntttggaagaattggccgtttggttgccagantcgctctgcaaagagacgatgttgaactcgttgccgtaacgaccctttcattaccaccgattacatgacatacatgtttaaatacgacagtgttcacggacactggaagcatcacgatgtcaccgttaaggacgagaagacccttctcttcggtgacaaggcagtc

SEQ ID NO: 46581 - DNA, 246 bp, Glycine max
  Clone ID: 701132472H1
atcctgcatactacgtacttaaggaggatgagtctccttgtatttttggttcaattgaaaagcagagatggtcctatgcctgtgctaagcagttgattgagaggctgtttatgctgaggtgctgaaaatggcttggaattcacaattgtgaggccttttaattggattggaccacgaatggatttcattcccggcattgatggcccaagtgagggtgttcctcgggttctggcatgctttagcaat

SEQ ID NO: 46582 - DNA, 258 bp, Glycine max
  Clone ID: 701132473H1
gaaaatggcaatactgatcctaggcctgctggccatgttccttttggtctcctcagaggtggcatccacgaattcaaaagaggtgacaaatggagttgaagatgccaaatatcctggtggaggctatggtggggttacccaggcaatggcggtggtggctatcctggccgtggtggtggctaccctggtcgtggtggtggctatccaggtcgcggtggtggttaccctggtcgtggtggcggctatccaggccgtgga

SEQ ID NO: 46583 - DNA, 258 bp, Glycine max
  unsure (1)..(258): unsure at all n locations; Clone ID: 701132474H1
agcacatctaggnaatatggctgagaatccaattcgtgtaacgatgattccatggtctgcctttggccacttgataccatttttcaaactttccatagccttagccaaagctggtgttcatgtctccttctttccactcccaaaaacattnaaaggcttcccaaaattccttcgactttatctcatttggttcattttgtggaacttcctttaccatcattggacaatgatatcttgccaganggtgctgaggccacc

SEQ ID NO: 46584 - DNA, 259 bp, Glycine max
  unsure (1)..(259): unsure at all n locations; Clone ID: 701132475H1
ttgtttttccttcagaactcataagaattgagcaagtattgatnttgnnncactaatgctgtggtgggttttggtcaaaatttcagaatcttaatggaaaactcagaccacgacgaacccgaaaagaagagcctcatctcacctctgtctcttcccgcactcctcgaaactccatcaactctcctacnaacaacaaaactgctgacgcaggagtcttacagttccagaatcagcagcttgttcaacagatagacatcca

SEQ ID NO: 46585 - DNA, 124 bp, Glycine max
  unsure (1)..(124): unsure at all n locations; Clone ID: 701132477H1
gaagtgtggtacncttaccctgaggtgcangncaangtaacctaanggtgcttacaaatattaacagcggaagaagtgnanggcccagacggccaccgtctagggtagggttanggttttaatt

SEQ ID NO: 46586 - DNA, 260 bp, Glycine max
  unsure (1)..(260): unsure at all n locations; Clone ID: 701132478H1
gatgctgcaagaagaaagtagtgaacctgacacatgtgagtggggaaatgctgagaatcctcctgccatgatataccaaaaaaatgcacccaaaggtttgaaaagactcctgaaatttgctcggaagagcagggcgatacaggttccactggctggtctagcccatctgttttttctgaaggagaggatgatgtcgnggaatttaaaaattctaataaaaggaatgctgataatctactgagaaaggccgcacaaaatgt

SEQ ID NO: 46587 - DNA, 261 bp, Glycine max
  unsure (1)..(261): unsure at all n locations; Clone ID: 701132479H1
tccntgttcttcagtctcctcctattatccgccaccgtagccgccgncgaacggatcgacgatgaanacgaccttctgatccgtcaagtggtgccggntgcggangaccaccacctgctcaacgcggaggacacttctccgccttcaagacaaagttcggcaagacctacgccacgcaggaggagcacgaccaccgcttccgtatcttcaagaacaattgctccgcgccaagtcacaccagaaattggatccctccgccgt

SEQ ID NO: 46588 - DNA, 257 bp, Glycine max
  unsure (1)..(257): unsure at all n locations; Clone ID: 701132480H1
ctttcttgatcatgtcgcttgttggtaaaattagtactgnnattggggttcatgcaactgctgcaaagtgnctcaacctctttgcaacgcagctccatcatgttcaaaaccttactgatagagtgcatgaaccaagctgcatcatggtgatgactggcatcacaacgagtcgatcaaacactggacttgtacaataganggtaagattacaacatgtctggagagtattgaatccgttgatgaaccgaacaaaacaa

SEQ ID NO: 46589 - DNA, 261 bp, Glycine max
  unsure (1)..(261): unsure at all n locations; Clone ID: 701132482H1
tcagnaccacacgtaaatgacacagaggggacaatncatttattttttgttatttcttttttaattttaggttaaccattagactcttaaagtctcataactgaacagttcaatgcagaaaacttctggaaatttataggccattttcttggaggtttatattattatctaagaagatgcatgtttgccattttatctgtgggtcctgtgccaagtcatattgctttcatcatggatgggaatcgaaggtatgcaaagaag

SEQ ID NO: 46590 - DNA, 258 bp, Glycine max
  Clone ID: 701132483H1
aagaggttgcagtgtttttgaggaagattggttttgaaaaggatactacaatctatgtgacacaatcaaggtgggatgaaagcctagattctcttaaagatttgttccctaaaacatatacaaaggaatcatcattcccgcagataaaaagaaaaagttcctagactctgaagattctgagttggagaaagtgattgactttatattagttctgagagtgatgttttcgtaccagcaatatcaggtctattttatgca

SEQ ID NO: 46591 - DNA, 258 bp, Glycine max
  Clone ID: 701132484H1
gcttgacttccagcttcctgatcgttttaagttggaattctcagctgaggatgaagccaaaattgagagacctgtaatgatacacagagccatcctaggatctgttgaacgcatgtttgccatacttttaagcactacaagggtaaatggcctttctggctcagtcctcgtcaagcgattgtatgccctgtgtctgaaaagtcacaatcttatgcactacaggtgcgagatcagatccaccaagcagggtatcacgtt

SEQ ID NO: 46592 - DNA, 257 bp, Glycine max
  Clone ID: 701132486H1
ataccctgaacatgctgagccttgatgtaacaaaaaaatgtcttgtggctgaggggtggagtcctgtttttgcaactaagcagatccaggatgcattacagcgggcagcattggactctaattctcaagcaatgccattttccaagttttgcaaactagggagttgccacctacatattttcgcacaaacaaatttacttcttcttttcaaggaattattgattcatatggggttgctaagtatcaggaggcaaatc

SEQ ID NO: 46593 - DNA, 258 bp, Glycine max
  Clone ID: 701132487H1
atcaagtatgggtttggacctttctgaagggaaaatcagaaacaacttggaggctggagtcattgagcctgcaatgagcaaagtaaaaattattcagtttgcaactgaagctgccattactatccttcgattgatgacatgatcaagcttatcaaggatgaaagtcaaaatgaggattaaagtataactgaatctaggaggcatctactccccagtgcttacaaaagggagggttgtgctagtgtgcatttgaagagg

SEQ ID NO: 46594 - DNA, 214 bp, Glycine max
  Clone ID: 701132489H1
gcgctttctgcaaaccgaacatttcatctccaaagggatcaacaggtcgaaggagaaatggggctgacattcacgaagcttttcagcggcttttcgcgaagaaggaaatgcgaattctgatggttggtcttgatgctgctggtaagaccactatcctctacaagctcaagctcggagagatcgttactacaattcctaccatgggttcaatgtt

SEQ ID NO: 46595 - DNA, 250 bp, Glycine max
  unsure (1)..(250): unsure at all n locations; Clone ID: 701132490H1
tgcgatcgaagaagaacaacgacgatggcgatggctgcagctctgcgtcgcnaaggaaggcgtttgacccaaccaatcaacgccctccactcttctctcaattcctccctcatctctcaagccaagcccctcatggcgcgcgctccatttccactcaagttgtgaggnaccgaatgaagagtgtgaggaatatccagaagatcaccaaggccatgaagatggttgccgcgtccaagctgcgggccgttca

SEQ ID NO: 46596 - DNA, 259 bp, Glycine max
  unsure (1)..(259): unsure at all n locations; Clone ID: 701132492H1
tganaatgaggcntgctcttgctttgcttcctcttctatttgctttcttgttagctgccactacagaatcaagaaaagatacaggggaatattggaaaatgatcatgaaagatcaggaaatgccagaaggcttcaaggtcttgtttcatttcaatctgaaaataaccctaagactcaagagcagcttggtaaaggttccaaaaaccattgtgaagagtctctagttacaaatacacaagttaatagtgacttcgaaccc

SEQ ID NO: 46597 - DNA, 155 bp, Glycine max
  unsure (1)..(155): unsure at all n locations; Clone ID: 701132494H1
aattgtacataatttacactcattgccaccaaccaatcntttncctttttctctctcaagtctcaacttcaacaaccgancttgatagatactgtgagtgtttttgttcctcaatcaatctaattntccctttctcttccaatggcgtcttcnct

SEQ ID NO: 46598 - DNA, 289 bp, Glycine max
  Clone ID: 701132501H1
caaaatgtaaggatatatacctacaaagaactaaaagttgcctctgacaatttcagtccagccaataaaattggggagggtggatttggttcagtttataagggattgctaaaagacgggaaagtagctgccataaaagtactttcagcagaatcaagtcaaggggtaaaggaatttgtgacagagattaatatgatctcagaaatagagcatgaaaatttggttcagctatatggttgttgtgtggaagggaatcaacggattttggtctacaattatcttgagaaca

SEQ ID NO: 46599 - DNA, 291 bp, Glycine max
  unsure (1)..(291): unsure at all n locations; Clone ID: 701132502H1
cagaggcnntgcttccaagggcaaggtgagancncanaatggaaacatacataatcaaggtgttaaatttcttgaccaaaaaaggtgaagtctacaaggcagagcnacccttggaccttaaggaagccttttccaagtttgctggaggnncagaatcaaatgaagaaggatcagcttcttcggttcatggtggaacaccagggagaaaataatattagcaccatggaggatttggataaaatagttgaaaagtttttgcaactaagaaattcttgttctagcaccaaaact

SEQ ID NO: 46600 - DNA, 282 bp, Glycine max
  Clone ID: 701132503H1
gatgctcaagttcttggtgaagccccttataagtttacaaatgctcttgaagctgtcaagaagctgagggcagaaccaaaggccaatgaccaatatttgcctccttttgttattgttgacgagagtgggaaacctgttggtccgatagttgatggtgatgctgttgttacattcaacttccgagctgatcgtatgacaatgattgctaaagctcttgagtatgaaaatttgacaaatttgatagagttcgttacccaaaaatccgctatgctggaatgcttg

SEQ ID NO: 46601 - DNA, 284 bp, Glycine max
  unsure (1)..(284): unsure at all n locations; Clone ID: 701132504H1
gcaagaatggcacttcgttgcttggtgatgtccctttctgttctcttcactcttggtcttgcgagagaaagccatgccagagacgaagatttttggcatgctgtttggccaaacactcccattccaagttcattgcgagatcttctaaagcctggccctgcaagtnttgaaatcgatgatcaccctatgcaaattgaagaaacacagtacccgaaaaccttcttctataaagangaccttcatccaggcaaaataatgaaagtacaattcagcaagcctccctt

SEQ ID NO: 46602 - DNA, 276 bp, Glycine max
  unsure (1)..(276): unsure at all n locations; Clone ID: 701132505H1
cactctcccccttctttccaaaacactccctttcnctttctattcacttcccctacccttccgtganngatgtagatagagaataaaaagagaccagtgtgcagtgagaaagagattgctcacttcttgtgtgggtttgctttgttctttgtgttggaatttgttcatgggtgaagaaggagaagaggtgtcaagagagaaggaacaatacatgggagtttatggaaatgagtggttgtatgtggttgctctgcaaattggcgcgtttaagacacc

SEQ ID NO: 46603 - DNA, 275 bp, Glycine max
  unsure (1)..(275): unsure at all n locations; Clone ID: 701132508H1
tcgattcgctctcaatttgcagtgcgtgagtgaagcacatggatacttccgaattgcccaacctaaagaaatggattgtgatgtatcccgtttacataaactccaagaaaacgatggccgaaggaaggcgcattggcctcgccaaagcctgcgaaaatcctacttgcgccgaaatcggtgattgctgcagctatctgaagctcccttttgcaattgagatagacaaggcgtaccctcgtgatttcatgcagagagggcgcgtganggtgttgctt

SEQ ID NO: 46604 - DNA, 277 bp, Glycine max
  unsure (1)..(277): unsure at all n locations; Clone ID: 701132509H1
gttggaatcctcttcttcccctctggtgttctcagtacggaggagtgaaccggagctggtggctccggccaagcccactccccgcgaaattaagatcctatctgagatagattctcaggcgggtcttcgtacccaaattccaatcatacagttctanccgtaacgacccatcattggcaggcaaggacccagttcaagccattcgaaacgctcttgcggaagcacttgttttctactacccgtttgcgggtagaattaaggaagaaggttcggatgg

SEQ ID NO: 46605 - DNA, 274 bp, Glycine max
  unsure (1)..(274): unsure at all n locations; Clone ID: 701132512H1
caccccttaccgttgtttgtgatggctgtttctcaaacttgcgccgatctctttgtaatcctaaggtagatgttccctctcatttncgttggcttaattttggagagttgtgaacttccttatgctaatcatggccatgtcatactgggagatccttcgccagttctgttctatcggataagtagttcagaaattcgttgtctggttgatgttcctggtcagaaggttccatctatttcgaatggtgaaatgacaaattatttgaagacagtgg

SEQ ID NO: 46606 - DNA, 276 bp, Glycine max
  unsure (1)..(276): unsure at all n locations; Clone ID: 701132514H1
tcagaagattnccnatatgannccttngtntggntctcgttacgttngnagaagatattgctccaaagtttcagggagttatggagaaatcctccagaaattgatgcctcactgcatcttccttcccaaaatgagtttattcctagtgacttttctatacgtgctagtgacacctgtgttgatgattttgcaaattcaacttctcctagatgtttaattgatgaggcattgataaaattctggtacaaaccggatagcactttcaaagttcctcgt

SEQ ID NO: 46607 - DNA, 279 bp, Glycine max
  unsure (1)..(279): unsure at all n locations; Clone ID: 701132515H1
cntacgtngtgttgttactggctgctcttttctctnttcttttctctttagttctctcttcccctttctttnnctttttgcttcgtctnctgagcttgtttaagcttttcttccattaacatattatcatccatgtgtggtattcttggctgttcttggttgttctgatgactctcgagccaaaagggtccgcgtgcttgagctcgcttcgcagattgaagcaccgtggccctgactggagngggctccatcaacatggtgactgcttttggcacatca

SEQ ID NO: 46608 - DNA, 283 bp, Glycine max
  unsure (1)..(283): unsure at all n locations; Clone ID: 701132516H1
tggcattggcatacagctannacgaggnaggacatgttcgacaaaggtgtaaatctgtatggcgaattagcngaagtggccgtgaacagctttctgatatcgaangagtctcctgtgattgaggcggttaggcttcacaacggggcagangagaacaagnaggcncttagnaaatccaagggtgaagaggacgaggactttcagatacttgagtaccaggcccagtnnaggnaatgctcgctgccatgtcacaaagttggtctcctttacnactttggcctca

SEQ ID NO: 46609 - DNA, 288 bp, Glycine max
  unsure (1)..(288): unsure at all n locations; Clone ID: 701132517H1
ttgcaaagcaaaaaccttggcaaattgcaatggcttccaacaaggttattgncaccatcttggttctttctctccttgcctactcaacatcattcaccaatgcatgtggcacatgccacccaaaacctactccttctccccctcctccatcagggaagtgccccaaggacacattgaagctaggggtgtgtgctgatgttctaggacttgttaatgttgttgttggttcccctgtctctagcaagtgttgtgcatgcttgaaggtttggctgattcggaggctgcact

SEQ ID NO: 46610 - DNA, 303 bp, Glycine max
  unsure (1)..(303): unsure at all n locations; Clone ID: 701132518H1
gcgagatcttgagtcgccgatttgaaaagatgagtaagcttcagagtgatgctttgcgtgaagccattctgcaggaatcatgggccgattccaangagaagaatcgcaaatttgtggagaccatcgaactnccaaatncggtttgaagaactacgatcccacagaagganaagcgtcttcagtgggcttccgttcaagttggccccacattccctcgccccaagatgaaaatttggcatggcttggtgatggctcagcatgttgaagagggcagagaagataggacggactggatggatgtaa

SEQ ID NO: 46611 - DNA, 278 bp, Glycine max
  Clone ID: 701132519H1
atttcctttgacttccagtggcaatccacacgacagtatggtagtgttaaagcaagagtctcaatttgcaaaggcgaatgataatagcttttttcattttaatcttcaaatagaacaaggtattccagttctttctaagtggataatcttcaatcgatttaaatttgttgcttcaaagggaatcaaacttggaccagcatttctcttgacaaggcttacaggtggctcaattgttggggacatggctccttaccagcatttccatggaggggttggga

SEQ ID NO: 46612 - DNA, 227 bp, Glycine max
  Clone ID: 701132520H1
cccaaatggatatctggaagtacatatttgggtttgtggaactggcagtgataaaatgtgcgattgagcttggcatagctgaagccatagagaagcatggaagtcccatgacactatcggagatatcatcaagtttagggcgtgatacttcacatctgaagcgcatcatgaggttcctggtgcaaagaaagatattcaaaggcgacgggtgcagcaggggctattct

SEQ ID NO: 46613 - DNA, 277 bp, Glycine max
  Clone ID: 701132521H1
gtcatatgcttgtctcaaagattaagccatgcatgtgtaagtatgaactaattcagactgtgaaactgcgaatggctcattaaatcagttatagtttgtttgatggtatctactactcggataaccgtagtaattctagagctaatacgtgcaacaaaccccgacttctggaagggatgcatttattagataaaaggtcaacacaggctctgcctgttgctttgatgattcatgataactcgtcggatcgcacggcctttgtgccggcgacgcatca

SEQ ID NO: 46614 - DNA, 258 bp, Glycine max
  unsure (1)..(258): unsure at all n locations; Clone ID: 701132522H1
gacaagaaagagaaagagaaaganacnaagatatccgtaagaccttgatccaactcatcatacngnnnnnnnnnnnnnnnnnnnnnnnnnntcaactcgcttttcntccaaccaggacatggcanccagatgaagatatgtcagctttgaagtctaagctgagccaatcaaatgaaacttggaagaaggagatggaaagaagccaatctcaagtggatgtattgcaggcaaggataatggaggtaaaggcacaaatac

SEQ ID NO: 46615 - DNA, 275 bp, Glycine max
  unsure (1)..(275): unsure at all n locations; Clone ID: 701132523H1
gaaaaaatagttttatttttttatttttttttgtctctgtctgactgagaaacacaaagccgaggagacgaagagaaagaaaacgcacacaaacaacggtggannnnnnnnnnnnnnnnnnnnnccaaatcaaaccaggccagcttcaaaacgctggcgtttcactcccccgtcctcgcgttgcttcgaaaccctaaccctatccacggcattcctccgctcgangtcgacgncgtcancgtcgcgccaatgccgcaaaccgaatanaccgatcg

SEQ ID NO: 46616 - DNA, 278 bp, Glycine max
  unsure (1)..(278): unsure at all n locations; Clone ID: 701132524H1
gtggggtcanaatctgaattggtnntngttgcaagcgnttttggtattttggnnntntggntgnagnnaattcataggnagaaaaagaggtgagnntgagtgggtgngcgtgattttngagtnngtnactnttcaagtgcttctttaagagatttggcgatttactatctacaaatggggtttggaatatgcagcttcatatagnaaaactgaagggtgattggtggggactttttttctttttcctgatgtncgntgacttnaatatatttattgaa

SEQ ID NO: 46617 - DNA, 219 bp, Glycine max
  unsure (1)..(219): unsure at all n locations; Clone ID: 701132526H1
gtaatctgagagagaaacaancacaatgnacgtttccattgccaagttccactcccttnncctatgnttttnccttctcttggcattcaanacaaaagcccctncnagcagcannancagagccagnggntgatnagcaagggaccncctttggagccnngcgnagggnactaactgtgggacncctngggncngntggcagcgggcctcacatctncc

SEQ ID NO: 46618 - DNA, 275 bp, Glycine max
  Clone ID: 701132527H1
aacaacatcaacatctctgattcgtataagaaaaatccgcattcaggtctctaacaccaagaagcccctcttcttctacgttaatctggccaagagatatatgcaacagcatgatgaggtcgagctctcagctctaggaatggctattgccacagtagtaactgttgctgaaattttgaaaaacaacagacttgctgttgaaaagaaaatcaggacatcaactgttgacataaaggatgactctagaggtcgacctgttcaaaaggccaagattg

SEQ ID NO: 46619 - DNA, 272 bp, Glycine max
  Clone ID: 701132529H1
tcgtcttctgcttcaaggaaggagagcttgttattctctatcaacaaggaaaatgtcaggtgaagaggttgttgttgcagctgagccagctgctgccatcccaggcgagcctatggatatcatgactgccttgcaacttgtgctcagaaaatctctggcttatggtggtcttgcacgaggccttcacgaaggggcaaaagtgattgagaagcatgctgcacaactctgtgttctagcagaagactgtgaccagcctgactatgttaaactgg

SEQ ID NO: 46620 - DNA, 279 bp, Glycine max
  unsure (1)..(279): unsure at all n locations; Clone ID: 701132531H1
ggaggcactgccacaagcaatggaagagtcttcatccattgaggaatcggtggcaagcgtggtcgaagaagcgaaggaggttcaagacgccgtttccgctcacatctctaagnnttccagcgacnnaggaacctctccggcaacgtgtccgtcgcgtcgattcccgaatccattcgctccgttcctctctcgattctcttgtctccaccaaacaaatcccttactccttagccgataagttggatgaagatttgcagagagcgagatgcatcatcgttg

SEQ ID NO: 46621 - DNA, 286 bp, Glycine max
  unsure (1)..(286): unsure at all n locations; Clone ID: 701132533H1
acatgaatggtccttggtgaacaagcagaagcctatttggatgaggaagcctgaggagatcacaaaagaggagtattctgctttctacaagagtcttaccantgactgggaagagcatttggctgtcaagcacttctctgttgagggtcagttggagtttaaggctatactctttgttcccaagagggcaccttttgacctctttgacacaaggaagaagcctaacaacattaagctctatgtccgccgtgtctttattatgggacaactgtgaggagttgattcc

SEQ ID NO: 46622 - DNA, 281 bp, Glycine max
  unsure (1)..(281): unsure at all n locations; Clone ID: 701132535H1
gtttctgcanattccaatgttccataatannaaacaataagcgggcgtttganaaaaagctgttattnattcgggagcgatatggaggtcgtactcaaagagttgcacgccgatcttcaatctctgagccaatcgcttcccgatccatctcaccatgatttgctcngcaagattcaattgcgtgttgaggaccttgcgaanttggcagangctgcacctgttcgtcgctctaaagttgaggatagagtgcngaggttgtagatngcaatcntcatagtcgg

SEQ ID NO: 46623 - DNA, 275 bp, Glycine max
  unsure (1)..(275): unsure at all n locations; Clone ID: 701132538H1
aacctcganccctttcacgacactggaagcccttgctncgctggccaggactcgatggganaggagagccgagcgtccgctatggaaatcgacgctccaaaatcgacgagttccgatcagatcgttcccaaattctccatcaacgtgctgcngcacttaaaatctgcgcaaatgcagcatggcttgncgccatggagactacactcgctataggaggtattgcacagctcgtttgaggaggttatataaatnttgaagtttacccaggtcgtggc

SEQ ID NO: 46624 - DNA, 271 bp, Glycine max
  Clone ID: 701132541H1
ggaggggaaggagcaggatgtgtcgttgggagcgaacaagttccccgagagacagccgattgggacggcggcgcagagccaagacgacggcaaggactaccaggagccggcgccggcgccgctggttgacccgacggagtttacgtcatggtcgttttacagagcagggatagcagagtttgtggccacttttctgtttctctacatcaccgtcttaaccgttatgggagtcgccgggctaagtctaagtgtagtaccgttgggattcaag

SEQ ID NO: 46625 - DNA, 271 bp, Glycine max
  unsure (1)..(271): unsure at all n locations; Clone ID: 701132543H1
cttgtctcaaagattaagccatgcatgtgtaagtatgaactanttcngactgtgaaactggcgaatggctcattanatcagttntagtttgtttgatggtatctactactcggataaccgtagtaattctagagccaatacgtgcaacaaaccccgacttctggaagggntgcatttnttanataaaaggtcaacacaggctctgccgttgctngatgnttcatgntaacttcgtcggatcgcacggctttgtgccggcnangcatcattc

SEQ ID NO: 46626 - DNA, 270 bp, Glycine max
  unsure (1)..(270): unsure at all n locations; Clone ID: 701132544H1
tttttnttcttccatttctcttcctttctaagcttttttcgattacccatttggagattctgtcctaatggctcttgctccttccaaagtttcatccttttccgggttttctcccaaacccagtgttggggatgntctgaaaaacncaactngctctgtttctctgagctttgcgaatgtgaaacntggaagcagaaacctgagggcntgngcctcaactgtgggtatctcaggggnnnntgtcnaaacctcgnngangctacncaangg

SEQ ID NO: 46627 - DNA, 265 bp, Glycine max
  unsure (1)..(265): unsure at all n locations; Clone ID: 701132546H1
taacaactcacctgccgaatcaactagccccgaaaatggatggcgctaaagcncgcgacctatacnccggccgtcggggcaaggaccaagccccgatgagtaggagggcgcggcggtcgctgcaaaacccagggcgcgagcccggngcggagggttcgtcggtgcagatcttggtggtagtagcaaatattcaaatgagaactttgaaggccgaagaggggaaaggttccatgtgaacggcacttgcacatgggttagtcgatcc

SEQ ID NO: 46628 - DNA, 280 bp, Glycine max
  unsure (1)..(280): unsure at all n locations; Clone ID: 701132548H1
tattgttgagaaagaaaagaatggcanagttaataaaattctttcagttgaacacaggggccaagattccttctgtngggttangcncttggcaanctgnncctggtgttgtagccanagctgncaccacagccattctggntggntacaggcatattgnttgtgntcaancgtataacantcanggcagagattggttctgctcttcnngaagcttttngannacngtgtnntgaancctgaggacntntggntcacctcncgnactctggngtncagc

SEQ ID NO: 46629 - DNA, 279 bp, Glycine max
  Clone ID: 701132549H1
ctctttgtaacttgtaagcatggagtcctcaaagatctatgcttacctgcttcctttgcatgctcttcctctcctccgccactcccattctcggttgtggctactgtggcaaaccccccaaaaagcacaagcctggtaaaacaccaaagacacccacagtacccgttgttaagccaccagtcacaatccctcccattgttaagccaccagtcacaatccctcccattgttaatccaccagtcacaatccctcccattgttaatccaccagtcacaatcc

SEQ ID NO: 46630 - DNA, 180 bp, Glycine max
  unsure (1)..(180): unsure at all n locations; Clone ID: 701132553H1
gggatcttnagcagtnccgtggtgtcgccgccggaggagctggtggctnccggcagcagaacgccgtcgccgaagacganggcggggaagctgctgaaccggttcgtgncgaacaaggcgtcggcggtgtcgctgcaggtgggagaacacgtgcagttggcttacacgcancataacgac

SEQ ID NO: 46631 - DNA, 101 bp, Glycine max
  unsure (1)..(101): unsure at all n locations; Clone ID: 701132556H1
anagttagtgctggtatcagagatggnttccactangaagcangtttnccgcgaatnncnttaggctatctcggtgaccgtnaaantgcttcaaggcgncg

SEQ ID NO: 46632 - DNA, 274 bp, Glycine max
  unsure (1)..(274): unsure at all n locations; Clone ID: 701132557H1
gttngcggctgaggattccgaacgagcgaccttcttcgtttctcgcaaagtttaagtcatcatgggtaaggacaaagactccacatcaacattgtncgtcattgganatgtcgactctgggaagtcaactaccactggtcatttgatctacaagcttggaggtattgacaagcgtgtgattgagaggttcgagaaggaggctgctgagatgaacaagaggtcattcaagtatgcctgggtgcttgacaagctcaaggctgagcgcgaaagagga

SEQ ID NO: 46633 - DNA, 274 bp, Glycine max
  unsure (1)..(274): unsure at all n locations; Clone ID: 701132558H1
ctcaaatggcaataatctttctttcangctcngnaattcttcttccaagtcntgctttctnnactcacattatttaaccgagcaagttccgaatcattcatcggcgtgaactacggacaagtcgctgcgaaacctgncgnngccgtcggagatcggcgnngtgnnncantcgacggccatcggaaaggtncgtntgtacggggccgnaccggccntaatagnagctcngggcgaacacngggatcggaatcgtgatcggagcngcgaaacgggg

SEQ ID NO: 46634 - DNA, 48 bp, Glycine max
  unsure (1)..(48): unsure at all n locations; Clone ID: 701132561H1
gcgtacataaaaagccacatnctttcttcttcttccaccaccnnanat

SEQ ID NO: 46635 - DNA, 277 bp, Glycine max
  unsure (1)..(277): unsure at all n locations; Clone ID: 701132563H1
caattgggttcacaagangtttcatcatcataacgctctgaaagatgggtttgcttcaaacatgaaaaagactgaanctacaattaacaacgctgntagtcaagctttgctgaaacaagtagccctcactgaatcacttggtggatgggaagatggcattctaaccattggcactcttggctatgatcccttgaagaacatcaaccctcacaaagaatactttgntttggagattgaagntgaacaagaagatggtgaaggagagaacatcatggtc

SEQ ID NO: 46636 - DNA, 283 bp, Glycine max
  unsure (1)..(283): unsure at all n locations; Clone ID: 701132564H1
ttttttcagcttctctaaattctctgtctacttcaccaagcacttttggttgcagctttggttaatttccaatatggtgtttcctctcctatctatctttgctttactcaatcttgcagtggtggcaacccatgcagaaaccttgnccncctgaagtttactggaagtncgaagcttcccaccactccaatgccgaaagccattacagatatccttcacccagatttggcagangncaaaagcacctctgtggccgtaggaanaggggggcgncancgctnaa

SEQ ID NO: 46637 - DNA, 283 bp, Glycine max
  unsure (1)..(283): unsure at all n locations; Clone ID: 701132565H1
catacacaagctcttccattcattgtatttntttctttgcctttcaactccaaaacaatgggcttccgcttacctggtattagaaggtcatcttttgctgtaaccaaagcagcttccaaggctgtggaggtccccaaaggctaccttgcagtctatgttggggagaaaatgaagcggtttgtgattcctatttcatacttgaatcaacctttatttcaacaattactgagccaagctgaggaagaattcggatatgatcatccaatgggtggtctcacaattc

SEQ ID NO: 46638 - DNA, 274 bp, Glycine max
  unsure (1)..(274): unsure at all n locations; Clone ID: 701132571H1
ttcttcttcgttgcgntttttcccaaaaccanttgcatncantctagtccgttaccgccgatgccctagancaccgnaagcgacgtcgancaccgcatttcatccgttanggcanaaatgagtcgaggaagtggaggnggatncgatggncanatcnctatnttntccncngaaggacgtctctttcaagtggagtatgnttcaaggctgtgaaggctgcaggnaatcacctcgcattggtgtccgacgaaagggnttcaatttgtgtcgntac

SEQ ID NO: 46639 - DNA, 253 bp, Glycine max
  unsure (1)..(253): unsure at all n locations; Clone ID: 701132572H1
ttcttcttcgttgcgctttttcccannnccaattgcatcantctngtacngttaccgccgctgacctagaccacngcaancggnntcgnaanncnccttcancagttagggcaaaaatgagtcgaggnantggacgtggatacgatcgtncacatcactatnttctcnccngaaggangtntctttcangtggagtatgctttcaangctgtganggctgnaggaatcanctcgcttggtgtctgagganagg

SEQ ID NO: 46640 - DNA, 275 bp, Glycine max
  unsure (1)..(275): unsure at all n locations; Clone ID: 701132573H1
ttcatacttcatcctattattactttcnctctntgcattccaaatggccactgttgangttgcacagcaaacaccaacaactgtganagagnatganacaacgactgaggtanccaagattgaggaaactaccccagancagccagccaccgaggttactgcnccagaaacagtgcaacgaagacgcncaagcaggcangcngcagttgnnactaatgncagnnccagangttgcnanggcaggagcaagcngcnaaancaggnagcagaagnng

SEQ ID NO: 46641 - DNA, 238 bp, Glycine max
  unsure (1)..(238): unsure at all n locations; Clone ID: 701132575H1
caaaaacgaagtaaatgggtcggcttantctcctacttgtgnggtncactgctctttaatcacttcctccttaattatctacacccancctntgcccagctcagnccaaaccactatgctaanatatgncncaaccttnnangcatcgntagacaagccgttnctnatgagttccancaaacctntgtcaccgtcccagncggcntcgcctnntctntnacgattncnttgnncangg

SEQ ID NO: 46642 - DNA, 234 bp, Glycine max
  Clone ID: 701132576H1
atccaaaaccatattcgatatcacaatcggaggagcatactcaaacagagaccatccatggacggtgattcctcttggagtgctcgtctctcttccgcttccaggcgctaccaatccgctcttcaatctcgatcagacatgttcatgggttttgatgaaaatgatggggacgatgatataagggaggagtttctctgcccattttgttctgagtattttgatatcgttggatta

SEQ ID NO: 46643 - DNA, 270 bp, Glycine max
  unsure (1)..(270): unsure at all n locations; Clone ID: 701132577H1
ccggttgttgcgttggcgcaaatggcantcttcagaagcgtttctgcactttctgcgacttncgctctcgcgtgggccaacaatctaatcnggcgaattcagttagatggctccaaactccgagctccantaacactgatctttattctgagttgaaggaactggttccagagtatcaggaacgtgttaagaagctgaagaaagatcatggaagtgttgaattaggaaanatcactgttgatatggtacttggnggaatgagaggaatga

SEQ ID NO: 46644 - DNA, 131 bp, Glycine max
  unsure (1)..(131): unsure at all n locations; Clone ID: 701132580H1
tgatncttcaataccatatattctctctctntntctttttctttcttgntttgtgctgtgaaacagntagaagtggtgtngatgtcngaggnantggaanatgtncntgcantgaaaggagggagngcaag

SEQ ID NO: 46645 - DNA, 196 bp, Glycine max
  unsure (1)..(196): unsure at all n locations; Clone ID: 701132581H1
ggctacctccatggngaagcttatgcttttctctgntctcatactcttgtccttgcaagcagttgngtctgtaacaccactgcattttcaacatccactagacncnttanccanacaagagataagtnttgtccaaaccatactccagnacaagtacncanncncaagtaacaggttgagcttcnactacatngnc

SEQ ID NO: 46646 - DNA, 138 bp, Glycine max
  unsure (1)..(138): unsure at all n locations; Clone ID: 701132582H1
tgctactgaagaaggccaanaggttgcncaganctganngacnnacttnccaggactgtattcagacgcnttgtancatgtgatnaagcatcctagacttntgctgnctaatctagtgtgctgcaaattananaanag

SEQ ID NO: 46647 - DNA, 280 bp, Glycine max
  unsure (1)..(280): unsure at all n locations; Clone ID: 701132583H1
ctttttcctgcacgacaggatcngcnntctgccgcttctccctgctgctaatntcttcactctntctctttctctctccttatttccaantcatcacaccctntctttctctctcaagtcccattcatggaaatggaagatcatcagcatcagcaccaccatcatcactttggcatgaacgatctaaggcaagtggtgaataacgggccgaggccggcccatacnaccttcccctccatgccgccgcacnncacggaggagcttgtccccggccaccacc

SEQ ID NO: 46648 - DNA, 274 bp, Glycine max
  Clone ID: 701132584H1
atggtcctggttcttatgcctggtaccagtgccttgaccactgtctccccaaaccaacagtccagaacctagtgttaaaggttgtactaaaccagattgtgttaggtccatgtgtcattgctgttgtttttgcatggaataatttatggctacagaagctctctgagcttccagaaaaatacagaagagatgctcttccaacgctactttatggatttagattctggatccctgtcagtgtattaaatttctgggtggtgcctcttcaagcccg

SEQ ID NO: 46649 - DNA, 248 bp, Glycine max
  unsure (1)..(248): unsure at all n locations; Clone ID: 701132587H1
ctgtgctcgcncttgnattccttcnngtgcatactatttcangnaggattggtaacatgtacnaagantgaagacggatcaggagaatggggatatgngcaagttngaccaaaagcccacttgtctctggtggntttacagaagtccatacagagtggagaatccctcnaagcnttggccatcattcnctggcttcaggaggaccaggctctcaggagntgggtntggaantnttggagaggntggtc

SEQ ID NO: 46650 - DNA, 174 bp, Glycine max
  unsure (1)..(174): unsure at all n locations; Clone ID: 701132588H1
tgagactgagctcaaggacaagaaattgnnagttgaagangctcacnntggctacaanggcagntgtagacnaggntattgnagttngnggnggntgcactcttctgagacttgcatcaaaggtggacacaatcaaggatagccttnctntntgatgaagacaangntngacgc

SEQ ID NO: 46651 - DNA, 272 bp, Glycine max
  unsure (1)..(272): unsure at all n locations; Clone ID: 701132589H1
aaactgcagaagcgcctntncgcaagngtgttcaantgcggcanaggaaaggnctncgcttnaccnccnatnaagtcanccgaaatctccatggncnaattctcggcaaaacatcangaanttggttaaggatgggtttatcatcaggaagccaaccaagattgcantcccgctcacgtgctcgtaggatnanggaggcaaagagnaanggncgccactccggttatggtaaacgtnanggtacnaaggangcaagctcccaccaagatatc

SEQ ID NO: 46652 - DNA, 267 bp, Glycine max
  unsure (1)..(267): unsure at all n locations; Clone ID: 701132592H1
aagacacagccattgtttgtttactttccattgattgagcgaaatntttgttttttctgcgatcattttccattgggtggaagaaantctcaacctttagtcgaaagagcaaggatctgagtgagtgagcgatcatgtgtggtggtgcgattatctccgacttcattccagcgggtcccgccggcggggcgcacgcgtgaccgccgacatcctgtggccgaatttgaggaagcggttctcgaagtcgctgctggacgatgatttcga

SEQ ID NO: 46653 - DNA, 267 bp, Glycine max
  unsure (1)..(267): unsure at all n locations; Clone ID: 701132594H1
catgggctgtccactttctcttcagaatactgtcactgctggaattgtaagttgtgttgaccgcaaaagtagtgatctgggttttagtggcatgccaagagagtatttacaaaccgattgtncaattaatatgggaaattctggagggcctcttgtcaacatggatggagaaattattggggttaacatcatgaaagtggccgctgcggatgggttgagtttttctgtgccaattgattccgtgtgtaaaatttagagcattcaaga

SEQ ID NO: 46654 - DNA, 278 bp, Glycine max
  unsure (1)..(278): unsure at all n locations; Clone ID: 701132601H1
gagaatatgaagttgtttgttttctttgttgctgcagtagttttggtagcatggccatgccatggcgcaggctaccaaaggttccctctccgaatgaaaactggctatggtgagcgttcttcggaggtaaaatgcgcaagttttaggcttgctgtggaagcacacaacatccgagccttnnaaaccattcctgaagagtgcgttgaaccaacaaaggactacattaatggcgaacaatttagatcagactctaaaacagttaaccaacaagctttctt

SEQ ID NO: 46655 - DNA, 275 bp, Glycine max
  Clone ID: 701132602H1
gctgtttgtgccataccaagacccaacagatgatttttactataagactttctttgatgctggagagtttgggtttggtctctccacggtctcattggtgcccaaccgtgattccccatcgaatgctcagttcctagatacatatgttcacgctgctgatggtactccgttactcatcaagaacgcaatctgtgtctttgaacaatatggcagcatcatgtggcgtcacaccgaaacaggcattcccaatgaatcgttcgaagaaacgagaacgg

SEQ ID NO: 46656 - DNA, 274 bp, Glycine max
  unsure (1)..(274): unsure at all n locations; Clone ID: 701132604H1
agtntgtatagtntagganttgttggtattcgtgataaaaacacctcatcctattcattttgccatgacgggcgaactccagataaaggttttgaaagtaatgagaaattattaattcatccatgttactggcttggtttgaatctaaatcgtaatgcacttgctccagaggaagcagaggagntaaatgacgaatatgatattaatattatttcagataattcagccattagaaataaaacaataggtcaaataactactcatctagatcaga

SEQ ID NO: 46657 - DNA, 261 bp, Glycine max
  unsure (1)..(261): unsure at all n locations; Clone ID: 701132605H1
cttcttcctcctcgatcatgtctcacttcaagggcaagtaccatgatgagctnatccgccaatgctgcgtacattggcactcctggaaagggtattcttgctgctgatgagtcaacagggacaattggcaagcgtttggccagcatcagtgtagagaacattgaatccaacaggcgagctcttagggagctgcttttcactgctcctggtgttcttcaatatctcagtggtgtcatcctctttgaggaaaccctctaccag

SEQ ID NO: 46658 - DNA, 267 bp, Glycine max
  unsure (1)..(267): unsure at all n locations; Clone ID: 701132606H1
tgtcacctttattctctttcagtagaacaacagcaacctctctgccttccaaacccacattctggnatttggttccaatgaaacaatcttcttctccggggcacttggccttagccttagacaatccacgtagaacacttcacgtgtcttgtggctccacatcaccacatgcttcccagagatcatcaattcaggggggtgaagcttttttcaggggtgtgttggaaagtatgcaatctgtttacttgaacagaaatcgtactgcta

SEQ ID NO: 46659 - DNA, 265 bp, Glycine max
  unsure (1)..(265): unsure at all n locations; Clone ID: 701132607H1
gcaattccagaacagcgtcgctgntgttgtcctcatcctcctccccttcgaattccaagatcgtgggagatncngcgtggaagctctcacgcgggtcacggcgctcggaaacgggttaagatgaaagatcttgacgccgttgttcnctctgtggaaacgaatagccgttattcgggattcaaaaacgacaaagaaaacactgtgcagtggtcgttgggagctacggatggttctcaacaagcgaaaacgggaaggaaagcgatgt

SEQ ID NO: 46660 - DNA, 247 bp, Glycine max
  unsure (1)..(247): unsure at all n locations; Clone ID: 701132608H1
gcgattcaataattgcgaaaaaccacggggagtgttgtttgtttcggtcccggctggaccagggaatgaatagagatgagaggctttcggcttaagaaaactgagtnaagcggccaagccaaacgcagaatcggcggcagaaattgccaccggaagcacgtcgaagagggtgaactaaaaagaagaatctcatccaccacttatcctttcaatccccaaccccaaaaaaatcacaacttctagtagt

SEQ ID NO: 46661 - DNA, 260 bp, Glycine max
  unsure (1)..(260): unsure at all n locations; Clone ID: 701132610H1
cgacgtctctctgcgagccaggttcagttnctagagaagagcttcgaggaggagaacaagcttgaacccgagacgaaagaccaaactagccaaagaccttggtttgcagccacggcaagttgctatttggttccagaaccgtaganctcggtggaagaacaaacagctggagaaggattacgagactctgcatgcaagttttgagagtctcaagtccaactatgactgtctcctcaaggagaaagacaagttaaaagctg

SEQ ID NO: 46662 - DNA, 108 bp, Glycine max
  unsure (1)..(108): unsure at all n locations; Clone ID: 701132611H1
gnaccggaccggtagttaagagancgatcgaattcganngcgaagttagacggagaaagcgagaatgatgttggacggaaccgaagacgaagagaagtttctcgccgt

SEQ ID NO: 46663 - DNA, 274 bp, Glycine max
  Clone ID: 701132617H1
gagtctcacaatgtcataatcgtaggaaaaagaagcaaagaaggaagcttttagaaaatatctggaaacaagtggagctgtcgacgctctcaccaaaggtgatattttgcttttcaaataaattgctaaatctaacactcaaagtgatattcctttgttgccgttgttgctgaagttctggtttctttgtacgagcaaaacgacaagcctcttctgccgtcgagttcattcaacagaaattaagctgtcctccatctcagaatatgaaaagttg

SEQ ID NO: 46664 - DNA, 276 bp, Glycine max
  unsure (1)..(276): unsure at all n locations; Clone ID: 701132618H1
ctagtttatcgtgaggagaatatgaagttgtttgttttctttgttgctgcagtagttttggtagcatggccatgccatggcgcaggctaccaaaggttccctctccgaatgaaaactggctatggtgagcgttcttcggaggtaaaatgcgcaagttttaggcttgctgtggaagcacacaacatnccgagnnnttaaaaccattccngaagagtgcgttgaaccaacaaaggactacattaatggcgaacaatttagatcagactctaaaacagt

SEQ ID NO: 46665 - DNA, 274 bp, Glycine max
  unsure (1)..(274): unsure at all n locations; Clone ID: 701132619H1
cttaaattgccgagancttcattacccattatctgttacagttcnnacgctctcgctccaanncccacttgcagatttggtttactggaaggaaagtgcttgaaggacncaatctacacgagagatgcaatggcaanaaacacacacatgttagcttcaatgtgttattattgctgccactgtgattaatgagncagtcactgtgtcanaggatatagagctgttttcttccagtgcatcttggtttganatttatgtagttttctctgaaaag

SEQ ID NO: 46666 - DNA, 270 bp, Glycine max
  unsure (1)..(270): unsure at all n locations; Clone ID: 701132621H1
ggacactcccaaattacatgcacaaccacaccttttaattctccgcaccaatcttttagncagataaaaagcgaaaagaggttcgttccatttcccgcttcttcttttttccctcacttttccccggcgagaaaatgagagaaatcctccacattcagggcggccagtgcggcaaccagatcggagccaagttctgggaggtgatctgcgatgagcacggcatcgaccacaccggaaagtacagcggcgactccgaactccaattggaac

SEQ ID NO: 46667 - DNA, 266 bp, Glycine max
  unsure (1)..(266): unsure at all n locations; Clone ID: 701132623H1
gcgctcgccgcgcctcctggcgcatcatctcctccattgagcagaaggaggagagccgcggcaacgaggaccacgtcgccgtcatccgtgactaccgctccaagatcgaggccgagctctccanccatctgcgacggaatcctcaagctcctcgacacgcgcctcgtcccctccgccgcctccggcgactccaaggtcttctacctcaagatgaagggagactaccacaggtacctcgctgagttcaagaccggcgccgaccgcaa

SEQ ID NO: 46668 - DNA, 239 bp, Glycine max
  unsure (1)..(239): unsure at all n locations; Clone ID: 701132625H1
gggatggaaaacatgcagagcttaccggcaattgggtgatanactccgtgggcactcaaaagcatcggaggatcacaagtggttaatggttgcctcgaaactggccgaacagacaagattgaagggggagcgtgtgaacaaccttgatctttcaaagggacccattgaaacaaggtcaagggataaatttgggttccaggaagagaacaaatttgattctcttaacttgagcatgttga

SEQ ID NO: 46669 - DNA, 253 bp, Glycine max
  Clone ID: 701132627H1
aagcttgctactgagtttccacactgcataccttaggtcttccgaattcgaagttaatttgcaagatggctaaggaaaaggctcagatcaacattgtggtggttggtcatgtggaccctgaggaggcaaccaccattaacgagctgaagaagcctgttgtggagaaagaagctccagggcatgccatatgagggcatgcacgtacggcctcggaggggaaccagaaaattatgttaacaaaataatctggaac

SEQ ID NO: 46670 - DNA, 220 bp, Glycine max
  Clone ID: 701132629H1
ggaaagcaaaaggagaaggtgaataacatggtgctgtttgatcagggcacctatgataagctcctttctgaagctcccaaattcaagctcatcactccttccattctttctgatcgtttgaggattaatggatcacttgcaaggaaggctataagagaattgatggctaggggttcaatcaggatggtgtctgcccatgcaagccagcaaatttacacca

SEQ ID NO: 46671 - DNA, 255 bp, Glycine max
  Clone ID: 701132631H1
ggtttttacttgaaagggttgaaactcgttactgtggaccgtccttttgctgagaagcactatgctgatttgtctgcaaagcctttctttagtggtttggtggattacattgtctctggccctgttgttgccatgatctgggagggtaagaatgttgttacaactggccgaaagattatcggagccacaaacccagctcaatctgagcctggaactattcgtggtgactttgctattgacattggaaggaatgtt

SEQ ID NO: 46672 - DNA, 255 bp, Glycine max
  unsure (1)..(255): unsure at all n locations; Clone ID: 701132638H1
tatgattgcttgcgagccaataaatcaacatttgcttggggnctagaagcccgtgtaccatttttggacaaggcgtttatcaatgctgcaatgagtattgaccctgagtggaagatgataaaaagagatgaaggacgaattgagaagtggattctgaggagagcctttgatgatgaagagcatccttatctgccaaagcacattttatacaggcagaaagaacaattcagtgatggagttggctatagttggatt

SEQ ID NO: 46673 - DNA, 259 bp, Glycine max
  unsure (1)..(259): unsure at all n locations; Clone ID: 701132639H1
cttattgcaagttccgtgattttgacatgaacccacgagcacatcaagttttttattctggctgccaggccatcatgtatattatgtgttttcgcatgagatctttgatggatgttcctaggcttaagttgcagctgcttaatatgcccatggaggcaatcttgaaacataaattgagtcccttganggtgtgtttgcccactgtagtagtggaatttcttagacaggcaaaggctgctcaacttttcatggcatcaga

SEQ ID NO: 46674 - DNA, 114 bp, Glycine max
  unsure (1)..(114): unsure at all n locations; Clone ID: 701132640H1
tattatcatgtnatatatgttgatggaacgaccctgccttaatttnataattacatcaagatctgtcctggacttgaggatggtagcagtctattttgtgtcgttataataaac

SEQ ID NO: 46675 - DNA, 258 bp, Glycine max
  unsure (1)..(258): unsure at all n locations; Clone ID: 701132641H1
ctccgcaccagtttcaccgcacgaatatcttgttgtttggagcganccgagaaaaactctgtaaacatgttggtttaccaggacctccttacaggtgatgagcttctctctgactccttccgttacaaggaaattgagaatggaatgctgtgggaagttgaggggaagtgggttgttaaaggagcagttgatgtagacattggtgcaaacccttctgctgagggtggaggagaagatgagggagttgatgatgcagct

SEQ ID NO: 46676 - DNA, 251 bp, Glycine max
  unsure (1)..(251): unsure at all n locations; Clone ID: 701132644H1
gctagggttcggaaacgaagaagggttctgttttcttttcgcgatgagggccaagtggaagaagaagcgtatgaggaggctgaagaggaagcgccgaaagatgagacagagatccaagtagtgcgttaaacctagtttgtttccgttgcttttacaattgcttatgttgtcaaataggacacccagttgttagtggcactggtctctcctttttgatgttntgatacattttgttggattttatttcgtct

SEQ ID NO: 46677 - DNA, 251 bp, Glycine max
  unsure (1)..(251): unsure at all n locations; Clone ID: 701132646H1
gcttctccgtcatatcgcgaccttcttcgtcaaatccccaattcatcntcttcaacgncgctccccgaancggaanccctcattcccgaaccggttcggcccggttcaggtgcttggccggccagaccgggttcttcacgaaactagggcggttgataaaggagaaggcgaagagcgacgtggagaagcncttctcgggattcnccaagacacgggcancttggncgtnatnnnagaantcnncnatatng

SEQ ID NO: 46678 - DNA, 234 bp, Glycine max
  unsure (1)..(234): unsure at all n locations; Clone ID: 701132647H1
tcttttctttttctgtatcgtttttactttccatcacttccattttccgtcatcanccaggatgctgctgcttctgctaatgctgcagaggatagagaaaacaagttcctaactatggcaattgaagaagcatataaggcggttgaaagtggccatggtcgcccatttggtgcagttattgttcgaaacgatgaaatactttcaagctgtcataacatggttgtaagaaatgct

SEQ ID NO: 46679 - DNA, 273 bp, Glycine max
  Clone ID: 701132649H1
taacctccgagctctacaccgaagaacgaagccatggggaagacacatggaatgggagctgctcgcaagctcaagtctcaccgcaggaggcaaaggtgggctgataagtcatacaagaaatcccatcttgggaatgaatggaagaaaccttttgccggttcatcccatgccaagggaattgtccttgaaaagataggtattgaagctaagcagcccaactctgctattcgtaagtgtgccagagttcaacttatcaagaatgggaagaaaatt

SEQ ID NO: 46680 - DNA, 268 bp, Glycine max
  unsure (1)..(268): unsure at all n locations; Clone ID: 701132651H1
cttggactgcctggaaacggaggcactgaagaagtgctcatcaggaagaggggtttctctgagactgaaactggtcatgaagatgagtctgccaccactgtggatttgatgcttaatctttcttctaaggagnnnnnnnnnnnnnnnnnnnnnnnnnnnnnnnnnnnngataagcacaagactttgcctaaggagaagacccttctgccagcagatcctgctaagcctccagccaagacgcaggtggtgggttggccacctgtgcggt

SEQ ID NO: 46681 - DNA, 260 bp, Glycine max
  unsure (1)..(260): unsure at all n locations; Clone ID: 701132656H1
gcctcttcctcacccctttctccatcctaacgagtnnggaaaaatggcgcgtaagaagatcagagagtatgactcaaagaggttgttgaaggagcactttaagagactttctggcaaggagttgccgatcaagtctgcacaaattactgcatcaactgatttcactgagctacaagagnaggaaccctggctttcatcttctaaattggttgtgaaacctgacatgttatttggaaagcgtggcaaaagtggtttggttg

SEQ ID NO: 46682 - DNA, 258 bp, Glycine max
  Clone ID: 701132657H1
ttccctccccttccactttctctcttccaacaacacacaatttcccgttcatttcataccaaattgtcattaattttgagaccaaaaacatggacaaccaacgcactcctcttcttagttgggcttactactgccacggcaagtcagtggaggagctgaagcagtctctgatgtacacaacccttgagctggaacaaacaagagcaggtgtccaagaagagctaaggaaaagagacgatcagcttctcaccctaaagg

SEQ ID NO: 46683 - DNA, 91 bp, Glycine max
  unsure (1)..(91): unsure at all n locations; Clone ID: 701132659H1
gaaaccctgctttttgtagcnggtattaacacattgttgncaaacaatgtttggaactcgattgcctgcagtaattggagggtcttacacc

SEQ ID NO: 46684 - DNA, 251 bp, Glycine max
  unsure (1)..(251): unsure at all n locations; Clone ID: 701132660H1
tggaggcagagccagacaagtacaagatgatcaactttgaagaaaccgagttgcgactcggcctgccactcagtggaaacgagacgacgctcaaaaacacttgcagtactgggaagagggttttttcggatactagcgtggatttgaagcttaacctttcctcaacctcaaataacgcccctcctcctgcaaagccacccgcaaagtttgtttttactccttcctccacacaacatacgacnnnaantnca

SEQ ID NO: 46685 - DNA, 253 bp, Glycine max
  Clone ID: 701132661H1
gcacgctctgcttccagcgagtgttctttcttcgtttcaacaccttaatttgcacacgctgcttcttcagcttgagaaatggcacaagaaacctttctattcacatctgaatctgtaaacgagggtcaccccgacaagctgtgcgaccagatctctgatgcagtgctcgatgcgtgccttgaacaggaccctgacagcaaggttgcctgtgagacatgcaccaagaccaacatggtcatggtctttggagaga

SEQ ID NO: 46686 - DNA, 254 bp, Glycine max
  unsure (1)..(254): unsure at all n locations; Clone ID: 701132662H1
ctgcacttgaggttcgtagaggagaaattcaaattcaatgcaaagaaattagatttttgaacgaaagctacgaactttaagttcatggaccgcttgcntcctaggaatcgagcggtcttttctggatttacaaatgccgagattgagaaaanggagaaattgttaagggaacctacagggggatcattgggcaggncaattttaccaaaanctggctcgaagtttcaactattcctctggtcgtgctgggaagc

SEQ ID NO: 46687 - DNA, 253 bp, Glycine max
  unsure (1)..(253): unsure at all n locations; Clone ID: 701132663H1
ttgtgcttattattattgttgagaaagaaaagaatggcaaagttaataaaattctttgagttgaacacaggggccaagattccttctgttgggttaggcacttggcaagctgancctggtgttgtagccaaagctgtcaccacagccattctggttggatacaggcatattgattgtgctcaagcgtataacaatcaaggcagagattggttctgctcttaagaagcttttgatgatggtgtggtgaagcgtc

SEQ ID NO: 46688 - DNA, 256 bp, Glycine max
  unsure (1)..(256): unsure at all n locations; Clone ID: 701132664H1
cggttgcnaaattncctccggcggttccnttnncgactccgccccgtaattctggcacgaattttcgcgtaatcgacgacgatgatgtcgaagaaggagaaattttccgaagacgacgacgatgtcacgaaacagcacgcgcaatctgaagctgagcctggngaaattgacccgaccggagatcgaggtgttcgatccgataacaaaaatctggtatagncgattcnaattcgtggaattgtgtattgatcgtgnt

SEQ ID NO: 46689 - DNA, 273 bp, Glycine max
  unsure (1)..(273): unsure at all n locations; Clone ID: 701132665H1
gaaagatgctataacaaatcatcaancntganggcagcttgaagagtgcaaggagtactgaaggatctttgtctaacttagaatccgaagctgttgtaaatgatggatgtatatctaattctaaagggaacgatttacattctgtgcaaaatcaaagtncagagccaaagtctttctaacatagcaaaaacttttattggcaatgaaatgtttgatgggaagacggtgaatgtggttgatggactaaagttgtatgacgtttatttgatagca

SEQ ID NO: 46690 - DNA, 269 bp, Glycine max
  Clone ID: 701132666H1
ggaagtgtcaagagttaccaatgcccatcacaatgctcgaggagatgtagccagacccaataccacaagccctgcatgtttttctgtcagaagtgctgcaggacatgcctgtgtgtgcccccggggtattatggtaataaagctgtgtgcccttgctacaacaactggaagaccaaggaaggaggacccaagtgcccttgagcttcaacttgttcaacttcaattgtcgctttcctacatttttattgcttccttccttgtgccaattt

SEQ ID NO: 46691 - DNA, 258 bp, Glycine max
  Clone ID: 701132671H1
gtgaccgaaaagggacaaagagagttatcagctaaagatactgctttgtgcacttcctgtcagatgcttgtggtttggattcagaatcaactaaaacaaaagaagaccaaggagatagtattcaactatgtaaatcagctgtgcgagagcttgccaagtccaaatggagagtcagtagtagactgtaatagcatttatggattgccaaacatcacgtttactgttggagacaaaccttcaccctcacccctgagcagt

SEQ ID NO: 46692 - DNA, 257 bp, Glycine max
  Clone ID: 701132672H1
aggcgttctatatattattgaattgacaatgaggcctgctcttgctttgcttcctcttctatttgctttcttgttagctgccactacagaatcaagaaaagatacaggggaatattggaaaatgatcatgaaagatcaggaaatgccagaaggacttcaaggtcttgtttcatttcaatctgaaaataaccctaagactcaagagcagcttggtaaaggttccaaaaaccattgtgaagagtctctagttacaaata

SEQ ID NO: 46693 - DNA, 255 bp, Glycine max
  unsure (1)..(255): unsure at all n locations; Clone ID: 701132674H1
gccccactcaaccaccacaccnctcctcgttcacgctacccctttctgctcttcttctacctttcaagttttaaaagtataaagatggcagagacattcctatttacctcagagtcggtgaacgagggacaccctgacaagctctgcgaccaaatctccgatgctgtcctcgacgcttgcctcgagcaggacccagacagcaaagttgcctgcgaaacatgcaccaaaaccaacttggtcatggtcttcggagaa

SEQ ID NO: 46694 - DNA, 138 bp, Glycine max
  unsure (1)..(138): unsure at all n locations; Clone ID: 701132675H1
cttcccctctgcgctgcgtggcttgttccgccttggtggtttctactgagtcacanactcggtgagtgagcgagtgaactcaatggcttcttcctcgcgcgcaangagtagctcaccgttttcttaccgaaaaccttc

SEQ ID NO: 46695 - DNA, 248 bp, Glycine max
  unsure (1)..(248): unsure at all n locations; Clone ID: 701132677H1
acttcaacttgtaatcaagggagagagaaaatttcaagcacaaaaaatggcggagnagaaagtggtgatcctaggaggtggtgttgccggtgccaaccttgcaaaaactatacaacgtcaagccaacgtcacccttattgatccgaaggaatattttgagattccatgggcaagtttgaggggattggttgagccaacttttgctgaaaggatagtgatcaaccatagagagtacttcaaaaagggta

SEQ ID NO: 46696 - DNA, 248 bp, Glycine max
  unsure (1)..(248): unsure at all n locations; Clone ID: 701132679H1
ctttcttgattctatgggtggtggtgcatggccgttcttagttggtggagccntttgtctggttaattccgttaacgaacgagacctcagcctgctaaatagctatgtggaggtaaccctccacggccagcttcttagagggactatggccgcttaggccacggaagtttgaggcaataacaggtctgtgatgcccttagatgttctgggccgcacgcgcgctacactgatgtattcaacttttcaaa

SEQ ID NO: 46697 - DNA, 107 bp, Glycine max
  unsure (1)..(107): unsure at all n locations; Clone ID: 701132680H1
cttcacctnctctcccatcgtaataatgggtcagagcctgagttgacagtggcaacncatgaaccaacgggcctcttcanccgnccgtggctgcaacggcgaccttt

SEQ ID NO: 46698 - DNA, 270 bp, Glycine max
  Clone ID: 701132681H1
ggaggcactacttccagaacacccagggtcttatttttgttgtagacagcaatgatagggacagagttgttgaggccagagatgagttgcataggatgttgaatgaggatgaactgagagatgcagtattgcttgtgtttgccaacaaacaagatcttcctaatgcaatgaatgctgctgagattaccgacaagttgggtctacactctctcagacagcgccactggtacattcagagcacctgtgcaacctctggggagggcctttacg

SEQ ID NO: 46699 - DNA, 269 bp, Glycine max
  Clone ID: 701132682H1
atcggtgttcacttgatctcatcataatcgtcagcgtcaattgaagaagatgccgatcagaaacatcgccgtcggaaggcctgaagaggcgactcaccccgacacgttgaaggcggctttggctgagttcatctcaaccttcatcttcgtgttcgccggctcaggctccggcatcgcctacaacaagctcaccgacaacggcgctgccacccctgccggcctcatctccgcctccatcgcccatgcattcgccctcttcgtcgccgtct

SEQ ID NO: 46700 - DNA, 265 bp, Glycine max
  unsure (1)..(265): unsure at all n locations; Clone ID: 701132683H1
aatcgagtgtgactgtagggcttcactgctgcctcagtatcccgctgcagaaatgagcaaatctgtccatggcttgttcagaacctgatgcttgcacagttagtggagcncctgatcttgtaagggacattgaccttgcagaaaccagggagtgcctgagcatactggtcattgatgttgtacctagcagcatccgccttgagacagttgcagcaatcctatctgaatcnttcatcatcttcttaaaagttaaaaaggccaaggt

SEQ ID NO: 46701 - DNA, 262 bp, Glycine max
  unsure (1)..(262): unsure at all n locations; Clone ID: 701132685H1
aaatcctcaagcttcaatttgctttgtgctcactcatctatctattataaccaaacacnnnnnnnnnnnnnnnnnnnnnnnnnnnnnnnnnnnnnnnatctgtgatgagcatcatggcctcgagagcagtgctattgttggctatgtgtgtgcttccggccatggttgtggccattcgcccagcaaagaaccctttttgcgtgaagggtcgcgtctactgtgacccttgccgtgctggttttgagacctcagcaaccacctt

SEQ ID NO: 46702 - DNA, 238 bp, Glycine max
  unsure (1)..(238): unsure at all n locations; Clone ID: 701132686H1
cttgattgtgatcactacataaacacnagtaaagccttganggaagctatgtgctttatgacggatcccaaccttgggaaaaatgtttgctatgtccagtttccacanangatannagannggtganaggaatgatcgatatgccaatcgcaatactgttttcntttganataaacttgagaggtttggatggcattcaaggtctgtntatggnggtatggatgtgtctttaatagaa

SEQ ID NO: 46703 - DNA, 262 bp, Glycine max
  unsure (1)..(262): unsure at all n locations; Clone ID: 701132688H1
gggtcacaaccttccgtggangctaaggcaaaggtccaacaaagaggtaaggaagaaggtttatatcctgccccgaacaaacctgcgtccaccacgaccctgcaagccgcactcggcgacctcactggcatcaaaaagcacttcagcagaaagcacggtgagaagaagtggaagtgtgaaaagtgctccaagaaatacgcagtccaatcagattggaaagcccacaccaaaacctgtggcactagagaatacaaatgcgact

SEQ ID NO: 46704 - DNA, 256 bp, Glycine max
  unsure (1)..(256): unsure at all n locations; Clone ID: 701132689H1
cttcttgcttctattacttgcttctttcttcaccatgtcacttgcncgggaaaatcaccactgaaattggggttcatgcaaccgctgcaaagtggttcaacctctttgcaacacaacttcatcatgttcaaaaccttactgatagagtacatggaaccaagctgcatcaaggtgaagactggcatcacaacgagacagtcaaacactggacttataccatagatggtaaggctacaacatgtctggagagnattga

SEQ ID NO: 46705 - DNA, 257 bp, Glycine max
  unsure (1)..(257): unsure at all n locations; Clone ID: 701132691H1
ggctggtcctcctggtgctggaatcagacacgtggttcgacagaacctttgttgctgagagtagatgaggctcgcgatcggaaaccgagttcactgtccattgcgcggcctagcaagtncgtgcagctgtcacttgctcgaaccaggaagagttctttctttaaggtgttatctgctgaaaaggaacaaattcacgttgtagagggaagtcgtgttgatgagttatatgatgcattggttacacgtattctgccttt

SEQ ID NO: 46706 - DNA, 257 bp, Glycine max
  unsure (1)..(257): unsure at all n locations; Clone ID: 701132692H1
ctcgggtgtgtctctcttcttcacaataatccctcatcatcacctgtgacccttttgcccaaatccctctttccttgtggaatttccctcaaactgaaagggttggtgttttggtgtaaaagtagttcagtgtgtgnnnnnnnnnnnnnnnnnnnnnnnnnngttgggagtatcagtgtcaatgcctctttggttgaggctccagttttgtgggctggaaggctcttcatcttctatgccctcctcanggctggctt

SEQ ID NO: 46707 - DNA, 258 bp, Glycine max
  unsure (1)..(258): unsure at all n locations; Clone ID: 701132694H1
cttgatttgtagtttgttttgtgctttagataaaagttctgccanatcaagaggggttttaagatcatagtgtgtgttttgcaacaatggctaagttctttgctgctatgatcttggcactctttgccatttccatacttcaaacagtggtaatggctgctaatgaacaaggaggccacttgtatgacaacaagagcaaatatggaagtggaagtgtcaagagttaccaatgcccatcacnatgctcgaggagatgta

SEQ ID NO: 46708 - DNA, 260 bp, Glycine max
  Clone ID: 701132695H1
caaacagtcggtaactctttcttttcttttctttctttctccgatcgcatcgctcgcaaccacaatcatgccttcccgaagaagaactctcttgaaggtcatcattctcggtgacagcggggtggggaagacgtctttgatgaaccagtatgtgaataagaagtttagtaatcagtacaaggcaaccattggagcggattttttaaccaaagaagtgcaattgaagataggcttttcaccttacagatttgggatacagc

SEQ ID NO: 46709 - DNA, 259 bp, Glycine max
  unsure (1)..(259): unsure at all n locations; Clone ID: 701132701H1
agagagggtagggagcgggagagaagattctccgatcgaagatctaccagaacacgtactggaaggagcaatgtttcgggttaacggcggngacgttggtggacaaggccatggagctcgaccacctcggcggcacctacggcggcaaccgcaaacccacgccgttcatgtgcctcgtcangaagatgctccagattcagcccgagaaagaaatcatcatcgagttcatcaagaacgaggattacaagtacgttaggat

SEQ ID NO: 46710 - DNA, 256 bp, Glycine max
  unsure (1)..(256): unsure at all n locations; Clone ID: 701132702H1
cgcactttgcgntntctgcgtcatctccgattccccganaatggccanccaaatgagcatnnnnagaaagttcgtagctgatggngtgttcttcgctgaactgnncgaggttctgacaanggagtnanncgangacggatactccggcgtggaagtnagggttacgccgatgcgcancgaaatcatcatcagagccaccagaacccaagccgtttcggtgatccnggaangagaatcnnggnacttanctcggngg

SEQ ID NO: 46711 - DNA, 252 bp, Glycine max
  unsure (1)..(252): unsure at all n locations; Clone ID: 701132704H1
aatattcttccatggcctccaagcggattctgaaggagctcaaggacctacagaaagacnctccaacctcttgcagtgccggtcccgtagcagaagatatgtttcattggcaagcaactataatgggtccccctgatagccctcgtgctgggggtgtttttctagttactattcattttcctccggattatccattcaagccacccaaggttgcatttaggactaaagttttccacccaaatatcaacanca

SEQ ID NO: 46712 - DNA, 251 bp, Glycine max
  unsure (1)..(251): unsure at all n locations; Clone ID: 701132705H1
aaactctcacttactaagcttttncctcaactccattagatccttgagttcttcttcttcatccgccgnttcttctgctcagaaccctaagactaagaaatcgaagcgaagaaagaagaacttgttcgatgtggctcagttcttacctaactggggaatcggctaccacatggccaagactcactggaatgaagtttcttacgaaatcactaaaatcaatctctacaaggatggcagacatggaaaagcat

SEQ ID NO: 46713 - DNA, 249 bp, Glycine max
  unsure (1)..(249): unsure at all n locations; Clone ID: 701132707H1
agagtccaacctttcattttcaattttcaaagatgcctcgtggaacacttgaagttgttctgatcagcgccaaangaatcgatgacaatgattttctctccagcatagatccttatgtgattctcacatacagggcacaggagaaaaagagcactgtgcaagaagatgctggatccaagccacaatggaatgagagctttcttttcactgtctctgacagtgcttctgaacttaatctgaagataatgg

SEQ ID NO: 46714 - DNA, 246 bp, Glycine max
  unsure (1)..(246): unsure at all n locations; Clone ID: 701132709H1
gcgtctgagaccgcttctcggtcgagttccgcggctgattcgtacattgggagcttgataagcttgacctctaagantgagatcagatacgaaggcattctctacaacatcaacaccgaagagtccagtattggcctcagaaatgtgcgatcttttggaacagaaggaagaaaaaaggatggcccacaaattcctccaggtgacaaggtttatgagtatatattttcgtggnactgacatcaaggt

SEQ ID NO: 46715 - DNA, 231 bp, Glycine max
  unsure (1)..(231): unsure at all n locations; Clone ID: 701132711H1
cnnnttcnactcctncnaaatgcttcaacnccaagatggttaggactnctgtaggctgataaagacaacactcataccgttggaaagaaggatgctgctggccatgttgcttaatttagttcttgcttcctttgtcttcttgagttttatcagagacgggagtgcagggatcactagctctttcattcggtcagagtggccggcagttgacatcccccttgatcntgaagc

SEQ ID NO: 46716 - DNA, 247 bp, Glycine max
  Clone ID: 701132712H1
ctcagctcgatctacctaccttggttcttctctgttctgttatttcagtgcagcagcagaaaatgaccatcctcattgagcaacctgcccttgagttacaagttgaaggcaacaatgtgcatgctgaagaaaccaatgagcttgtattggatggtggatttccattgccaaaggatggatatatggccccagaaatcaattcatttggccactccttcagagaatatgatgctgaaagtgagaggca

SEQ ID NO: 46717 - DNA, 248 bp, Glycine max
  unsure (1)..(248): unsure at all n locations; Clone ID: 701132713H1
gtgatgtccctttctgttctcttcactcttggtcttgcgagagaaagccatgccagagacgaagatttttggcatgctgtttggccaaacactcccattccaagttcattgcgagatcttcaacagcnnggccctgcaagtgttgaaatcgatgatcaccctatgcaaattgaagaaacacantacccgaaaaccttcttctataaagaagaccttcatccaggcnnaacaatgaaagtacaattcag

SEQ ID NO: 46718 - DNA, 228 bp, Glycine max
  unsure (1)..(228): unsure at all n locations; Clone ID: 701132714H1
ttcctcttattagcgacggccattctcgccgttgtgtgctccgccgtgagcggttgctcgccatcggatagggcggcgctgctggccttccggaaggcgctgagcganccctaccttggcctcttcaactcgtggacgggctccaactgctgcctcgactggtacggttctcagctgcgacgccaccaccggcngntcagnntnaacnncnggggggnnnnanccctt

SEQ ID NO: 46719 - DNA, 243 bp, Glycine max
  unsure (1)..(243): unsure at all n locations; Clone ID: 701132715H1
gcgaattctaatggttggtcttgatgccgctggtangaccaccatcctgtaacagctcaaacttggagagatcgttaccacaattcccaccattgggttcaacgtggagactgtggaatacaagaacattagtttcactgtctgggatgttggtggccaggacaagattcgtcccttgtggaggcactacttccaaaatacacagggtctcatttttgttgttgacagcaatgacagggacag

SEQ ID NO: 46720 - DNA, 255 bp, Glycine max
  unsure (1)..(255): unsure at all n locations; Clone ID: 701132717H1
cgcattcaanccctagatttcaatctagggtttctttgcacgctaattccatcttcaaattctgccttcattcgattcaggggggaattaaattgtttccttttttttcgaatttaccacaaattagaaatcgataaagaaaaatggtgagggtgttgagaagctgcattcaatcgattttgaagctggtgaactcggtgattgggatggcggggctagccatgattctgtactccgcatggatgattagggttt

SEQ ID NO: 46721 - DNA, 251 bp, Glycine max
  unsure (1)..(251): unsure at all n locations; Clone ID: 701132720H1
tnccagatgatnnagacagngaattgttncaggacatcataaacaattctaagttaagtnaaggatatctcacccttgctcgtgatattgaagtcatggagcccaagtcccctgaggatatatacaaggcacatttgcttgatggccgggctagtgctggtgcaagtgttgattcagctagacagaaccttgctgcaacttttgttaatgcatttgtaaatgctggctttggtcaggataaattaatgact

SEQ ID NO: 46722 - DNA, 249 bp, Glycine max
  Clone ID: 701132722H1
aactaaccctcttttttttttcctacaattttaatataacaaatggatttcattccctccattttctccttcaaacgcagaacctctctctagccgtttccaaattcctccgttttctttttttctttttcttttcattttccactaaaaaaaataaataaaggaaagaaaaagaaaaaaaagaagcgagatgaggtttttcttcgagttcgtgtcttgttgcggcctgccgacgcagcgttcgccgga

SEQ ID NO: 46723 - DNA, 245 bp, Glycine max
  unsure (1)..(245): unsure at all n locations; Clone ID: 701132723H1
ggaaggtgagtagtaatggtcatggatgttgcaaatcagggccaggctatgcttccccactggaanccatttctngtcccagagagtctctcatttatgtaacctctgtctacacagggnccggaatagagaagccagactatttggcgacagtggatgtggatccaaactctccnacttattccaaagtcatccataggcttcctgttcctatttaggtgacgaattgcatcacacaggctgga

SEQ ID NO: 46724 - DNA, 154 bp, Glycine max
  unsure (1)..(154): unsure at all n locations; Clone ID: 701132724H1
gccataaccttcttcttttgcactacaaatcagtntnttacttgaattttcttcatccttctctgttntcctagaacttgattacttgaacattccacacaacanacgangttngnacnncnggantnctgganaantccatatnngtngnggg

SEQ ID NO: 46725 - DNA, 248 bp, Glycine max
  unsure (1)..(248): unsure at all n locations; Clone ID: 701132725H1
ctatanactcatttgaggctctgtgaganttgagaaatggctaaagatgttgaggttcaagagcaaggaggagagtactctgccaaagactaccatgaccctcctccagcacctttgttcgacccagaggagctcacacagtggtccttctatagagccctcatcgctgagttcatagcaacccttctcttcctttatgtcactgtgctcaccattattggctacaaaaggcagactgatacaacggt

SEQ ID NO: 46726 - DNA, 248 bp, Glycine max
  unsure (1)..(248): unsure at all n locations; Clone ID: 701132726H1
ggnagaatatgaagttgtttgtnttctttgttgctgcagtagttttggtagcatggccatgccatggcgcaggctaccaaaggttccctctccgaatgaaaactggctatggtgagcgttcttcggaggtaaaatgcgcaagttnnaggcttgctgtggaagcacacaacatccgagntnctaaaaccattcctgaagagtgcgttgaaccaacaaaggactacattaatggcgaacaatttagatca

SEQ ID NO: 46727 - DNA, 248 bp, Glycine max
  unsure (1)..(248): unsure at all n locations; Clone ID: 701132727H1
gcaagggcaaaataatggccttgtnatgaacttctacaaggaatcatgccctcaggctgaagacatcatcacagaacaagtcaagcttctctacaagcgccacaagaacactgctttctcctggctcaggaacatcttccatgactgtgctgttcagagttgtgatgcttcactgttgctggactccacaagaaggagcttgtctgagaagganacagatagaagctttgggttgagaaatttcaggt

SEQ ID NO: 46728 - DNA, 247 bp, Glycine max
  unsure (1)..(247): unsure at all n locations; Clone ID: 701132728H1
caattatctgtgacttatntantacngntgagnnagaaaagaatggcanagttaataaaattctttgagttgaacacaggggccaagattccttcngntgggttaggcacttggcaagctgagcctngtgttgtagccaaagctgncaccacagccatnctggntggatacaggcatattgatgtgncaagcgtataacaatcaagcagagattggntctgctctnaagaagctttngatgatggtg

SEQ ID NO: 46729 - DNA, 251 bp, Glycine max
  unsure (1)..(251): unsure at all n locations; Clone ID: 701132729H1
ctgtttggccaaacactcccattccaagttcattgcgaganccttctaaagcctggccctgcaagtgttgaaatcgatgatcaccctatgcaaattgaagaaacacagtacccgaaaaccttcttctataaagaagaccttcatccaggcaaaacaatgaaagtacaattcagcaagcctccctttcaacaaccatggggtgttggtacatggttaaaggaaatnnnngacactactaaagaaggatatag

SEQ ID NO: 46730 - DNA, 249 bp, Glycine max
  unsure (1)..(249): unsure at all n locations; Clone ID: 701132730H1
gncaattgtgggcttcaagagctgcctcttacctgaggatctctgtgtttcacagaggcttttctaatgttattaaagatttcaagtatgttgattctcatnngtgggtgaaagttgatggaaattacgcaaccatcggcataactgatcatgcccaagatcatttgggtnatgttgtatatgttgaattgccagaagtgggagcagctgtgacnccaggnggantttngtgccattgaaagtgtaaag

SEQ ID NO: 46731 - DNA, 254 bp, Glycine max
  Clone ID: 701132731H1
gtttcacagcagcaatggtgtacgtcaaggctcagaaatcaaaagcctacttcaagagatatcaagtcaagttcaagagaagaagagagggaaaaaccgattaccgtgccaggattcggttgattaatcaggacaagaacaaatataacactccgaaataccgatttgttgttcgctttagcaacaaggacattgttgcacaaataatatctgctagcattgctggcgatattgttcttgctgcagcatatgca

SEQ ID NO: 46732 - DNA, 251 bp, Glycine max
  unsure (1)..(251): unsure at all n locations; Clone ID: 701132735H1
ttcaggcaatattggattggcagaggagaacaatggatatgatgtacaaggatgttgttcaggcgctccgggccaagggaatagtggaaaatcctcgtnactatttgacattcttctgccttggtaatagggaggtgaagaaacaaggagagtacgagcctccagaaagaccagatcctgatacagattatatcagagctcaggnggcccggcgcttcatgatttatgttcatgccaagatgatgatagtt

SEQ ID NO: 46733 - DNA, 248 bp, Glycine max
  Clone ID: 701132738H1
ctcgatgggaattgcgcttcaaggcgtctcgtagggctaatccgcctcacgagggtcaccaacggcacgtgcctttggggggccgaggccccctactgctggtcggcaaacggacggcgggcgcacgcgtcgcttctagcccggattctgacttagaggcgttcagtcataatccaacgcacggtagcttcacgccactggcttttcaaccaagcgcgatgaccaattgtgcgaatcaacggttcctc

SEQ ID NO: 46734 - DNA, 247 bp, Glycine max
  unsure (1)..(247): unsure at all n locations; Clone ID: 701132739H1
cgttgcttggtgatgtccctttctgttctcttcactcttggtcttgcgagagaaagccatgccagagacgaatnttttggcatgctgtttggccaaacactcccattccaagttcattgcgagatcttctaaagccnggcccancaagtgttgaaatcgatgatcaccctatgcaaattgaagaaacacagtacccncnaaccttcttctataaagaagaccttcatccaggcaaaacaatgaaagt

SEQ ID NO: 46735 - DNA, 247 bp, Glycine max
  unsure (1)..(247): unsure at all n locations; Clone ID: 701132741H1
ttcggccactctcctctgagaaagcctccagcctctcctccaaagtcccctgcggttncgttcggttattcttcgaaccgttgtctgaagtttacaactcaaaacttcaccgaacgcatttcattcaccaattcgtccaagtctcgtatcaatcaatcagcctatccgtcttgcggttggagagatcggaggggagagcagccatggcgcatcgagtagaccacgagtatgactatctgtncaagat

SEQ ID NO: 46736 - DNA, 244 bp, Glycine max
  unsure (1)..(244): unsure at all n locations; Clone ID: 701132745H1
caaggcaaactgacaatgacaaagagtggagataatgtctctcctaaatgatgcaatcagagcacaaaaaccaaaaccatccctctgttgctgcatagatattgatgccatttccttgtgtatattgtgagggtgtggaatgtaattctttttctcactattttttctagtttctcttatccctgagaccgtgcattcaaagatttggaacaaatcatctnnttggtcaccaaatcgtgtacaa

SEQ ID NO: 46737 - DNA, 246 bp, Glycine max
  unsure (1)..(246): unsure at all n locations; Clone ID: 701132746H1
gaagttgtttgtnttctttgttgctgcagtagttttggtagcatggccatgccatggcgcaggctaccaaaggatccctctccgaatgaaaactggctancgtgagcgttcttcggaggtaaaatgcgcaagttttaggcttgctgtggaagcacacaacatncgannncgnaaancagtcctgaagagtgcgttgaaccaacaaaggacngcnnaatggcgaanaatttagancagctctaaaac

SEQ ID NO: 46738 - DNA, 255 bp, Glycine max
  unsure (1)..(255): unsure at all n locations; Clone ID: 701132749H1
gctcttcgctttctttcacatccaatcaacganaaatgctggctgttttcgacaaatcggtggcaaagagcccagagggtcttcagagccctcactcaaattccgtctcagccctaaaagacggttttctcgcagagcacttctcttccgttcaccctggttccgtcaccgttaaccttggctcttccggtctcttggcctattctcttcacaaacagaaccccctcctcccaaggctgtttgcagtcgtggatg

SEQ ID NO: 46739 - DNA, 251 bp, Glycine max
  Clone ID: 701132752H1
ctaccagttgctccagtagccggcactaaacaacatggcggacaaggcagtcaccatccgaaccaggaagtttatgacaaacaggcttctctccagaaagcagttcgtcgttgatgtccttcatccagggagggctaatgtttccaaggctgaactgaaggagaagctgggaagaatgtatgacgtgaaagacaccaacactgtatttgtcttcaagttccgaactcattttggtggtggcaagtccactg

SEQ ID NO: 46740 - DNA, 247 bp, Glycine max
  unsure (1)..(247): unsure at all n locations; Clone ID: 701132755H1
ctacactcttccgccgattattcttcctctgtgccctagcttctcttccgccgctgtcaacgatnggtctcccangccgcttccggcaccgaacgaacantctccggccaacttcagctnncgcgtgcgaaaattctcggaatattttgaatccaggaaatcatgcacgctccagttctagttctcaaggactctttgaaacgagagtctggatctaaggtccgctatgctattattcaggcggcaa

SEQ ID NO: 46741 - DNA, 248 bp, Glycine max
  unsure (1)..(248): unsure at all n locations; Clone ID: 701132756H1
ctgaatcctagctttatcttcccttcccttcaaaataatatctctgttccaaacaagtccaacannncactgcttncatctcaaacgcacatcgagaaatgagtttgagnnnatgggaaaaccgaggcaccattgccaattagtaatggggatgagaagaagccgttcaagatcttcgtagggtatgaccctcgtgaagatcttgcctacgaggtatgtcggcactccatcttgaaaaggtcttcaat

SEQ ID NO: 46742 - DNA, 242 bp, Glycine max
  unsure (1)..(242): unsure at all n locations; Clone ID: 701132757H1
caatggcttcangtcaggangaggtgacccnnttggnagcnaggggaancccatntgtgtgcagggttcananngccctcaagntgaagggagttcaatacaaatatgtcgaaganaatnngaggancaagagtgnactgcttctcaaatccaacccagtgcncaagnaggntccagtgttcantcacaatgagaagcccatagcagagtctcttgtgatgtngntacattgatgaaccngg

SEQ ID NO: 46743 - DNA, 248 bp, Glycine max
  unsure (1)..(248): unsure at all n locations; Clone ID: 701132761H1
cttgaattttcttcatccttctctgttctcctagaacttgattacntgaacattccctatgacagatgaggtggttcttctggatttctggccaagtccatttgggatgagggtcaggattgcacttgctgaaaagggtatcgaatatgagtacaaagaagaggacttgaggaacaagagtcctcttctcttacaaatgaacccggttcacaagaagattccggttctcatccacaatggcaaaccca

SEQ ID NO: 46744 - DNA, 250 bp, Glycine max
  unsure (1)..(250): unsure at all n locations; Clone ID: 701132763H1
gatggatccgaagctaaaagaggtttctcagctcttcgatcgctttaagnncttcgtttatcaggaacgactttgatacctgttccaatctcctttctcagctaaaggtgttacttacaggtttcagaagccttccaccgttgtttgcagatacacctaatgcagttcatgaattaacaatagcaagggatatatacgagcatgctgttgtccttagtgtgaaaaatgaggatcaagatgctttgaaagg

SEQ ID NO: 46745 - DNA, 255 bp, Glycine max
  unsure (1)..(255): unsure at all n locations; Clone ID: 701132764H1
ttccaaaaccaatcacatcagcatcactctcgtcgncgccgtcgtcgacnaccgcaagagccatcgcantcccgcngtcatcngttagggcaaaaatgagtcgaggaagtggaggtggatacgatcgtcacatcactattttctccctgaaggaagttntttcaaatgggnannnttttaaagggtgttaaggccggangaatcncctcattnggttccngagaaaggnttcgtttgtgttgttnctcagaagaa

SEQ ID NO: 46746 - DNA, 242 bp, Glycine max
  unsure (1)..(242): unsure at all n locations; Clone ID: 701132768H1
gttgttggtgtnttaggtgctattnaagccatcagagtcctgaanaggtcnggttttaaacctagaagaccattggangtcatatcattcncatcagaagaaccaacacgcttggaataggttgcttgggaagccgcctattggctggaagtgaggatcttgcaaattctctaaagacatcaactgatattcaaaacatatctttcctagaggcgngggtttgnggggnataaaaaanggnt

SEQ ID NO: 46747 - DNA, 244 bp, Glycine max
  unsure (1)..(244): unsure at all n locations; Clone ID: 701132770H1
agcatcatggcctcaagagcagtgttattgttggctatgtgtgtgcttccggcgatggttgtggccattcgcccagcaaagaaccctttttgcgtgaagggtcgtgtctactgtgacccttgccgtgctggttttgagacctcagctaccacctacattgctggtgctgagattatgttgcaatgcangagcagggttagcaacgaggttgtgtacacgaagaaggggtacaccgactcanccg

SEQ ID NO: 46748 - DNA, 90 bp, Glycine max
  unsure (1)..(90): unsure at all n locations; Clone ID: 701132771H1
cttatgtccaacaatggctatgctntcagctttnccagttcgttaactgggttccacacaacatacnacnngcccccagnnnntcnctta

SEQ ID NO: 46749 - DNA, 240 bp, Glycine max
  unsure (1)..(240): unsure at all n locations; Clone ID: 701132772H1
tccgtgggcgtggcggtgctggtttcccttcnggcctcaaatggtcattcatgccaaaantatcnnnnngnncnnccttcatatcttgttgttaatnctgatgaagatgaacctggaacttgcaaagacagggaaattatgcggnatgacccacataaattgttanaaggttgcttgattgctngagtaggaatgagggctagtgctgcttacatctacatcaggggtgaatatgtgaac

SEQ ID NO: 46750 - DNA, 246 bp, Glycine max
  unsure (1)..(246): unsure at all n locations; Clone ID: 701132775H1
ctttacttcccaaaacncnncnctacnatgantntccttacgttctttngcnagaaacaaggatatatcaaaagtaggacgcagaggtatccattgcatgcagaaactatgtgcagaaaaaatatctcctgattcactagagaaggcccaaaatcgtgtgatagatgctgcactcacacttgttcgagaaaatacaaggcttaagaaagnactcgtgcatagtttgggaggtgctgtggcancttc

SEQ ID NO: 46751 - DNA, 243 bp, Glycine max
  unsure (1)..(243): unsure at all n locations; Clone ID: 701132776H1
cttgactgataagcaaatgatgtctattagttctgaatatggcattgacataagcagagtccgaggagttgttgntaatgctnaccaaattttagagattnagaaagactttggttcatttgacaagtacatttgggggtttgtgantcataaaccaatctccactcaatacaagttcngccacaagattccagtgaagacatcaaaatcagagagcataagcaaagacatggttagaagagg

SEQ ID NO: 46752 - DNA, 198 bp, Glycine max
  unsure (1)..(198): unsure at all n locations; Clone ID: 701132779H1
tccgctgcaaggacagcaacagccatcatgctcaggaggctcttcgccgtnccaagttcnagttcccnggtacgtcaaccagttanagttagcnangnaanggggcttcttcngttgagccgtcactgattatctcaanttcaagttccngaatagncgttgtgcncgatggtgtnnctncaangctntnnggnncca

SEQ ID NO: 46753 - DNA, 95 bp, Glycine max
  unsure (1)..(95): unsure at all n locations; Clone ID: 701132781H1
cggatatctcggcncntgcatngatgaanaacntancgcnatgcgatactggtgtgaattgcagaatcncgtgaacnatcgagtctttnancgca

SEQ ID NO: 46754 - DNA, 95 bp, Glycine max
  unsure (1)..(95): unsure at all n locations; Clone ID: 701132783H1
ctgccatagcacctaccaaaccnntcnccttatccattgctctctttggcnactgaganccatngagnnaactctgcnatatacaatctttatgt

SEQ ID NO: 46755 - DNA, 246 bp, Glycine max
  unsure (1)..(246): unsure at all n locations; Clone ID: 701132784H1
caagatgggttatgaaanggctcagatcaacattgtngtggttggtcatgtggaccctgaggaggcaaccaccattaacgagctgaagaagcctgttgtggagaaagaagctccagggcatgccatatgagggcatgcacgcacggcctcggaggggaaccagaaaattatgttaacaaaataatctggaaccctaatgtatcagtgtcatcatcagtgtgtagtttaagctagctttgctatggt

SEQ ID NO: 46756 - DNA, 245 bp, Glycine max
  unsure (1)..(245): unsure at all n locations; Clone ID: 701132785H1
cttccctacaggagtggaagnttatgttcataggattggnaggactngaagagctggagccactgggctagcttacactttctttggtgaccaggatgctaaatatgcttcagatctcntcaaagtcttggaaggtgcaaaccagaaggtacctccagaacttcgtgatatgtcatcacggagtggtggtgggatgggtagatccagacgatggggttctgggggacgaggtggacatggtgatt

SEQ ID NO: 46757 - DNA, 245 bp, Glycine max
  unsure (1)..(245): unsure at all n locations; Clone ID: 701132786H1
cgctttcaccgagtaacttcactttccccaactccacctgagaaaaagatacccataattcgcacgcacgcacgcacgcacttgtnctgactcagtgcttgtgttggacgcagangaaccagaanagannnacaagnacgnggagatgattnanttcgaagannccgagttgcgactcggccnccctggngggtctncgagnnntgacaangantgngcnncggtccgggnngggggggaangga

SEQ ID NO: 46758 - DNA, 245 bp, Glycine max
  unsure (1)..(245): unsure at all n locations; Clone ID: 701132787H1
ctcaccctgtgaaagatgcataccccctgtggttgacacnagttatttgtnagatntggtnnngcctatncgtggntcttngatcagtttncaaaatggnccnnccatnaatcgtganactnatcntgaacgancttgctttaaggnatgatcgtgaaggagaaccatcacagttagatcctgttgatgtgtttgttagtanagtggatcncctcaaagagcngnntcatgtaactggaaacact

SEQ ID NO: 46759 - DNA, 243 bp, Glycine max
  unsure (1)..(243): unsure at all n locations; Clone ID: 701132788H1
agcctttggaattatggcacagactcatcgttgtccacagagccctctggctctgaagttncaatgatcancttattcaccttttgatgattgaagaagctgaacngcaactttaggnaagaaaganancaggtgtacaggctccgtaactancttctgtattantgnttnagtgggcttnatggnngcgtcntantanactacatngctcntgnntanaggatgntgagcaggtggacaagc

SEQ ID NO: 46760 - DNA, 241 bp, Glycine max
  unsure (1)..(241): unsure at all n locations; Clone ID: 701132789H1
cagaatttcgtgttcccacccttcgatgtcgttgagcccaanacacgtgcgacccggcantcgcgccctccncggcaagctggaacatgaattggaggaactcgaacgcagcgtggaaccgtcgtggccaaagttggtgganccgttggagaagatcattgaccagttatctgtagtttggggcatggttaatcatctcaaggctgttaaggatagttcggagtacgttctgctatgangc

SEQ ID NO: 46761 - DNA, 170 bp, Glycine max
  unsure (1)..(170): unsure at all n locations; Clone ID: 701132790H1
aacngtgtgatgaaantncaggtccttgttttcttcgttgcnacaattttngtagcatggaatgccatgcgtaacgatatgttnccctctccgaatgaacactggctatggngcccgtacttccggaggngacatgcgnnnnttggcngcntgnngtgacncancacang

SEQ ID NO: 46762 - DNA, 241 bp, Glycine max
  unsure (1)..(241): unsure at all n locations; Clone ID: 701132792H1
ttggcanaaacagtgaganattttcttcttcttattttttaataataaaataatatgaaaaatgagagacattgttgttgtatccaaatccaaaaaaacctttttctgaatcagtcgtgaaccaaaagaggaagatggagctgtggnacacagcccgaagctcngcggaagaagcagngaaacgatcccaggaactgtcgttgggagcnagcgctacggnnnnnaccannatcntngtgca

SEQ ID NO: 46763 - DNA, 237 bp, Glycine max
  unsure (1)..(237): unsure at all n locations; Clone ID: 701132793H1
gtgtctttgaacaatatggcagcatcatgtggcgtcacaccgaaacaggcattcccantgaatcgttcgaagaaacgagaacggnagtcaacttagtggtaagaantgttgtnaccgtgggcaantacgataacatcattgattgggagtttaaaannagtggctcaatcaaaccctcgattgctctctcgggtatattggnaattaagggagtggntattangcacnagagtgcga

SEQ ID NO: 46764 - DNA, 248 bp, Glycine max
  unsure (1)..(248): unsure at all n locations; Clone ID: 701132795H1
cgaagagangagaaaaattaagatggaggggaaggagcaggatgtgtcgctgggagcgaacaagttcccggagagacagccgattgggacggcggcgcagagccaagacgacggcaaggactaccaggagccggcgccggcgccactggttgacccgacggagtttacgtcatggtccttttacagagcagggatagcagagtttgtggccacttttctgtttctanacatcatgtctncaccgtcat

SEQ ID NO: 46765 - DNA, 269 bp, Glycine max
  unsure (1)..(269): unsure at all n locations; Clone ID: 701132801H1
ccnaancgtacctttctgaaccctgcactcnannnanntgcttcttccagatncatcggataagctcnaatattctttaattcccactccacttctctggaatgtgatatttcccccttcaaattctgcttcctattttgtctcaattcccactcttnggtttcgtttccctttcaagaaaccgaaaccctagacgacttttccgcctctgaatttgagcaattgggaaccccaaactctttcctaggatagtaacattggagatgaaa

SEQ ID NO: 46766 - DNA, 262 bp, Glycine max
  unsure (1)..(262): unsure at all n locations; Clone ID: 701132804H1
cgagaatgtaccattagctgttgctcatccccaattcctcccgttcaaatggccacccaagtccaaactcccctccgtcgtcggaattcgatgctcctcctncccctttcaacgacaaaaccctcatttccatcacacctaacacttcccacctcaatcccaaccctctcgcttgtcgctttcacgcntcccagtttggagaacaggagagcaacaaatacgtggaagcctatgctgtaggacgaaatattcgtatgtctgc

SEQ ID NO: 46767 - DNA, 261 bp, Glycine max
  unsure (1)..(261): unsure at all n locations; Clone ID: 701132807H1
ccngtcancattcnccaaagttgacgcgccaatgtctttaaatgcaatggcntttacnaaacttagagtttcatcgttgtacaagctcacttgctagnancnattcanggccatgccatttatcaaccatggancttatcgctgcaatcaccaanaatnggaatggngnnaaatgaattatccatcaagtncgtgcaggtagtgnnaaggcgnctgtcatatntatctgtgnncgaaagatttggatcnngctntaantna

SEQ ID NO: 46768 - DNA, 229 bp, Glycine max
  unsure (1)..(229): unsure at all n locations; Clone ID: 701132808H1
gaaagaagcttgaagaccattgaaaagaagctacnagagaagaacaaagatgacccattgannaaccgctatgggccagctaaaatgccttacactctgctctatccttctagtgaggagggattgactttcagaggaattcccaacagtatctctatctaaggaccctatggttgcttaagtactgttcctggttttaaataaatgtgaaattgaaggaaccagattc

SEQ ID NO: 46769 - DNA, 259 bp, Glycine max
  unsure (1)..(259): unsure at all n locations; Clone ID: 701132809H1
ctcccacaatgggatagtcatcttggtngtatgatctatggaactatccataagattgcctacaccagattatcatttgaaaaaatgttctttcctgttatgtagatccagttcagccccctccccgaacacacatttctctctcctttccatctatttttttctcctccaaatcgtcaagcttctttggtgccatcttcctctaccaacaactacaccaaaacccactcacacaaaccaaatccaaagtcgacccact

SEQ ID NO: 46770 - DNA, 255 bp, Glycine max
  unsure (1)..(255): unsure at all n locations; Clone ID: 701132810H1
gagtcancttncagcagcaatggctcccaaacgaggtggaaaggctccggctcttgccgctaagaagaagcctgagaaggtcacgaatccgttgttcgagaagcgtccgaagcagttcggaatcggaggggcgttgcctccgaaganagacttgactaggttcgtgaagtggccaaagaatgttcaaattcagaggaagaagaggattctgaagcagaggttgaaggttcccccagctttgaaccagtttaccaa

SEQ ID NO: 46771 - DNA, 253 bp, Glycine max
  unsure (1)..(253): unsure at all n locations; Clone ID: 701132811H1
actgagagaaattcgcaaaccctaatttcggaaagatcggcgatggctgcctccaaggatcgcnaganccttcgtctacatcgccaagctcgccgaacaggccgacccgatacgaagagatggtggaatcaatgaagaacgttgcgaatctcgacgttgaactnactgtggaggagcggaatttactttctgttgggtacaagaatgtgattggngctcggagagcatgcgtggaggatcctgtcttccattg

SEQ ID NO: 46772 - DNA, 224 bp, Glycine max
  unsure (1)..(224): unsure at all n locations; Clone ID: 701132812H1
tgaaactncttggcaacaggtggaccaaccggacnagccttattgacaactatactaaccaaattgagctttgtgctttctcgcaaagcagctagtctcgtgggtcttcaagctcgtcttgcaagattccaacatcgactaaaagagcaagaaattctaagtagaaaaagagttccccgtcaataagagactcggtttctcttattcaacgtcatctgtattct

SEQ ID NO: 46773 - DNA, 255 bp, Glycine max
  unsure (1)..(255): unsure at all n locations; Clone ID: 701132814H1
tatgcttgtctcaaagattaagccatgcatgtgtaagtatgaactanttcagactgtgaaactggcgaatggctcattaaatcagttatagtttgtttgatggtatcttctactcggataaccgtagtaattctagagctaatacgtgcaacaaaccccgacttctggaagggatgcatttattagataaaaggtcaacacaggctctgcctgttgctttgatgattcatgataactcgtcggatcgcacggcct

SEQ ID NO: 46774 - DNA, 147 bp, Glycine max
  unsure (1)..(147): unsure at all n locations; Clone ID: 701132816H1
tcgcttcttccttctcttcntgagcnacatgcagatnttcgtcaagantttgaccggcaanancntgngccatnantgttctngatnagcgcgtttactgcgtcagtgttcagangaaaccctggcagcagtgtgtttctcnnanga

SEQ ID NO: 46775 - DNA, 265 bp, Glycine max
  unsure (1)..(265): unsure at all n locations; Clone ID: 701132817H1
gtcgtcgccatgactttggttatggaatggatgggcatngcatgcattaatgatttatatccttgctgcttgcaatgttttcccaattttccttcaaggattttattggggaagtcctcacaataacattctcaagttaattggagttggcacttgaagaaaggcacataaacatgctattggataaaagattatatgcagtaagactgtgaacatgttttactgtaaaagaaatggctacccgagtttttggagctaatctttt

SEQ ID NO: 46776 - DNA, 262 bp, Glycine max
  unsure (1)..(262): unsure at all n locations; Clone ID: 701132819H1
atcagcatcactctcaaagttcaaaggggaatgaatgctnnttctcacaacaacaacctncnatcgtttcattactgtttccccttaaccccaaatagatataaaacacaacaagaatctcgtttcggggatacaatgattgggcgcagagacagagagggacccttgatgaggaacaacagcactaactctcttcgcaaatcacgggtcctaacctcagttgcaattggtgtccttattggatgcggcttcgctttcttgt

SEQ ID NO: 46777 - DNA, 239 bp, Glycine max
  unsure (1)..(239): unsure at all n locations; Clone ID: 701132820H1
tggaaacggaggcactgaagaagtacctcatcaggaagaggcgtttctctgagactgaaaacggtcatgaagatgagtctgccaccactgtggatttgatgcttaatctttcttctaaggagnnnnnnnnnnnnnnnnnnnnnnnnnnnnnnnnnnnngataagcacaagactttgcctaaggagaagacccttctgccagcagatcctgctaagcctccagccaagacgcaggtggtg

SEQ ID NO: 46778 - DNA, 258 bp, Glycine max
  unsure (1)..(258): unsure at all n locations; Clone ID: 701132821H1
aaaccttatatgatgaatgggttaacaagggcgacgcaccggcattgccagagactcttaaaaattacaacaagctgttgtctcttggctccnncattgtattcttgtcaggaagatatcttgacaaaatggccgtaacagaagcanncctaaagaaggctggcttccacacatgggagcagtnaattctcaaggatccacatcttatcactccaaatgcactttcatacaaatcagcaatgagagagaatctgttga

SEQ ID NO: 46779 - DNA, 127 bp, Glycine max
  unsure (1)..(127): unsure at all n locations; Clone ID: 701132822H1
ggccntntgccagntattctaatcaatccccattcgacaagnangangatgctgngagtggncacntgcacgagcccttcattcaaccanaggatncccgctggtgcttgncanagaanatggatna

SEQ ID NO: 46780 - DNA, 257 bp, Glycine max
  unsure (1)..(257): unsure at all n locations; Clone ID: 701132823H1
ctcatccctgtcctaactccatttcatttaaacgccgtcgttccctcctctcgctcttgtncccgattttagggtttttccaatgggtctcggtaacgatgaagaagaggnnnnnnnnnnnnnnnnnnnnnnnnnnnnnnnnnnnnnnnnnaaggttgtngntgacgganatgctggaggaggaaagtctttcggttcagtgtcgtgttccattgcctcgaggtgnttgccgataatggggatagatcctggtctaa

SEQ ID NO: 46781 - DNA, 252 bp, Glycine max
  unsure (1)..(252): unsure at all n locations; Clone ID: 701132825H1
tgagctatagcctaaagggagagacanataaatagtttctactttctattcatagatagatggctggcccaattatgagacctcagattgtgctatttggctcctccataattcaaatgagcttcgacaatggtggttggggtgctattctagctaacttgtacgctaggaaggcggacatcatcttaagaggatactctggttggaattcaaggcgggctttggaggttttggatgaaattttccccaagg

SEQ ID NO: 46782 - DNA, 249 bp, Glycine max
  unsure (1)..(249): unsure at all n locations; Clone ID: 701132826H1
aagttcancattgcaaatcccaccactgggtgccagaagaagctggaaatcgatgacgacctgaagcttcgagcattttgggacaagaggatctcccaggaggttcttggtgatgctctgggtgaggagtttaaaggatatgttttcaaaatcaccggtgggtgtgacaaacaaggattccctatgaagcagggagtgctgacccctggtcgtgttcgacttttgctccatagaggaatccttgtttcc

SEQ ID NO: 46783 - DNA, 248 bp, Glycine max
  unsure (1)..(248): unsure at all n locations; Clone ID: 701132827H1
cacccatatggctgcttgtcgcctaaagaatcaagaagctttgttaatttgggtgttgtacttaataaagccatnactggtttggaaacaganaaggttccttttggtttctttgctcggaatggcaagtatgtggaatgcctgctttctgtgagtaagaaattggacgtagagggcctagttactggggtctctgcttcttacagctagctagcccagagctccaacaagcattacatattcagcgc

SEQ ID NO: 46784 - DNA, 134 bp, Glycine max
  unsure (1)..(134): unsure at all n locations; Clone ID: 701132829H1
attgatattatggcagaccctcagaaaattcaccctgtgcaccatgntgttgaggcacaaaaccaccctncagcaccattggtgccaaggagcatgtccaaatctgatgcaggtgatccacaacgagtagtagt

SEQ ID NO: 46785 - DNA, 250 bp, Glycine max
  unsure (1)..(250): unsure at all n locations; Clone ID: 701132830H1
accgnganaaanaatgnccacttnctttncctcctccggncaccggaaatacccgnacggttcacggccgaaccgcgccgccggaatggctattggaaanccaccggcgctgataaaccgatcggaaaaccgaaagcgcttgggatcaagaaagctctggttttttacgccggaaaagcccccaaaggtgtganaaccaattggattatgcacgaatatcgcctcgccaatgttgaccgatctgcctcca

SEQ ID NO: 46786 - DNA, 260 bp, Glycine max
  unsure (1)..(260): unsure at all n locations; Clone ID: 701132831H1
ctnganncgnatnngctctngtctnactctcctctganatttctaccttntggtgctntgtacnctctacgatctggatccacncggtccaaaatgttcggggcntgtnctgcttgttttcccaggttttagagctccaaaccttcagatccacctcattcgtctccagatcttccttccttgataacgttttcgggttcgagaaggcacttgtttgtttgtcgtacgaaatggagactaaaccgagttcggtgatggtt

SEQ ID NO: 46787 - DNA, 263 bp, Glycine max
  unsure (1)..(263): unsure at all n locations; Clone ID: 701132832H1
cnnctngagcgancccnnnnnnantcngtanacatgttggtttaccaggaacctccttacaggtgatgagcntctctctgactccttccgttacaaggaaattgagaatggaatgctgtgggaagttgaggggaagtgggttgttaaaggagcagttgatgtagacattggtgcaaacccttctgctgagggtggaggagaagatgagggagttgatgatgcagctgttaaggttgttgacatgttgacacattcagacttca

SEQ ID NO: 46788 - DNA, 254 bp, Glycine max
  unsure (1)..(254): unsure at all n locations; Clone ID: 701132833H1
attgacaatgaggcctgctcttgctttgcttcctctncctatttgctttcttgacngctgccactacagaatcaagaaaagatacaggggaatattggaaaatgatcatgaaagatcaggaaatgccagaaggacttcaaggtcttgtttcatttcaatctganaataaccctaagactcaagagcagcttggtaaaggttccaaaaaccattgtgaagagtctctagttacaaatacacaagttaatagtgac

SEQ ID NO: 46789 - DNA, 215 bp, Glycine max
  unsure (1)..(215): unsure at all n locations; Clone ID: 701132840H1
catcaaancaagttgaggcattcanaatcaggctgtcaattacactnattgggctgagtgttcaacacatggcgcttgcaaatgcagccttcttgggggtgttgagtgtattgctagcataacatgtagtaatggaggatggtactgcacctgcactacccttttctgatctcgaggaacctggagctaccattgataatctttggcggcagtgg

SEQ ID NO: 46790 - DNA, 256 bp, Glycine max
  unsure (1)..(256): unsure at all n locations; Clone ID: 701132847H1
ccgctttgtacctggagcngcanatncnccttgtaagtntccacncccatnatccactgctctttcaagatcatctacntatactatcagtacttcctcgtaaaacaacagtggatgatggagtgnacacttacaaggcaatgtgcagggntagccgctttgtacctggagctgcagctactganattgagttagctanaagggtgaaagacttttccttcaaggncacaannttggatcagtatgctattgcaaa

SEQ ID NO: 46791 - DNA, 259 bp, Glycine max
  unsure (1)..(259): unsure at all n locations; Clone ID: 701132849H1
gaccttctcatgggctcggcattgacttggcacatgaggatgaagattgctcttgacacagcaagaggattagaatatctgcacgagcactgtcaccctgcagtgatccatagggatatgaaatcttctaatattctcttagatgcaaacttcnatgcnaagctgtctgattttggtcttgccttaactgatgggtcccaaagcaagaagaacattaaactatcgggtaccttgggatacgtagcaccggagtatcttc

SEQ ID NO: 46792 - DNA, 258 bp, Glycine max
  unsure (1)..(258): unsure at all n locations; Clone ID: 701132850H1
aaggtatggagaggaaggatgtgatgactaagaacgtctccatttacaagtcccaggcttctgcccttncaaaagcatgctgctgccaactgcaaggntcttgttgttgctaacccagcaaacaccaatgcacngatcttgaaggaatttgctccatctattcccgagaagaacatttcttgtttgactagattggatcacaacagggcattgggccaaatctctgaaagactgacgttcaggtttctgatgtaaaga

SEQ ID NO: 46793 - DNA, 252 bp, Glycine max
  unsure (1)..(252): unsure at all n locations; Clone ID: 701132854H1
gatttttgggtttggggataatgggcaaggctatggcaatcaatcttctacgccatggcttcaaagtcactgtttggaacagaaccctctccaagtgtgacgaactcgtgcaacatggtgcttcagttggagaaaccccagcaactgtagtcaagaantgcaagtatacaattgcaatgttatctgatccttcggctgctttatcggttgtgtttgataatgatggtgttcttgagcatattaatggaaaag

SEQ ID NO: 46794 - DNA, 252 bp, Glycine max
  unsure (1)..(252): unsure at all n locations; Clone ID: 701132855H1
caggtccagacatagtaaggattgacagactgagagctctttcttgattctatgggtngtggtgcatggccgttcttagttggtggagcgatttgtctggttaattccttaacgaacgagacctcagccaccatcatatgatcagcagcaaggttatagctcagctgctagctatggtagcaacccagccccagagggccacactgccaattacggntcccaaggggattcaacccaagctccacctgccca

SEQ ID NO: 46795 - DNA, 249 bp, Glycine max
  unsure (1)..(249): unsure at all n locations; Clone ID: 701132857H1
gctcccctcacctctctctccgaaatccccaaattgcctgtnaatgctaganaccctaggcacgttcgatttgatgctctcncatttgcaatcaagggcgagcgcattcggntcttgcacgcaaggctggtactaccgctgcatcggcctcgatccctgaattcatnattctttctcgcaccatntttntctattccgattcgatttgttgttgtngntgttgtngttgngntcnngtntccttcnttg

SEQ ID NO: 46796 - DNA, 247 bp, Glycine max
  unsure (1)..(247): unsure at all n locations; Clone ID: 701132858H1
ctcccctctcaggtttttgtggataagattgagctataatggctgccaggagaccgggtttgattgctttgtttgatgttgatggaactcttacagctcccaggaaggtggtcacaccggagatgttgacattcatgcaagaactgcggaaggttgtaactgttggagttgttgggggttctgaccttataaagatatcagagcaacttggcagcacagttaccaatgactatgnttatgtattttc

SEQ ID NO: 46797 - DNA, 248 bp, Glycine max
  unsure (1)..(248): unsure at all n locations; Clone ID: 701132859H1
ctggaatgagaggtgcttttggaaagccacagggtacttgtgctanagtggctattggacaggtccttctttctgtccgctgcaaggacagcaacagccatcatgcccaggaggcccttcgccgtgccaagttcaagttccctggtcgtcaaaagattattgttagcaggaaatggggcttcaccaagtttagtcgttctgattatctcaagttcaagtcagagaatagaattgtgcccgatggtgtg

SEQ ID NO: 46798 - DNA, 60 bp, Glycine max
  unsure (1)..(60): unsure at all n locations; Clone ID: 701132863H1
ctngagangaattcngaattgagaaganggtgttngaggaaactgtacctgaggntggga

SEQ ID NO: 46799 - DNA, 260 bp, Glycine max
  unsure (1)..(260): unsure at all n locations; Clone ID: 701132864H1
gtggatccgtganacgggtttcccgtcaagatattcagttggtgcaaaatctcatagaacgatgtctacaactgtatatgagccagaaagaagttgtggaaacactactagctcaagcaaaaatagagcctggtttcactgaactagtttggcaaaancttgaagaagaaaatgaagaattcttcaaggcttattatgcaaggttggttttgaagcagcaaataatgcaattcaacaaattgctggatcagcaagtgcaa

SEQ ID NO: 46800 - DNA, 270 bp, Glycine max
  unsure (1)..(270): unsure at all n locations; Clone ID: 701132865H1
tcgctcgcatgcnctttgcgcngatggtcttgnnggctcaaaaatgcggcttgctgtggttcatganataantaacaagtcagaatctgcagttagagggtgcagattcaacactcgccctcatatgggtgctatagttattttgatganatttaaaagtgggagcatgtatttgtccttgtatttcccaactgcnaagattatgttttgaagatagtgttttaaanttttcgnttacttagcngtcggatttgttgtgattagttcgtt

SEQ ID NO: 46801 - DNA, 254 bp, Glycine max
  unsure (1)..(254): unsure at all n locations; Clone ID: 701132866H1
gcanttcttgttttctctctcaccctcatatccatcatcttccacacccatggagcgtnctctgagcaatcaataatcaagttacccacagaccaaccaagggtagagaaactgacccacttgcattttttctaccacgacatcttagagggcaagaacatcacggtggtgaaaatcatcgagccatcagcgagcgaggttcgtgaagcaactgggtttggaaccactttcatgatggacaatgttttgaccga

SEQ ID NO: 46802 - DNA, 253 bp, Glycine max
  Clone ID: 701132868H1
ctcactggcttcttctactggattgcacagcttcttggctccatcgtggcatattttcttctcaactatgtcacaggaggcttgccaactccaatccacagtgtggcttcaggggttggagcagttgaaggagttgtgaccgagatcatcatcacatttggtttggtgtacacagtgtacgccacagcagcagatcctaagaagggctcattgggaatcattgcaccaattgccattggtttcattgttggtg

SEQ ID NO: 46803 - DNA, 232 bp, Glycine max
  unsure (1)..(232): unsure at all n locations; Clone ID: 701132870H1
cagcacagtgaggtggaagtgaaggcnctgaagcttcacgtncgcaganattggaagtggctacaaaacagtggtattcttgcatggattcccagagatctggtacacatggaggcaccaaatgatttctgtggcaaacgctggttatagggctattgcctttgatttcagaggctatggactttctcagcaaccagcagagcctgaaaaggaaaccatgtttgatctggtt

SEQ ID NO: 46804 - DNA, 251 bp, Glycine max
  unsure (1)..(251): unsure at all n locations; Clone ID: 701132871H1
ggaagacaatgtcccccaacagcaaggagaatctgtttatagtttttctggtgacactttggtantctttaaacattggtgtgatccttctgaacaagtacctgctttcaaactatggattcaagttcccaatcttcctcacaatgtgccacancgtcagcttgtgctgttctcagctatatctccattgtgttcttcaaggtggtgcctcagcagatgatcaantcaaggtcccagttcatcaagattgc

SEQ ID NO: 46805 - DNA, 252 bp, Glycine max
  unsure (1)..(252): unsure at all n locations; Clone ID: 701132872H1
ggttttcgttctgattctgcaaaatcatggagatggagcgcatcgttgaattccctcacacctacatggatcgacccccaagaaagagagcgcgtttgggctgggacatcgctgaggcccccaaggctcaggtaggattgttttgtggacaagaggttgagaatatttcaagctatgctccttcagaannaccccctagttctctgtttaagggagttgcccgaaatggttctcccccatggcgagatgatg

SEQ ID NO: 46806 - DNA, 245 bp, Glycine max
  Clone ID: 701132875H1
tttacacatctctccaacctttcactttcgtttctcagttttattcgaatccctctctcaatctcctttccaaatggccagcgttgaggttgcacagcaaacaccaacaacagttccagaaaatgaaacaaccgaggtaagcaagacccaggaaacaaccccagtcactgaggctcctgcaacagaacaaccagcagctgaggttcctgcaacagaacaaccagccgctgaggctcctgccccag

SEQ ID NO: 46807 - DNA, 245 bp, Glycine max
  unsure (1)..(245): unsure at all n locations; Clone ID: 701132876H1
agcgtggttcaccctatttacaaacttctgtttcctcactatcgtgacatnctgaacattnattcacttgcccgcaaatccttggtcaatgccgacngtattatagagnaaacattcttgtggggtaggtactctttggaaatgtctgctgttatttacaaggattgggttttcaccgatcaagcattgcctaatgatcttgtcaagagaggagttgctgttaaggatccatctgctccccatgg

SEQ ID NO: 46808 - DNA, 249 bp, Glycine max
  unsure (1)..(249): unsure at all n locations; Clone ID: 701132877H1
acaacaacaganatgttgcngaattcgaaccgagctcggtgtgcttggcgaaaatggtgcagaatttcatggaggagcagccaccggcnccaccgaaatgtggtcgcaaccgctgcaactgcttcaacgccaatagctccgacgaggacgatttcgacctcttcggtgctgcaccggcaccggaatcatccaacgccgacgccactgaatcactcaagagcttgatcccctgcgcgagtgtcggcgaga

SEQ ID NO: 46809 - DNA, 252 bp, Glycine max
  Clone ID: 701132879H1
gcagctgttaaggttgttgacattgttgacacattcagacttcaggagcaacccgcattcgataagaagcagtttgttaccttcatgaagaggtttatcaagaatttgactcccaagctcgatgcagagcaacaggagttgtttaagaagcacatcgagggagcaactaaatacctgctctctaagattaaagatttccaattttttgttggtgagagcatgggtgatgatgcttgcttggtctttgcctac

SEQ ID NO: 46810 - DNA, 256 bp, Glycine max
  Clone ID: 701132880H1
tctttttctccttgaactcaaacatggcagatgaggtggttctgctagatttctggccaagtccatttgggatgagggtcaggattgcacttgctgaaaagggtatcaaatatgagtacaaagaagaggacttgaggaacaagagtcctcttctcctccaaatgaacccggttcacaagaagattccggttctcatccacaatggcaaacccatttgtgaatccctcattgctgttcagtacattgaggaggtttg

SEQ ID NO: 46811 - DNA, 126 bp, Glycine max
  unsure (1)..(126): unsure at all n locations; Clone ID: 701132881H1
agggcactggaagttattccccaaagctcaanacagncagcaagcacttgcaaagtttgtgcnaagtgttcagttcagagcgactgagcttcacaaaaaaaaaaaaanggtangannccnaaannt

SEQ ID NO: 46812 - DNA, 255 bp, Glycine max
  unsure (1)..(255): unsure at all n locations; Clone ID: 701132882H1
ctcacccgtgtggncntnagccgggctgagaaggacttgaagataatctcagangtttactacaagagaaacagtgttcttcttgagcatgctattgccaaggaaacctctggggactacaagaagttccttctcacactgttgggaaaagaagactaaaaacttttcttcgagggcatttgtgattatgagtttaggacagtaagctatacttgtgtgtgatggtnncatgtgtgttggttttccttgagtctg

SEQ ID NO: 46813 - DNA, 246 bp, Glycine max
  unsure (1)..(246): unsure at all n locations; Clone ID: 701132883H1
cttgtcttcaacctcgttttcttttcttcgtcttctatcaccgattccgattcncnnnnnnnnnnnnnnnnnnnnnnnnttattgatcctctctgcgatcacgaattttcccattttctccgtttcctcggcgaccaaacggaggagaagaacgcagttctgaaaacgattggaaaatgctgggaactgcactgcaattcagcggcgttcgcggcgaggatcggttttacattccggtgaaggcga

SEQ ID NO: 46814 - DNA, 253 bp, Glycine max
  unsure (1)..(253): unsure at all n locations; Clone ID: 701132884H1
aggacacaagagaaagaagggggagctatagccataaggagaaaaactttcaaagaagtgaaagcaaaaaagagttgttcttttcctttctgctgataagctgtgtgcncccgttcattgacaagcctgaaatgacaactatgctgacaaatgagcatggtctgagtttgaacctcaaggagactgagctttgcctcggtttgcctggcgggggctctgaagtggaaactccaagggccactgggaagagagg

SEQ ID NO: 46815 - DNA, 250 bp, Glycine max
  Clone ID: 701132886H1
tagatgttcctcaaatcaagtatggagccattgttaagaaggcagctaataataaagaatggagttggtcagatgtcgcaaatcccatatttaaatgctctgacaaggttagatccttgatctcctctcttacattcagtataatgaagatctcagtcaaggatatttctgctagcttaacaaaaggtgctagtcaaccatatgaagctatatttgtgtcatcaaaaactaagaaaagtgatgcacttga

SEQ ID NO: 46816 - DNA, 252 bp, Glycine max
  Clone ID: 701132888H1
gaaaaattcacctctccaatcccaatcccatcgttgcaaatgatccgattcattctgttgcagaacaggcagggcaagacccgtcttgccaaatactacgttcctctcgaggactccgagaagcacaaggtcgaatacgaggttcatcggctcgtcgtaaacagagaccctacatacacaaatttcgtcgagtttcgtacgcacaagataatatacaggcgatatgctgggttatttttctcactctgtgtt

SEQ ID NO: 46817 - DNA, 246 bp, Glycine max
  unsure (1)..(246): unsure at all n locations; Clone ID: 701132890H1
cgaaaatcctctgatactgttgttttcctgaaactatgacaaccatgtcancctcntcctgcttcccaaagcctcaaaattggcattgttggattcggcaactttggccagtttctggccaanacaatgattaaacaaggccacactctcanagcaacttntcgatntgattactctcaactttgtctccaaatggggatccattttttcagggatgtcagcgcattcctcgccgcagacatagat

SEQ ID NO: 46818 - DNA, 256 bp, Glycine max
  unsure (1)..(256): unsure at all n locations; Clone ID: 701132893H1
caaattntgtggngaagttagctgccantaccagaancaagagcaagatacnagggaatatnggacaatgatcatgaaagatcaggaaaagccagaaggacntcaaggncttgtgtnatngtnaatntgaaaataaccctaagactcaaganccagcttggtaaaggttcnnaaaaccatngtgaanagtctgtanttacangtacagaagttagtagtgnacgacgaacncataccangngnnacgaaatgtgat

SEQ ID NO: 46819 - DNA, 245 bp, Glycine max
  unsure (1)..(245): unsure at all n locations; Clone ID: 701132894H1
acaatgacataaagaactattggaacacncatttgagnaagaagctgaagaagaccgcaagtaggttgtgaaggtggtagctttggagaagggttttcagcctcaaggcaaatccctagaggccagtgggaaagaaggctccaaactgatatccaaatgccaaagagagccctcagtgaagctcttntcaccagagaanccatcttgtaatttagctgcctcaaactnaaacccttcagatagta

SEQ ID NO: 46820 - DNA, 255 bp, Glycine max
  unsure (1)..(255): unsure at all n locations; Clone ID: 701132895H1
ctcgcttcttccttctctcatcaacaacatgcagatnttcgtcaagactttgaccggcaagaccatcaccctcgaggtcgagagcagcgacaccatccacaacgtcaaggccaagatccaggacaaggaaggtatccctcctgaccagcagaggttgatttttgctggtaagcagctggaagatggtcgcactcttgctgattataacatacaaaaggaatcaacacttcacttggtcttgaggctaaggggagg

SEQ ID NO: 46821 - DNA, 274 bp, Glycine max
  Clone ID: 701132901H1
gcctaccactggttactgcaccttttgggcatgcctcccaggaaattgtgaacctactgctctgtggggaggctgttcctaatgtgtttgatggaaggatggatttaggaggaggaatgtttgtgaaaggtatatccggatatgtggaagttggatttctgactctattagaatccctgaatttttgcaaggttggtcagtttctgaaatccccaaagtggcctatatgggttgtggggagtgaatcccattacacggtgctgtttgctcttga

SEQ ID NO: 46822 - DNA, 273 bp, Glycine max
  unsure (1)..(273): unsure at all n locations; Clone ID: 701132903H1
tgnactaaggacaagggcaggagatnnngcagtttcgtattggcaaaganccttcagttntggnccagactagaatntatgacattttgcaatttgttgcngcacaatcgactccagctcctcgacctgntcagcaaagacctggtgtgagggtnccgtcaaccggcacctgcaaaaccagcagctgctgctgcagcagannctcaagttgaggaacctccatctcctacctctagcanatcttcgagtctgntccagagggaggtagaagag

SEQ ID NO: 46823 - DNA, 269 bp, Glycine max
  unsure (1)..(269): unsure at all n locations; Clone ID: 701132904H1
gccacgacccatcaatggcagggaaagaccctgtcgatgtgataagaaaggctgtggccaaaacgcttgtgttttactatccttttgcaggtaggcttagggaaggacttggtcggaaactgatggtggattgtactggggaaggtgttttgttcattgangctgatgcagatgtcactcttaagcnatttggtgatgctcttcaacctcctttcccgtgctgggaggaactcctttatgatgtacctggttctcaaggagtgcttaac

SEQ ID NO: 46824 - DNA, 269 bp, Glycine max
  Clone ID: 701132905H1
gtaaatatggcatactctcaacttcaaaagctggaagctaacgtgagtatcaaggcttcagctgaacagttctatgatgttttatgccacaagacacaccaaattcccaaaattttccctgaaaaagcactgtctgttgaaattctgaaaggtgcatggggcaccgagggatctatcatctcctggaattatttatacgagggaaaagtttgtgtggctaaggaggtgattgaaggcatagacaagaaaaacaaaaaaatgagcttcat

SEQ ID NO: 46825 - DNA, 267 bp, Glycine max
  Clone ID: 701132908H1
gctggttttcctgaaactgtgcctgttaggactgttaataggcaatgttcatctgggctccaggctgttgctgatgtagctgctgctataagggctgggttctatgacattggtattggtgccggtttggaatctatgacaactaatccaatgggatgggatggatcagtgaatcctaaggtaaaaatgtttgaacaagcacaaaactgccttcttcctatgggaattacctccgaaaatgttgcacagcgctttggggtttcaagg

SEQ ID NO: 46826 - DNA, 268 bp, Glycine max
  unsure (1)..(268): unsure at all n locations; Clone ID: 701132909H1
tcttatttaaaagtattttttcagaacattttgttcccaagtctcaacacatataaaacaatgggttttcgtttacctggtatcaaaaaagcatcattaaaccaagcatctnccaaaagctgtggacgtgccaaagggctacttccagtctatgttggagagaaaatgaagtgatttgtgatccccttatcatacttgaagcaaacttcatttcaagacatgctcagtctatccgatgaagaatttgggtataaacgtccaatgggtg

SEQ ID NO: 46827 - DNA, 266 bp, Glycine max
  Clone ID: 701132910H1
ggtccacaaaccttgactggtacaagggtccaactctgcttgatgcacttgaccagattagtgagcccaagaggccctctgacaagcccctcaggcttccccttcaggatgtgtacaagattggaggtattggaactgtgccagtgggacgtgttgagaccggtgtcttgaagcctggaatggtggtgacttttgcaccaactggactgacaactgaagtcaagtctgtggagatgcaccatgaatctcttacagaggcacatcct

SEQ ID NO: 46828 - DNA, 265 bp, Glycine max
  unsure (1)..(265): unsure at all n locations; Clone ID: 701132915H1
agaggttcaggttgaaaatatgggatacggctggtcaagaatcattcagatctattacaaggtcttattacagaggggcncgcaggtgcattgcttgtttatgatataaccaggagggagacatttaatcatttggctagctggttggangatgcaagacagcatgcaaatgcaaatatgactattatgctgattggcaacaagtgtgatcttgctcatagaagggctgtaagcacagaggaaggcgagcaatttgcaaaggagc

SEQ ID NO: 46829 - DNA, 267 bp, Glycine max
  unsure (1)..(267): unsure at all n locations; Clone ID: 701132916H1
ccgangcaggaactaaatatggctgacttgttggaatggtcaaagcaagataagnaacgaatgcttcatgtcgtctaccgtgttggtgaccttgatcgcaccatcaaattttacacagaatgtttaggaatgaagcttttgaggcaaagagatatcccagaggagaaatatgctaatgcttttcttggatctggccctgaagaatcccattttgttgttgaattaacatataattatggggttactcgtatgacatgggcnanggct

SEQ ID NO: 46830 - DNA, 249 bp, Glycine max
  unsure (1)..(249): unsure at all n locations; Clone ID: 701132918H1
cacacacaaacacacaacaaaagcccnncggaanatctttctccggcgacctggaattccgacgaaggtagttgcggctcccttcgtcccgaaactgaggccctcaaagtataaactttggtggtggtggntaggatctggcggtgtatgatgggatcttgcatatgcccgttggagactccggcgaggttgctttggaccacaagcttcttccgtcataagcttatgatcttctaataattaataatt

SEQ ID NO: 46831 - DNA, 143 bp, Glycine max
  unsure (1)..(143): unsure at all n locations; Clone ID: 701132920H1
aggnnacancctaagcctagacctgaatttganttgcnancatggctagntncaactcanattacaggtctaggcttaggntgggtccttttggaattntatngnnagcttggcgaactccatctaatanatgtctattcata

SEQ ID NO: 46832 - DNA, 271 bp, Glycine max
  unsure (1)..(271): unsure at all n locations; Clone ID: 701132922H1
ctcttccaataaatacatnccatataagacagacagaatccacgcnagcacaaataaaaagaaccaaatttcagaagncaaaagagtcacttgaaggttcaatgggcgaggaagagaaaaaattagaaganagcaaagaggagaacaaaaaagcagaggaaccaangaaggaagaagagaagaaagaggagagaaaaactgaggaatcaaaagatgacaaagaatctaaggagaaagttgcgccgtcaganatcgtgcttaaagtgttcat

SEQ ID NO: 46833 - DNA, 266 bp, Glycine max
  unsure (1)..(266): unsure at all n locations; Clone ID: 701132923H1
cgacgaccgtcttccccaatcgcctgcntctctctctgaattgacaagcttaaagacaaagtcttaaatggctggtccaaggattgcccatgctaccttgaaaggtccgagtgtggttaaggagataataattggaataacacttggcttagctgctggtagcgtgtggaagatgcaccactggaatgaacagaggaaaaccaggaccttctacgatttactggaaaagggtgagatcagtgttgttgcagaggaacagtgaaaat

SEQ ID NO: 46834 - DNA, 265 bp, Glycine max
  unsure (1)..(265): unsure at all n locations; Clone ID: 701132926H1
ctaagggtgaggntacccaatgggtgactgtagagctagagtccccaataccatctgttgatgactgggtcggagttttttctccagcaaacttcaattcagcaacatgtcctgacactgacggcattggctgggtagaggaaccatacatatgcacagccccaataaagtacaagtatgccaactactctaaccgaaactatgcaaagaccgggaaagctattttgaagttccagttgatcaatcaacgtgcagatttctcatt

SEQ ID NO: 46835 - DNA, 262 bp, Glycine max
  unsure (1)..(262): unsure at all n locations; Clone ID: 701132927H1
tcaacttcacccattcatacgtggtgtngtnactgctgctcttttctcttttctnttctctttagttctctcttcccctnnnnnnnnnnnnnnnnnnnnnnnnngagcntgtttaagcttttcttccattaacatatnatcacaatgtgtggtattcttgctgttcttggttgttctgatgactctcgagccaaaagggtccgcgtgcttgagctctctcgcagattgaagcaccgtggccctgactggagtgggctccatc

SEQ ID NO: 46836 - DNA, 263 bp, Glycine max
  unsure (1)..(263): unsure at all n locations; Clone ID: 701132928H1
ccgaatcctttaatcgcattgcaaccatgtcgaggagaaaggtcagagagccaanggaggaaaacgtgactcttggcccagctgttagagatggcgaacatgtctttggcgtcgctcgcatatttgcctcctttaatgataccttcattcatgtcactgatctgtctgggagggaaacgcttgtccgcatcactggtggaatgaaggttaaggctgacagagatgaatcatctccttatgctgctatgcttgcagctcaggat

SEQ ID NO: 46837 - DNA, 261 bp, Glycine max
  unsure (1)..(261): unsure at all n locations; Clone ID: 701132931H1
cgtggctctgcattatcgctancggccgacaccatttcctgattgtagcatcacttattattactgaattcngcagtttcaaggtgaagcctgaagcgccatggaagcncnagcggttcaagtcttgcgatattcagctacgctgcantccnataatcccaagcttgaganaacagggaccaatggcnctcctcggaatgtttggtggattaagnaaacagntttttgnttcgtctaagttgcagagtgcaaaaccttcgg

SEQ ID NO: 46838 - DNA, 263 bp, Glycine max
  unsure (1)..(263): unsure at all n locations; Clone ID: 701132932H1
cgcgaggggaagagagactctctctcctcttcctnctacacgtttagagagngnnaaggtttaattcgccactcatcgaatggaacctcgggttgcgaacaagttccgtcttggccgcaagattggtagcggatccttcggcgagatctatctcggtacgaatactcagacaaatgaagaggttgcagttaagctcgaaaatgtcaaaactaagcatcctcaattgttgtacgaatcaaagttgtataaaatactgcaaggag

SEQ ID NO: 46839 - DNA, 272 bp, Glycine max
  Clone ID: 701132933H1
gtagtcatatgcttgtctcaaagattaagccatgcatgtgtaagtatgaactaattcagactgtgaaactggcgaatggctcattaaatcagttatagtttgtttgatggtatctgctactcggataaccgtagtaattctagagctaatacgtgcaacaaaccccgacttctggaagggatgcatttattagataaaaggtcaacacaggctctgcctgttgctttgatgattcatgataactcgtcggatcgcacggcctttgtgccggc

SEQ ID NO: 46840 - DNA, 159 bp, Glycine max
  unsure (1)..(159): unsure at all n locations; Clone ID: 701132934H1
cttctctcttcttctctccatacatacactnttanccggtgaacncgatttcattattgtaatcagatctgagagagagacagtgtttgcgattgagggaagatgctgaccaagttcgagaccaaaagtaatagagtgaagggactcagtttccacaca

SEQ ID NO: 46841 - DNA, 269 bp, Glycine max
  unsure (1)..(269): unsure at all n locations; Clone ID: 701132935H1
gccgattggncacggcggcgcagagccaagacgacggcaaggactaccaggngccggcgccggcgccactggttgacccgncggagtttacgtcatggtccttttacagagcagggatagcagagtttgtggccacttttctgtttctatacatcactgtcttaaccgtcatgggagtcgccggggctaagtctaagtgcagtaccgttgggattcaaggaatcgcttgggccttcggtggcatgatcttcgccctcgtttactgcacc

SEQ ID NO: 46842 - DNA, 267 bp, Glycine max
  Clone ID: 701132936H1
tccgggcggaagacattgtcaggtggggagtttggctggggcggcacatctgttaaaagataacgcaggtgtcctaagatgagctcaacgagaacagaaatctcgtgtggaacaaaagggtaaaagctcgtttgattctgatttccagtacgaatacgaaccgtgaaagcgtggcctatcgatcctttagtccttcggaatttgaagctagaggtgtcagaaaagttaccacagggataactggcttgtggcagccaagcgttcata

SEQ ID NO: 46843 - DNA, 265 bp, Glycine max
  unsure (1)..(265): unsure at all n locations; Clone ID: 701132937H1
ccatatacgaggtagctctgatgattgcngttctgagatgggtcttgtgcttgatcttcagagtgatgaacgacagaagaagaacagaatccgatgagaccccagccgcagaagcatgttgtcagaaggagtacaacaacactcttgtgctgacgacgttcggagagattaaggagaggctgccgcagacggaggagacatgtgcggtgtgcctgagccagctgagcgtggaggacgaggttagggagctgatgaactgctacca

SEQ ID NO: 46844 - DNA, 265 bp, Glycine max
  Clone ID: 701132938H1
ctcaaacctcattgcttcactaccaatccacccatccaaaacttgcttcgtccatcgcttgatgcgaatcatgatccattctggcttcttctctcaacaaaagcatgacttggagaatgagctagaagccaagtatgtgctaaccgatgcatctgtactattgcttaagaaccatccgatgagtgtgacacctttcttgcatgccatgcttgatccagttttgacaaatccatggaatcaattttctacttggttcaaaaatggt

SEQ ID NO: 46845 - DNA, 263 bp, Glycine max
  unsure (1)..(263): unsure at all n locations; Clone ID: 701132939H1
ttctccgttttcattcatcacaatattaaancntttagtttccttcagtatgggggacacttacgttttggccacaccgaagcgcaaccgttccgatgacgtggacggcggcgaggcgaagaagctgctgttgcagcagggcgaggcagacccggcggcggcgctggcgagcgcgcggcacgagttcggggagcacggcggggtgaacatgtcgatcgaggcgtcggcgacttcacggtgatggagccggagacgatgcggcg

SEQ ID NO: 46846 - DNA, 122 bp, Glycine max
  unsure (1)..(122): unsure at all n locations; Clone ID: 701132941H1
gttgagatctcatatatcntggctacctccatggtgnagcttatgcttttctcctgctctcatanctcttgtccttgcaagcngttgtgtctgtaacaccactgcatttncaacataaacta

SEQ ID NO: 46847 - DNA, 263 bp, Glycine max
  Clone ID: 701132942H1
ccggccacttcgccatgtccgagcaaccatgcttgccatcgggaaggccacctccgtcgacatctgccgcttcttctccaaacctggcccctacgtgtcctgcgacacgatggagtttctattagcgcgctacgacggcgagctagacgtggatgcggtggactccgaggggaggacgacgatccacgtggtggtgagggaggggcacacgagggttatccggttctgcgtcacgatggggggaaaccctaatcgcgtggatt

SEQ ID NO: 46848 - DNA, 263 bp, Glycine max
  unsure (1)..(263): unsure at all n locations; Clone ID: 701132944H1
cgctctaaccggttattcaactccgcatccaattcantgcaatgttgagaantaaaactcaccactagcttcttcaaccaccatcaacaatgaggtattattcccaattcaaacacttatcccattnccctcaaaaccctaacccnacgaccccaaaaccctaccttcgcttctgcacggatctcacagaaccttccaccgcgtccctcccacgcgcgtgactactgcagcagcggcggcgcgtcgctgtcgcagggttcgga

SEQ ID NO: 46849 - DNA, 262 bp, Glycine max
  Clone ID: 701132947H1
caggaactaaatatggctgacttgttggaatggtcaaagcaagataagaaacgaatgcttcatgtcgtctaccgtgttggtgaccttgatcgcaccatcaaattttacacagaatgtttaggaatgaagcttttgaggcaaagagatatcccagaggagaaatatgctaatgcttttcttggatttggccctgaagaatcccattttgttgttgaattaacatataattatggggttacctcgtatgacattggcgatggct

SEQ ID NO: 46850 - DNA, 267 bp, Glycine max
  Clone ID: 701132948H1
gaaacatgaaggtctcccccttagcattttcaatcctttttttgtccttcaccatagaactcttcattggcattgcttcagcagcacaagaaccagtgcttgacacctcaggccagaagctgagaacaggtgtcaagtactacattctaccagtcttcagaggcagaggtggaggcctaacagtttcaagcagtggcaacaacacatgccccctctttgtggtgcaagagaagcttgaagtctcaaagggcaccccagttaccttca

SEQ ID NO: 46851 - DNA, 268 bp, Glycine max
  unsure (1)..(268): unsure at all n locations; Clone ID: 701132949H1
gaagtggttgcngcggcgccggaggagccgcgccggaggcagggttgaagcacncaactggagagaaaatggacgttttggtgcgacaaccaatccaaacccaagcaaggcgctgcttggggaacctctcttcgcaaggtctacaccttcgacaccgttgaagagttctggtgtttgtatgatcaggtattcaagcccagcaagttgcaaatcaatgccgattttcacttgttcaagactgggattgaccctaaatgggaagatccng

SEQ ID NO: 46852 - DNA, 266 bp, Glycine max
  Clone ID: 701132950H1
cgagggtctacttaatttggatatcactctaaatttagcagaactggtaggtgaaactttcttattttgtttccacaataaagaactccacatgtttgatgtaatgggagttgcattgggagaggattttgatttattctatgtatcaataaaaaagttacatgaactagctgtagcatccaaaaaccaaaagcaaattgaaactagttcattccgtgaccaaattaccatactgccatggattaaattcattgatttaacatcaa

SEQ ID NO: 46853 - DNA, 265 bp, Glycine max
  unsure (1)..(265): unsure at all n locations; Clone ID: 701132951H1
ccgcctttaaggtcggtgtgttggggagtggaatttcaggngccgtgcgtgcttcaactcttgccaganatggggtttctgttactctctttgagtcagctagaggccctggtggacgcatgtcccaaagnagagagagaactgaagatgggacggagctgcattttgaccatggtgctccatttttctcggttagcaagtctgaagttttacatctggttcaagagtgggaatcaaggggtctcgtagctgaatggaaagagaa

SEQ ID NO: 46854 - DNA, 264 bp, Glycine max
  unsure (1)..(264): unsure at all n locations; Clone ID: 701132953H1
caacgaagaggttaaagagacggcaacactttgctgtccgccttgaccgagcagagcttcgtcttggccctcgattttgccctaaagtactctcagtcacaacagacacnnnnnnnnnnnnnnnnnnnnnnaatggcaccgaagcagaccaaggctgagaagaagatcgcttacgatgcgaantgtgcgacctaatggaggagtacggccagatcctcgttgtgaactccgataacgtgggatcgaaccagctccagaacattc

SEQ ID NO: 46855 - DNA, 262 bp, Glycine max
  unsure (1)..(262): unsure at all n locations; Clone ID: 701132955H1
cnaaagggcaacttcgcaactcgtgaatcgattactgtagaaattgtcgtcgattctatataaaacatattaggcactggctaccattttgaattctggttgagggattgaagtgtgattataggtggaggaggatggcttgtaggggatgctgggaatgccttttgaagcttttgaacttcatattgactcttgctggtctggccatggtgggctacgggatttatctgtttgttgaatacaataaagcttgggataatac

SEQ ID NO: 46856 - DNA, 255 bp, Glycine max
  unsure (1)..(255): unsure at all n locations; Clone ID: 701132957H1
ctcttnctctctcnctgctctanctactctgtttctctctctacggtagctcngcggcgangnggntatgnacgacgacnacnagatccagtcgcatncttcgncggcgagcngatcncctcngtcgtcgccgagggcnaacggtcggataacggtgacggtcgcggctccggcgccgcnaccaccgccgaacagtctggcattagcgcttccgattcagcagccggcgaagggaaacggcggaggaggaggcgg

SEQ ID NO: 46857 - DNA, 216 bp, Glycine max
  Clone ID: 701132958H1
gctgctcactgtagccatggctttcagagtaggaggagcgggagggggaaatgcctcttctggcatgggtgttgctgagcatagtgtaaacaccttcctggaattgcagaggaagaaagttcatcgctatgtgatttttaaaattgatgagaaaaagaaagaggttatcgttgaaaaaactggaggccctgctgagagctatgatgatttcactgc

SEQ ID NO: 46858 - DNA, 266 bp, Glycine max
  unsure (1)..(266): unsure at all n locations; Clone ID: 701132959H1
cagctaccatcgaaaactagccaaggctctgtctnttnccctttntccttttgcttcaacaacatgcgtcgtcacaaantctnnnnnnnnnnnnnnnnnnnnnananaaaaactgtnngcantgaagatgaagatcacngtnatnantgctgatgaacaaatcatcacgttggatgtggatccccncgaatctgtggaaaacgtcaaagcattgctcgaggttgagacaagtgtggctcttcaacaacagcagcttctgtttaatg

SEQ ID NO: 46859 - DNA, 261 bp, Glycine max
  unsure (1)..(261): unsure at all n locations; Clone ID: 701132961H1
ctccatcttcttcgatctctcaaactctatcngcgcagaaccaatcctatatcactatggggaagacacatggaatgggagctgcccgcaagctgaagtctcaccgtaggagacaaaggtgggctgacaagtcatacaaaaagtctcatcttggaaatgaatggaagaagccttttgctggttcatcccatgcaaagggtattgttcttgaaaagataggtattgaggctaagcagcccaactctgccattcgaaaatgtg

SEQ ID NO: 46860 - DNA, 209 bp, Glycine max
  unsure (1)..(209): unsure at all n locations; Clone ID: 701132962H1
cactnaanngtnattgnatgcntcggaacagccctgcatactacagtcctccgcggngaggatacggcnnnnnnnnnnnnnnnnnnnnnnnnnnnnnnnnnnnnnnnnngtccggcaggagggggttcggtcgangcaggcgcagggacagcaatgggagcctcctggttcgtaacattcccctcgattgcagaccccaggagcttcgt

SEQ ID NO: 46861 - DNA, 263 bp, Glycine max
  unsure (1)..(263): unsure at all n locations; Clone ID: 701132963H1
ccaactctcatcttctctgttccacaaccttaactttctcncattctgagaaaggtgatgaatcttctacttctaccatttcccatccttctgaactttcaaaatcgccatttcttcttctttccgtgtttagttgcactgttccgctagtggctggtttcatcattgcataatattttgaatttgacngctaaggaaagcccccatttttctgagttgtanagtggcttatatttttgagctgaaagtatatctggaatcaa

SEQ ID NO: 46862 - DNA, 267 bp, Glycine max
  unsure (1)..(267): unsure at all n locations; Clone ID: 701132964H1
gatcacagaagatgaaacgactcttacagcaagcaaagaacaacaaagtgaaatgatgnacggagacaaggacaatcatggaagcgaagatgacaactccaaagagtggttgaacctgagcataggtggaactactactttactctcaacagctgtaccaccagccactgccaaagttttttcatgcaacttctgcatgaggaagttctttagctcacaggcactaggaggccatcagaacgctcacaagagggaaaggggtgctgc

SEQ ID NO: 46863 - DNA, 265 bp, Glycine max
  unsure (1)..(265): unsure at all n locations; Clone ID: 701132965H1
tttgatgttagtggggttactgcccgtgtcaacaatgggtcgattcgtggtacngangaacagcctgagagtgacatcgccggagaaaataagagggacacacgacagtgccattggcaacttcggaatacctcaatacggtggtagcatggccgggaacgtaatttaccctaaggataacaaaaagggttgcaaagagttcgatgagttcgggatttccttcaaatcaacccccggtgctcttcccaccatgttctatcgatcg

SEQ ID NO: 46864 - DNA, 265 bp, Glycine max
  unsure (1)..(265): unsure at all n locations; Clone ID: 701132966H1
agcatattcagtgcgtcgtaaagcaaaaagatactantggctaaagtcatgtttggtttggtctgcagcttcctccgtattatgctgtttcacaatcaacactagcgccttctcaccttctggatggaccaatgcccatgccactttttatggaggtagcgatgtctcggggaccatgggaggagcttgtgggtatgggaatctgtattccacagggtacggaactgatacagcggcattaagtactgccatatttaacgatgga

SEQ ID NO: 46865 - DNA, 256 bp, Glycine max
  unsure (1)..(256): unsure at all n locations; Clone ID: 701132967H1
aaaaaaacagcatgaagaaaatccgcaactccatcctactcttatcaatcttnctggcagcctcgtcggcggtttcatccgcggagccgattccttccgccgcctacgaccgcgtgcttttcccggaccgccgatgccagaagacggtgtcggagaacaagacgcgacgaggatcctctgcggcagggcggcggggtgtgaggtgtggagcgagtcgtgttcggaggcggtgctgagcgtggcccggcgcgcggag

SEQ ID NO: 46866 - DNA, 261 bp, Glycine max
  Clone ID: 701132969H1
aacaagaggggtttgccttgtgccgtttgtgttgttttcgggacgaagaagaagatggtgtcaggttctggaatctgcgcaaagcgggtggtggtggacgcgcgccaccacatgctgggtcgtctagcctccatcgtggcgaaggagcttctgaacggccagaaagtggtggtcgttcgctgtgaagagatttgcatctcgggcgggctggtgaggcagaagatgaaatacttgaggttccttcgcaaacgcatgaacacc

SEQ ID NO: 46867 - DNA, 261 bp, Glycine max
  Clone ID: 701132970H1
gccggtcgtcgccgacactgttgcttcactctgttcctcttcgtgcgaagtactaggatcagatggctttgcgaggggtttggcaacttaacaagctgattgtcagttattgcaactggggcggaagtagcagaggtataagggcatttatggagtctcatttgccagcatttaaggagaagaatcctcattagaggtggttactgaactcatccgtggtcagcatccacatctgaagggttattacaagaacaagaatca

SEQ ID NO: 46868 - DNA, 261 bp, Glycine max
  unsure (1)..(261): unsure at all n locations; Clone ID: 701132971H1
ggaaaatcaccactgaaattggggttcatgcaaccgctgcaaagtggttcaacctctttgcaacacaacttcatcatgttcaaaaccttactgatagagtacatggaaccaagctgcatcaaggtgaagactggcatcacaacgagacagtcaaacnctggacttataccatagatggtaaggctacaacatgtctggagagtattgaatccattgatgaacagaacaaaacaatcacctacaagctcttcagtggagaca

SEQ ID NO: 46869 - DNA, 264 bp, Glycine max
  Clone ID: 701132972H1
cttcacttcacttgcatgccaaatgagaacaacctcttcttagaataatttcctcggtgtttaagccttgtcgatttccgaacaccaatccgagttaattaaacaatgagagtttcgacagaaaagttagagacagagccggagagcaaaaagataaaacgcattcgtggcggcggcggcggggactcgagcaataagcaccctttgtaccgcggcgtgcggatgcggaactgggggaaatgggtgtcggaaatccgcgagccg

SEQ ID NO: 46870 - DNA, 264 bp, Glycine max
  Clone ID: 701132973H1
caacacttttgtcttcgttccattatctagttctcaattctcttcaccctttgcctcctgaaagaaatgggtagtcttgaagcggaaagaacaacagtaggattggcagcaagagacccttcagggattctctccccatacacctacaatctaagaaacacaggccctgatgatgtttacattaaagttcactactgtggaatttgccattctgatctccaccagattaaaaatgatcttggcatgtccaactatcccatggtc

SEQ ID NO: 46871 - DNA, 260 bp, Glycine max
  Clone ID: 701132974H1
aaagcatcaaatggcatatgagaatgccaaaagttctaaaatccttaacaaaccccccagcaacgtgcacgtaaataaaacccataagtcataagccccctaatcttcacctcatctcgatttgggaagcgaaaaatcataaaaccaactaagaacagagcaagttttgcttctgcgtcgtcccctgattccggcaattgtatcccgtgaggtgtgacttgtaagctgctacagtaagaaaaggaacagaagaaacccga

SEQ ID NO: 46872 - DNA, 257 bp, Glycine max
  unsure (1)..(257): unsure at all n locations; Clone ID: 701132975H1
ggatattgaattgaaggttcctccccgccctccatgttattgctttgttgagtttgataatgctcgagatgccgaagatgcaattcggggtcgagatggatatcactttgatggttgtcggttaagantggagttgctcatggtggtagagggccatcatcaagtgatcgacgtggatatggaggaggaggtggtaatggtggagcaggcgggggtcgttttggcatctcacgccattctgaatttcgagttattgt

SEQ ID NO: 46873 - DNA, 258 bp, Glycine max
  Clone ID: 701132976H1
cgatactttctctctttctctgagtgaaactgaaaagtggaaacaaaacgtgtgactgttgcatgaattgtccaagttaagaagattgtgaaatcctcagaaatggagaggttacctttggaaatctgtatgaagatattctatctcttggactatcagcatcttgctgttgctcaacaagtatgtaggaagtggaagctcgtggcctcagagaatgctctatggtctgatctttttaaggagagatggggagaagat

SEQ ID NO: 46874 - DNA, 262 bp, Glycine max
  unsure (1)..(262): unsure at all n locations; Clone ID: 701132977H1
cttatcctttgctgaaccttgttgtgatctncncatggcagaagaacaacaangacggatcctggtggccgtggatgaaggcgaggagagcatgtatgctctctcatggtgccttaagaaccttgcttttcaaaattccaaagacacccttcttcttctctacgtcaaaccccctcgagtcacttattcagccttcgatggcacaggatatttgttttcctctgacataacggctaccatggagaggtatagccaacaagtg

SEQ ID NO: 46875 - DNA, 261 bp, Glycine max
  unsure (1)..(261): unsure at all n locations; Clone ID: 701132978H1
tcacatcttcttctcatctcacaccccactgtcaccngtattcacaaagctcaacaaaaattataacantacacnaagnagggaanagacgaatcagaagacagagatatctatcaggactgaaaaagcaatttagaaagngaaatccgaagatggaagacttagaagcaaagatatcagattcaaaaccagatgactcaagtcctctaaaactctacttgctcccttttcttgctccgggacacatgatcccacaaatta

SEQ ID NO: 46876 - DNA, 260 bp, Glycine max
  Clone ID: 701132979H1
gccttttggtgttctactctctggaggtttggactcttctttggttgcatccatcacttctacgttacttggccaacacaaaggctgctgagcagtggggatcaaagttacattcattctgtgtaggccttgagggctcaccagatttgaaggctgcaaaagaggttgctgactatctaggcactgtccaccatgagtttaccttcactgttcaggatggaatagatgccattgaagatgttatctaccatattgaaaca

SEQ ID NO: 46877 - DNA, 263 bp, Glycine max
  unsure (1)..(263): unsure at all n locations; Clone ID: 701132982H1
tctcctcctatttccctctcccatccaagttgacctntcattccactttttcgaatcccaagactcaggcctggtaaccttttgaggttgttgggtgcagaagggaacgatggctgcttcagaggagaatagtgcactgttcccaatattcattttgacgataatggccattcctattgtgccatatacaataacaaagttgtgccgtgctgccagtaaganatcaaagagcattcactgtcattgctctgagtgctcgcggt

SEQ ID NO: 46878 - DNA, 262 bp, Glycine max
  unsure (1)..(262): unsure at all n locations; Clone ID: 701132984H1
cganaagcgagctatggacacgccacactggagataaaaaacaggacccatgctatctnccactggtatcgcaatgatgacggaaagaaagtcccagctgactctctcgtattgcataaccagtattggggccgcaatggaagaaaacagaatgaggttattgatgaagtngtcaatgttaaatgaagttggagcactcgtaaatcgtaaatatggtgttttgaaaagaataaaaatgtgcctatatattgtaatgtatgta

SEQ ID NO: 46879 - DNA, 250 bp, Glycine max
  unsure (1)..(250): unsure at all n locations; Clone ID: 701132985H1
gcttcatcaccggattctcgctctcaactcagataccaactcggagtttcggactcatcgcctccgattcaaaaccctaactcggacctcaaactcaatcgatttcatacaacatggcttcngatgctgatatggaggactatggatttgagtactcagatgaggagcaagaggaacaggatgttgatattgagaatcaatattacaattcaaaaggtttggtcgaaagtgatccagaaggtgcacttgc

SEQ ID NO: 46880 - DNA, 260 bp, Glycine max
  Clone ID: 701132988H1
gaagagaaaaatggcaatctccatacccagtagacaacttttcatagatggagagtggaaagtccctcttctcaacaatcggtttccgatcatcaaccccgctactgaagacatcatagggcatattccagccgctactaaggaagatgttgaccttgcggtggatgctgctaaaagagccttttcccataacaaaggcaaagattggtcttcagctcctggctctgttcgtgctcgctatcttcgagccatcgcttcaa

SEQ ID NO: 46881 - DNA, 260 bp, Glycine max
  Clone ID: 701132989H1
cttcagcagcagcagccatggttctcaaaaccgaactatgccgattcagcggtgccaagatctacccagggaaaggcatcagatttgttcgtggtgattctcaggttttcctgtttgctaactcgaaatgtaagaggtatttccacaacaggttgaagccatcaaagctcacctggactgcaatgtacagaaagcaacacaagaaggacattgctcaagaagctgtgaagaaaagaagacgtgctgccaaaaagccttac

SEQ ID NO: 46882 - DNA, 250 bp, Glycine max
  Clone ID: 701132990H1
gactcatgggaagacatgtcctctcaactaccttctctgggacaaacaagataagagcttatgcacactgtgcaaagcaatcaaaaggaatcacagtactattgatcaacctggacagcaacacaactgttgaagctgaagtgaccttcaacaacaacgctgagagtttgaggcacagaaagatgtctagtcattcaaaaaggatggaactgcctcttgcaagtgaaacagcaagagaggagtaccatct

SEQ ID NO: 46883 - DNA, 114 bp, Glycine max
  unsure (1)..(114): unsure at all n locations; Clone ID: 701132991H1
ctccttcttactcccttgccccttctccanntcgcctattnctgttaagtcccaaaacacaaaccntaacncctaanncctaaccttagcnattacgaattcgacacaacanag

SEQ ID NO: 46884 - DNA, 260 bp, Glycine max
  unsure (1)..(260): unsure at all n locations; Clone ID: 701132992H1
cnaccatctaaggnaacagtgaaacgangagtcagaagctgagaaaccttcagaggaaactcatatcagtgaaccagttaaggaaacagagaaactagagtcagagactgagaaaccttcagtggaaactcatatcagtgaagcagctaaggaaactgtgaaactagaatcaaaagctgagaaaccttcagaggaaactcatatcaatgaaccagacaagaaaacagtgatagttgagtcagaagctaagaaaccttctg

SEQ ID NO: 46885 - DNA, 264 bp, Glycine max
  unsure (1)..(264): unsure at all n locations; Clone ID: 701132995H1
ctctgtctagaatgcctctattcnccctcctgtcggtcacacacagcgatagatagataatagagaagagaagcattcataggcgccaattgtgagtgagagagaagtttctgttttttctacttttccatttttttgggagagntagagagngagagatctgattcttcaccataactgtcattgctttgcttctctcactcagcacaagttgacaagaagggcattgccatttcaatcccatacaaaaaggcanacacccca

SEQ ID NO: 46886 - DNA, 261 bp, Glycine max
  Clone ID: 701132996H1
caaggatctaaatctgaggaacatagtttcttgtccaaaactttaggaagcaacagggttctacacatggagccacagatggacaacactttgatgccaaccggtggagttgcctcattctctacattgagatcaaataataattccatgttgcagggtgattatctgcagccttctttcttatctagtgaatatgcctcggcagaaactgtgaagcaagagggtcagtcccttcgaccgttctttgatgaatggcctaaa

SEQ ID NO: 46887 - DNA, 212 bp, Glycine max
  unsure (1)..(212): unsure at all n locations; Clone ID: 701133004H1
gccggcaatgcggctgtcaggacggtgggttccacggctgttgtcgacgtcgtcgcgngcggcggangttgtcgttgctaattgcggtnatngtaagnccgactgggaanacgatntnaggcnntcnanttcntnagtgntcataagnccgncaggcccacnganttgnnacnanttgacnacgctgntggaagggtcattaactggaatgg

SEQ ID NO: 46888 - DNA, 277 bp, Glycine max
  unsure (1)..(277): unsure at all n locations; Clone ID: 701133005H1
ttcgccaaagtgaagaaggtgctgagttctttttagagtcaaacatcccttccatatgtaaatacaggncntcgtgcacatgaaggtggttgtgcttccatgttgtttncctacaattccagtaaattgattactgggggacaagatcggttagggaaaatgtgggntgcaaatgacaggatccttaagttnctnctcctncngggctnccntgggnccagtattgggnttngcaatcaanccatgntaatnganntgtccntggngnaagcnacnc

SEQ ID NO: 46889 - DNA, 265 bp, Glycine max
  unsure (1)..(265): unsure at all n locations; Clone ID: 701133007H1
tgcaatgctcttctccttaaggtcanccaaattggttctgtgactganagtattgaagctgtcaggatgtccaaaaaagctggatggggtgtcatggcgagtcacagaagtggagagactgaggataccttcattgctgacctttctgttggtttggcaacgggtcaaattaagactggagctccatgcaggtcagagcgtcttgctaaatataaccagctcttgagaattgaggaggagcttggtgcggaacagtgtatgctgg

SEQ ID NO: 46890 - DNA, 279 bp, Glycine max
  unsure (1)..(279): unsure at all n locations; Clone ID: 701133008H1
tnanaatggccttgccagtngtcgtcgacncagagtaccncaaagnngtcgncaatgctcgcncgcnatctccgtggaatcntnncnaaacnganattgggctcctgctcctgcttcgattcgccttggcacgaatgccngnacttacggtgctaggaccaagnntggttggacctaacggttccgagccgtaacgcagggaagngtattcttcacggcgccaacaatggcttgaaggaaggctattggattcnngngagnnttgcagnnaaanntctc

SEQ ID NO: 46891 - DNA, 265 bp, Glycine max
  Clone ID: 701133009H1
tttttttcttgcttccgggagctctgaacttgaccgacgtcgttttcacatcaaaacccttcaacaaaaaaatggcgttcttcttgaaccaaactagtatcgcttcccattttcgatctcactctcagaagactgaagatttggcttcttttcctcgccgtcgattccacgtcgaaccaggggctcgtgaaaaagctctcttggcagaagatgcaactctgaaaccgttcaaatcgtacaagaagagtgtaaaaaagcttagaaa

SEQ ID NO: 46892 - DNA, 264 bp, Glycine max
  unsure (1)..(264): unsure at all n locations; Clone ID: 701133010H1
cttttcctgctganagtgngaggcgttaatctgaatgggttacatccaccatggaagaaccggtctcaggcacttattcagattcagaaccgccaccggngtggtaaaaaactccgcgagatcgcaattacgcactgcatttctctcccattcttcccctatcctcggnancaacgtggttttttttctccncnggggacaaattcntgnangaantnaccgcggaggtggnganagacaggcgcagggngcgnaacgagtttt

SEQ ID NO: 46893 - DNA, 206 bp, Glycine max
  unsure (1)..(206): unsure at all n locations; Clone ID: 701133011H1
cctntctcntccctctccttcacttgaacaattccttncttcttttcccccnncaattttntctcttcttcaattttagccctacacacaacataaactntcnacaacaaacacctaaccattcactcactcacacatttctctctcagttttagnaacagtttgatgaagtcgtcacaaaaagcaacggttttggcttaattatt

SEQ ID NO: 46894 - DNA, 262 bp, Glycine max
  Clone ID: 701133014H1
caaaaatgagagaaatcatcagcattcacataggtcaggccgggatccaggttggcaacttcctgctgggaactctactgcctggaacatggcatccagcccgatggcatgatgccaagtgactcctccttcggtgtagcccacgacgccttcaacaccttcttcagcgaaaccggatccggcaagcacgtccctcgcgccgtcttcgtcgatctcgagcccaccgtcatcgacgaatccgttgtggcacttaccgtcaact

SEQ ID NO: 46895 - DNA, 260 bp, Glycine max
  unsure (1)..(260): unsure at all n locations; Clone ID: 701133015H1
cagcagtccaaaaactgaaaagttttctgaagatggtgaaaatgactgtcttagatatggtttatcgtccatgcaaggntggcgtgcaacaatggaagatgctcatgctgcatatactgatctggatgagtccacttcattttttggtgtctatgatggtcatggaggtaagtggtgccaagttttgtgccaagtttcttcatcaacaggtgctcanaagtgagacatacttaatggngatataggaacctcccttcaga

SEQ ID NO: 46896 - DNA, 262 bp, Glycine max
  unsure (1)..(262): unsure at all n locations; Clone ID: 701133016H1
gataatccaccgggacattaaggcttcaaacattttgttaacaaaggnctntgaaccacagatatctnattttggactagcaaagtggcttccatctcaatggactcatcattcaattgcccctatagaagggacatttggacatttggccccagagtactacttgcatggagttgttgatgagaagacagatgtgtttgcctttggtgtgttctgttagaagtaatctctggcagaaaaccagtggatgggtctcaccaaa

SEQ ID NO: 46897 - DNA, 269 bp, Glycine max
  unsure (1)..(269): unsure at all n locations; Clone ID: 701133018H1
cagtagtcatatgcttgtctcaaagattaagccatgcatgtgtaagtatgaactaattcagactgtgaaactgcgaatggctcattaaatcagttatagtttgtttgatggtatctactactcggataaccgtagtanttctagagctaatacgtgcaacaaaccccgacttctggnagggatgcatttattagataaaaggtcnacacaggctctgcctgttgctttgatgattcntgataactcgtcggatcgcacggcctttgtgc

SEQ ID NO: 46898 - DNA, 258 bp, Glycine max
  unsure (1)..(258): unsure at all n locations; Clone ID: 701133019H1
atgtccctatgtaagtaccctgaggctgaaacagtacccctttatatacccttcacatctattgacatgttcacccttggaggaaagcatttttgttcttattttgctccatctctgtatatcntcacaacttccaaaggcttacttactctaatatatctctgnttcaagtggttctgtgagttttcttgtttnngtctgaggctttgagttttgtttantagatatgccagggcaanttgcagtttctgatttgtg

SEQ ID NO: 46899 - DNA, 259 bp, Glycine max
  unsure (1)..(259): unsure at all n locations; Clone ID: 701133020H1
gtttccacactgcataccttangtcttccgaattcgaagtnaatttgcaaganngctaaggaaaaggctcagatccaacattgtggtggttggtcatgtggaccctgaggaggcaaccaccattaacgagctgaagaagcctgttgtggagaaagaagctccagggcatgccatatgagggcatgcacgtacggcctcggaggggaaccagaaattatgttnancaaaatatctggaacctaatgtatcntgtcanccc

SEQ ID NO: 46900 - DNA, 249 bp, Glycine max
  unsure (1)..(249): unsure at all n locations; Clone ID: 701133022H1
caaagtatttgtnttccgagcaaacnagcattcnccacttatnnttctattccttacttagtnctaatccannttaatttgagtttgtaaccccgtggccttatccaattgatatttttgagttttgtattacttcnacttgatttgagatgntgagtctgctacatcttcaatctcagccttcgctcgtcgcaatgggaaccgcagcagcaaaaggggaagatgtggtggtgaaggtgccccctggaa

SEQ ID NO: 46901 - DNA, 268 bp, Glycine max
  unsure (1)..(268): unsure at all n locations; Clone ID: 701133025H1
caatgaggcctgctcttgctttgcttcctcttctatttgctttctngancagctgccactacggantcaagaaaagatcacngggcatattggnaaatgatcatgaangntcnggaaatgccagaaggacttcaaggtcttgtttcntttcaatctgaanataaccctaagnctcaagagcagnttggtaaaggttccaaaaaccattgtnaagagtctctagttacnnntacacaagttaacagtgacttcgaancccataccaggt

SEQ ID NO: 46902 - DNA, 263 bp, Glycine max
  unsure (1)..(263): unsure at all n locations; Clone ID: 701133026H1
cgcaactatttcaaggagggctctgctccactcaacttgtacgtncgaggaaaactttgaccgtgcttctagccgcggcactggaaacgttaaaaccatttccaattatgcaccggtcttgatggcacaaattcaagccaagaaaagaggattttcggatgtgctataccttgattcagacaccaagaaaaatctcgaggaggtctcttcttgtaacatttttattgccaagggcaaatgcatctcaacacctgctatantgg

SEQ ID NO: 46903 - DNA, 263 bp, Glycine max
  unsure (1)..(263): unsure at all n locations; Clone ID: 701133027H1
gttcctattagcatgggcatcttcaaagttttagaaagtcctttagatataactactactacaatanttagaaggattgtttcaaatcatgaggcataccagaaccgaaataagaagaagggtgaaagtgagacaagatactacgagggcnagagtcatgtgtctgaagaataattcatgtctgtcgtttggagcacngacataggaggataccaagctttttctcttttttgagaaatgagtnttggttcaacttggtgccc

SEQ ID NO: 46904 - DNA, 262 bp, Glycine max
  unsure (1)..(262): unsure at all n locations; Clone ID: 701133028H1
ggtgacagtgaggccatttttggtgctcttaatctgaacccgnaactcttctgtaacgaagttctcaacattgtcgacgatgtgctcgacgaagctttcaatttcttctaccaggacgcatccacgaagctcaacatcgaaggcacccaaaggtcccaggatctnaaaaagggtgttgattgcgttcggctgaatgttcnatctgttttggacaaacnacttgctgcttgggagagttncatcctccgtcatgttttgctct

SEQ ID NO: 46905 - DNA, 225 bp, Glycine max
  unsure (1)..(225): unsure at all n locations; Clone ID: 701133030H1
ttctatctctctcttcaattccaaaaccctacccccatccaattccaattcaccctcaatcatgggttctgaaggttccactgtcgtcgttcctaggaacttcagattattggaagagcttgagagaggtgagaagggaattggagatggaactgttagctatggaatggatgatgctgatgatatctacntgcagtcctggactgggactattattggcccccc

SEQ ID NO: 46906 - DNA, 258 bp, Glycine max
  unsure (1)..(258): unsure at all n locations; Clone ID: 701133032H1
ggggcntnttccccgggcgtcgaacagtcaacttcagaactggtacggacaaggggaatccgactgtttaattaaaacaaagccccgatgagtaggagggcgcggcggtcgctgcaaaacccagggcgcgagccggngcggaacggtcgtcggtgcagatcttggtggtagtagcaaatattcaaatgagnactttgaangccgaaaagggnaaggttcctgttaacggccttgcacatgggtantcgtcctaangga

SEQ ID NO: 46907 - DNA, 271 bp, Glycine max
  unsure (1)..(271): unsure at all n locations; Clone ID: 701133033H1
cctgagaccaacaccggtatcattgtcttggctgagggtcgattgatgaacttgggatgcgccactggacaccccagttttgtgatgtcctgctccttcaccaaccaggtcattgctcagcttgagttgtggaaggagaagagtaccggcaagtacganccgaaggtttacgttttgcccaagcaccttgatgagaangtggctgcacttccncctgggcaaacttggagctaagctgacccagcttagcaagtcccaggntnagnacagt

SEQ ID NO: 46908 - DNA, 243 bp, Glycine max
  unsure (1)..(243): unsure at all n locations; Clone ID: 701133034H1
gtcatatganccaaaattantattanaancttnggtctgaanaaatcncccncganaagngngttcaacatgcaaaaccnggnttttgaacttaaactcaacagtgtcatacttgaaangntgtaagntgcagagacaggctgatcaccagnggccatgggacatagaaaangncctggcttattttaanccaaaangttttggcaagaagngngcaccaggggggnttttnccccctncggg

SEQ ID NO: 46909 - DNA, 108 bp, Glycine max
  unsure (1)..(108): unsure at all n locations; Clone ID: 701133037H1
ttaatnataaaaaatcgttcttgacttccntcttntgcttnccatcgtccatggcggtttcggggttgagaagcggtggtttgcctctgcttccagcagcaacatacg

SEQ ID NO: 46910 - DNA, 267 bp, Glycine max
  unsure (1)..(267): unsure at all n locations; Clone ID: 701133038H1
ctctctcgatcaatcatggctttgcccaatcagcaaaccgtcgattaccctagtttcaaactcgtgcatcgtncggtgacggtggtacaggaaagacaacgttcgtgaaaaggcatcttaccggtgaatttgagaagaaatacgaaccgaccattggagtggaggttcacccattggatttcttcacaaactgtggaaagattcgcttctactgttgggatactgccggacaagagaagtttggtggcctcagggatggatattata

SEQ ID NO: 46911 - DNA, 263 bp, Glycine max
  unsure (1)..(263): unsure at all n locations; Clone ID: 701133041H1
ctcgcgccgttgaaaagttggacaagaagcattttgcnaagggtgcncgtggtgtagaaaacnatggggttgctgcagtttcacaagaagatggaaattctaaagaaattgcattgatggaagccaaaatgacaaaactttgtgatttgttagaggagacaattgctcgaacaaaagacaatgttgtaaagaagcaagccctaacatatgaggaaatggnagcagagcgcgaggaggaagagacacaagaggacatgaaagcg

SEQ ID NO: 46912 - DNA, 259 bp, Glycine max
  unsure (1)..(259): unsure at all n locations; Clone ID: 701133042H1
ttagttttaccctcgatgactcagagactgtgtctgcaaatggttcagttgataaggtgaaggaaactgcagntgaggtttcacgcaagattgagggttttcaaattgcagatgaggggaaatctaaagaaaaggatgaggctgtggaggaatcaagctaatatagtctcgcnttttgtctggcagagtgtnnganttacctngtccaangccnaacacccngtacgtggttagtaaagtaaattnggnaattttgttt

SEQ ID NO: 46913 - DNA, 257 bp, Glycine max
  Clone ID: 701133043H1
ggcactttgtttcccatgtgtggaatgaacttggcctttgatcgtgatctcataggagcagcaatgtactttggtctcatgggtgatggtcagcctattggacgctacgacgacatgtgggctggctggtgctgcaaggtaatctgtgatcacttgggattgggaatcaagactggtctgccctatatctatcacagcaaggccagcaacccatttgtgaacttgaagaaagagtacaaaggcatattctggcaaga

SEQ ID NO: 46914 - DNA, 261 bp, Glycine max
  Clone ID: 701133045H1
gcttaaccgagcttcgcaaagatgaatcgggaaaagttaatgaagatggccggttcggttagaactggaggaaagggtactgtgagaagaaagaagaaggctgtccacaagacaacaaccacagatgacaaaaggcttcagagcaccctgaagagaataggggtgaatgccatccctgctattgaagaggtcaatatctttaaggatgacgtagttatccagtttctaaatcccaaagttcaagcatccattgctgctaat

SEQ ID NO: 46915 - DNA, 261 bp, Glycine max
  unsure (1)..(261): unsure at all n locations; Clone ID: 701133046H1
cttctcttcaaacactcttcnatattcctagtnctttgtcagagancttgaaataaacaacaatgggccaattccatgagctttttcctgcttctttcttttctagcttntgctcccttgtgcctctgtcactataaccaagagggttacctctaccctcagttttatgactattcatgcccacaagctcaacatnttgtcaagtctgtcctgctaagtatgttgcngagcaacctcgattggcggcttcgattcccaggt

SEQ ID NO: 46916 - DNA, 264 bp, Glycine max
  unsure (1)..(264): unsure at all n locations; Clone ID: 701133047H1
aaaggccaaaaacatgatcancnaggaacccacaacaacccactttggtttgtggtgttcttgtttccctcntaggctccttttggtgaacttcagagtgcaaagttggttggttggtggnttggtgtggntgcttcattttcnaggtgcatttnggttnctcnctttttgggcatggctggtggacggagncaacagaggcacaacaaatnatggcatctcccccatnncattgcnggaatngaaaggtttgcatnccagggg

SEQ ID NO: 46917 - DNA, 233 bp, Glycine max
  unsure (1)..(233): unsure at all n locations; Clone ID: 701133049H1
tgctcaagtcatctgtcaatcactcaaagaaattcaagattgatccattctactagcaagattgtccaaattctgaaattcagaatataactactgagatggtgaagacaccagaggtctcaagatggatggtcaagtctcctacatagcccttgtgatgcagcagaacaggcactaggntcagtgagcacactatatncaggatatagctactncnctttnntggcntcngt

SEQ ID NO: 46918 - DNA, 265 bp, Glycine max
  unsure (1)..(265): unsure at all n locations; Clone ID: 701133050H1
actcccttctcatcgttggcaagatgagtgccatgaaattttgccgtgaatgcaataacattctgtaccctaaggaagacagagaccagaaagttcnnctcttcgcttgccgcaactgcgaccatcaggaggttgctgataacttctgtgtgtataggaatgagatacatcactctgttggagagcgcactcaggtgttgcaggatgtcgctgcagatccaacgcttcctcgaaccaagtctgttcgtgcagtcaatgcaatcat

SEQ ID NO: 46919 - DNA, 100 bp, Glycine max
  unsure (1)..(100): unsure at all n locations; Clone ID: 701133051H1
caagaccttgagttgtttgtcaaanntatgccaggtttanantgcttacgctgngaatccncaagntgctgcagantcctcttattccacttttggaggg

SEQ ID NO: 46920 - DNA, 264 bp, Glycine max
  unsure (1)..(264): unsure at all n locations; Clone ID: 701133052H1
cgaatatcttgttgtttggagcgatccgagaaaaactctgtaaacatgttggtttaccaggacctccttacaggtgatgagcttctctctgactccttccgttacaaggaaattgagaatggaatgctgtgggaagttgaggggaagtgggttgtnaaaggagcagttgatgtagacattggtgcaaacccttctgctgagggtggaggagaagatgagggagttgatgatgcagctgttaagttgttgacatgttnncacatt

SEQ ID NO: 46921 - DNA, 263 bp, Glycine max
  Clone ID: 701133054H1
taacgcctttgtttgcgttttttgcacagaagaattaacacgtatatagcaagcatggcagtcacactctacgaccttagctctgcctctgggttgaagaagcttgatgagtaccttctcccacgcagctacatcaccgggtaccaagctacaaaggatgatcttactgtttatgcagctttgccaactgctccatcagatgaatatggaaatgtttccaggtggtacaagcacattgatgctttgttgagaatctctggtgt

SEQ ID NO: 46922 - DNA, 254 bp, Glycine max
  unsure (1)..(254): unsure at all n locations; Clone ID: 701133056H1
ctttctgcncaaaagggtcanancgannnaaggggactatnggnnngttatgcagaagaactgtgtanncntatnaacagcatcantagtgttganagggatcgttgaccaaggccttagggttcatagggcagtgcagtcgatgcacttanttttgnagcnanccaaaatgtncatcnagttnattagtgtaacnaggctgatngtggganagganaaattggaaagagtataantttaagagggnagataac

SEQ ID NO: 46923 - DNA, 258 bp, Glycine max
  unsure (1)..(258): unsure at all n locations; Clone ID: 701133057H1
agccttctctcctctattttgggcttccaacctttttgctccattcattctcaacaacaaaccaatctctatattttgcttagacaatgagggggagcttgtggcaacttgggcaatcgatcactcgccgtcttgcccatggagataagaaggctgttgctcgccgatgttttgcctcagaagctgagctgaaaaagacagtgttcatgattccatgttgctcaggtgtgngaagatggcnccattgcnggatggagc

SEQ ID NO: 46924 - DNA, 257 bp, Glycine max
  Clone ID: 701133058H1
aaccatatttttcttgaaagatgatggaactttgacaccattggccattgagttaagtaagccacatcctcagggtgaagaatatggtcctgttagcgaagtctacgtgcctgccagcgaaggagtggaagcttatatttggttactggcaaaggctatgttgttgtgaatgatgcatgctaccatcaaatcattagccattggtaccatattatgaattggaaattagatccatgcaattaaatttgataatgtat

SEQ ID NO: 46925 - DNA, 257 bp, Glycine max
  unsure (1)..(257): unsure at all n locations; Clone ID: 701133059H1
cggcatgttcatgtttttggttagcagagtaactaaggattcaatttcacgcaaccgcaatgntgntgcttctttncgcttctctaggtgtgctcattcattatcatttgccacagtagaagcagaagagatatcaggttctaggcctgctgaagttttgaacctggtgcaaggtaaatnggtaggatcttcaaattggaacacaattgcagntcctttaaatggtgactcattattaaagttgctgaagttgatga

SEQ ID NO: 46926 - DNA, 263 bp, Glycine max
  Clone ID: 701133060H1
caagatgtcgtctctgatagcagaagatgtgaagagcagatcagaggtgtaccacggggacgaaatgtgccaagtgaagtccaaggagcttctcaaggaaatcgccctccccaacggccttcttcccctcaaggacatggaggagtgcggctacgacagacaaaccggcttcgtctggctcaaacaaaagaagagttacacccacaagttcgacaagatcggaaagcttgtctcctacgcgcccgaggtaactgctcatgtcc

SEQ ID NO: 46927 - DNA, 258 bp, Glycine max
  Clone ID: 701133061H1
acaactctcaggttccacttgatggcttcatgattcaatttaacaagaacacatttggtcttgcagctgctggaccccttcaggtttcacagttgcaacccagaatgtcagctaggacactcctccctatggttatgttccagaatatgtcgcaaggtcctcctagctcagctttacaggtcgctgtgaaaaacaatcaacaacctgtgtggtatttcagtgataaaatctcattacttgtattcttcaccgaggatg

SEQ ID NO: 46928 - DNA, 250 bp, Glycine max
  unsure (1)..(250): unsure at all n locations; Clone ID: 701133062H1
aagacatccttctagagatggatcgcatcctaaggcctgaaggangcaatcatcatccgggatgaagttgatgttcttaaccaggttaagaaaattgttgggggcatgagatgggatgccaaactggtggatcatgaggatggccctcttgtgcctgagaagatattggttgctctcaaagtgtattgggttggcaccagcaaaaacaaaacatccaatgaggaatacaaccactattgttcgggtgtga

SEQ ID NO: 46929 - DNA, 260 bp, Glycine max
  unsure (1)..(260): unsure at all n locations; Clone ID: 701133063H1
ggccatgaagaaggccaacaaggatgtggaactttatgttancaaagggatgacacatagtttttatctgaataagattgctgtggatatggaccccaatgttagtgctcaaaccgatgctctcatttctaggatcaaggagttcattgagaagcactgaatggatcggttatccggagttgctatagtattcagagaagcttaattaagggttttgatatatatagtttatttgttgcactaataattaatcgagtttg

SEQ ID NO: 46930 - DNA, 147 bp, Glycine max
  unsure (1)..(147): unsure at all n locations; Clone ID: 701133065H1
gcttagtgggtcgatattaattgaagatcatggctganggaaaancngcaactcaaaaatntcttcaggattttgatcctccaaaagacacccagaaggaacaagtatgcnttcgcctgtgccattttggctccatgacttccatat

SEQ ID NO: 46931 - DNA, 54 bp, Glycine max
  unsure (1)..(54): unsure at all n locations; Clone ID: 701133066H1
ggccactgacgaccaagctctcgaganagccttcttctcagtacggcgaaatcc

SEQ ID NO: 46932 - DNA, 264 bp, Glycine max
  unsure (1)..(264): unsure at all n locations; Clone ID: 701133067H1
tcgnctgnnagatacanataaagatccagccctacgacctgctgaagttgataagttatccttgtactgccaccagaaagtccatgggatgatgctctatataaggatgctgctgagagaactaacatgggttacatatctcttaatggattcctggcgcagtgggtccttatgacattacttgatccaccatgtagcctggctaattngatttacattggatatagtggtaatccagctgctgctcttcgtgttacccgtaga

SEQ ID NO: 46933 - DNA, 261 bp, Glycine max
  unsure (1)..(261): unsure at all n locations; Clone ID: 701133070H1
ctaaaactagaacccctcttcaagcgatccatcacttatgtggaaaaagatgattcagatttgggagaccaagctgctgcttttggagatgcacatgagtttggagatatactgtggtacccaagtcaacgcaaggttctctatcgtgttgatgatcgtgtcccaactaatacatcgggaaatggtctttacgacattatttctttccgtcccantcctcaaatacgtcggctttcataagaaccngagaggatattcnag

SEQ ID NO: 46934 - DNA, 262 bp, Glycine max
  unsure (1)..(262): unsure at all n locations; Clone ID: 701133071H1
ctggaagggatgcatttattagataaaaggtcaacncaggctctgcctgttgctttgatgattcatgactttcgtttctgatgcaatgaaactgttggctacaagtggagatgggacactgtctgtttgcaatcttcgaagaaataaagtgcaagctcagtctgaattttctgaagatgagctattgtctgtggttttaatgaagaatggtaggaaagttgtatgcggatcacaaactggagtcattctattgtattcatgg

SEQ ID NO: 46935 - DNA, 260 bp, Glycine max
  unsure (1)..(260): unsure at all n locations; Clone ID: 701133072H1
ggcagggaagaataagagggatgtacaaagaacgagagcgagttggtgtttctgtttccgcttccaaatcggaggatcggaagcgaatcaacgacgttctcgataagcacttggaacgatcctctccttccacttctcgccccatcacctccgcctccaagaattccaacctccaagtggaggaatctgaaacggagagtgaacngtctgatgttagtggctctgatggggatgacacctcttggatctcgtggttctgt

SEQ ID NO: 46936 - DNA, 256 bp, Glycine max
  unsure (1)..(256): unsure at all n locations; Clone ID: 701133074H1
ctctctgcgccttcaaactacaaagaatggcggcgttgttccacttctctcttcttttcacagttctcctttcttccattctcttatcgaatcactcagtaaaatgcgacgaccatgatgaggaagatgatctttatcagggaatcaacaagtatagggaatcattaaacttgacatctctaacaaagaatgaaaatgcgaattgctttgctgatgaatggggnccnntnnnaaaccccccttngnggnaccccgg

SEQ ID NO: 46937 - DNA, 258 bp, Glycine max
  unsure (1)..(258): unsure at all n locations; Clone ID: 701133075H1
taccgtgtttgttcatgtgcttttgagttgtgtgtgtcagcattagatccaannnnnnnnnnnnnnnnnnnnnnaattcaaccctaactagccccaaacccatcgctctctcccgattcccctccctttcataattgatgcacctcgatctcctcactcactcgccaaatttccacaattctaaaagcaaaaacatcactctctgctccaaatcttcctccgccatcactgatttgaatcagtttcgccaagaaaggt

SEQ ID NO: 46938 - DNA, 261 bp, Glycine max
  unsure (1)..(261): unsure at all n locations; Clone ID: 701133076H1
gggngacagtgaggccatttttggtgntcttaatctgaacccgcaactcttctgtaacgaagtctcaacattgtcgacgatgtgctcgacgaagctttcaatttctctaccaggacgcatccacgaagctcaacatcgaaggcacccaaaggtcccaggntctgaaaaanggtgttgattgcgttcggctgaatgttcaatctgntttngacaaacaacttgctgcntggganagttacatcctccgtcatgntttgctct

SEQ ID NO: 46939 - DNA, 257 bp, Glycine max
  unsure (1)..(257): unsure at all n locations; Clone ID: 701133078H1
gataaaagttctgccaaatcaagaggggttttaagatcatagtgtgtgttttgcaacaatggctaagttctttgctgctatgatcttggcactctttgccatttccatacttcaaacagtggtaatggctgctaatgaacaaggaggccacttgtatgacaacaagagcaaatatggaagtggangtgtcaagagttaccaatgcccatcacaatgctcgaggagatgtagccagacccaataccacaagccctgca

SEQ ID NO: 46940 - DNA, 258 bp, Glycine max
  unsure (1)..(258): unsure at all n locations; Clone ID: 701133079H1
gctccccgtggtgaaatactgttccgagaacaacaagcgccttatccatttctccacttgcgaagtgtacgggaaaacgattggagcctttctccctaaagatagtcctcttcgcaaggatccggcatactatgttcttaaagaagacgaatctccttgcatttttggttctatcgagaagcagaggtggtcttatgcatgtgcaaaacagttgattgagaggntgattttngcctgagggtgctgaaaatggttgga

SEQ ID NO: 46941 - DNA, 263 bp, Glycine max
  unsure (1)..(263): unsure at all n locations; Clone ID: 701133080H1
ggagtctcctacgcgcgcatgcctcgtgtcaaaatccgcgagcncncaggacgactacgcnaagntncgagtcccgcgataccgacgcgagtntagncnacgcgctgcggcgctggatgntcgcggnggtgccgacggtcgcnatcgaccnccgtggagntcgangtcaactcgtcggtgctcaacgacgagttcatcgcgcacaggctcggnctnattcccntcacgagcgancgcgccatgtccatgcgcttctcacgncc

SEQ ID NO: 46942 - DNA, 267 bp, Glycine max
  unsure (1)..(267): unsure at all n locations; Clone ID: 701133081H1
cggcaccgccctcgccgccacaatgtaccaagccaccggcaccgcccccggatccgccggcttcgtcaacatcaccgacctccacggcggaaaagtcgcattcgcccctgaaaacaacgacggcacactctcctcaacgttcgtcaaatcggtggaagaaatcccttacaacatctccgtaattcagatcagtaaggttctcccctctgccgcagcggaagcccctgcacccgcctcanacaacaaactctcacgaacattatgtca

SEQ ID NO: 46943 - DNA, 260 bp, Glycine max
  unsure (1)..(260): unsure at all n locations; Clone ID: 701133082H1
aaataaaggtccctttctcttcattctgctaaccaggatgtggtcaaacatttttttagggaggaaaaatttgatagtaaaatgagaatgctattcatatatactagcttttagcaattgccatatattctgtgggattgcatgcagttgtcatgtatttctctttaaactttattatganccgagcttggacatgtcacgagattcgtttcaaaaaaaaaaaacnagngacanacncgnnnnnggaaacnnnncanncc

SEQ ID NO: 46944 - DNA, 265 bp, Glycine max
  unsure (1)..(265): unsure at all n locations; Clone ID: 701133083H1
caagtatactaaatgtcttagtcttaagangggggaaaaactggaattccaatgattcttaatttcttacaatccaatctgcaaactgagtgagatatataacttgtttttgatttcttcctcatcattttgcatatacaaagattaaaatggaagggttttttggaaattgcttcaatatgattttgcctgatgttgtgcttcaccaacttgagcatagcttttgctccaagtcatatggaatggatttggagagcagccntgg

SEQ ID NO: 46945 - DNA, 259 bp, Glycine max
  Clone ID: 701133084H1
gctattcttcgtggccatattgatttcgcatcagatccttggccttccatatcgagtagtgccaaagatctggttaagaagatgttacgagctgaccccaaacaaagactctcagcagttgaagttcttaatcatcctggatgagagaagatggagcatctgataaacctctagatgttgctgttttatccagaatgaaacaatttagggcatgaacaagctaaagaaagttgcctgaaggttattgctgaaaaccttc

SEQ ID NO: 46946 - DNA, 261 bp, Glycine max
  Clone ID: 701133085H1
ctcatgatgttgcacatgggcaaatgctggttaaggaggtttatgaggctctaagagcaagtcctcagtggaatgaaacacttttcatcattacatatgatgaacatggtggattttttgatcatgtgaagaccccttttgtcaacattcctaatccagatgggaacactggacctgctccctatttcttcaagtttgataggttaggggttcgggtgccaactattatggtctctccttggatcaagaaagggactgtga

SEQ ID NO: 46947 - DNA, 260 bp, Glycine max
  Clone ID: 701133086H1
agctagtttatcgtgaggagaatatgaagttgtttgttttctttgttgctgcagtagttttggtagcatggccatgccatggcgcaggctaccaaaggttccctctccgaatgaaaactggctatggtgagcgttcttcggaggtaaaatgcgcaagttttaggcttgctgtggaagcacacaacatccgagccttaaaaccattcctgaagacctgcgttgaaccaacaaaggactacattaatggcgaacaatttagg

SEQ ID NO: 46948 - DNA, 251 bp, Glycine max
  unsure (1)..(251): unsure at all n locations; Clone ID: 701133087H1
attccctgtggctactagttagagtgtgtctggttggtgagatttggcttgtgtgnngagttctgncccaccgattttgatggagctgaaatcgttctcttcttgttctgtgtccacatctgaggttgcccatgttggaagatcctactccactttgatctccagttncagacacaaagttggagttagattttctacccacttccagtgtcgcagagggttgtttctgacgacttattgtgcctcggata

SEQ ID NO: 46949 - DNA, 259 bp, Glycine max
  unsure (1)..(259): unsure at all n locations; Clone ID: 701133088H1
aattgagcttattgatgaagccattcgttgcttganatcattgaaactcaaggccatagaacttggacttgatgctactatataagtnttggataattggaaatcagcataattttatcacttatttagtacgttatctttgtgnttttgggttgtagaataaacataggcctgaagggtgttgtggtagtggtgagtgtgaatgaatgtgaaatgaatcccctgaagccctcaattattaagttggaagaagatagag

SEQ ID NO: 46950 - DNA, 252 bp, Glycine max
  unsure (1)..(252): unsure at all n locations; Clone ID: 701133089H1
ggagccgtggtggcggtggtgccggtgccggtgccggtagaggggtggtggtgaaggcggagaaagtctgtaattattggattcaggggaattgtagttatggagagaggtgcaagttccttcacacttggagtgtgggggatgggttttctttgctgacccagcttgaagggcatcaaanggctgtnagtgcaattgcctttccctctggttcagataagctgtataccggaancntttgcnccaggnttt

SEQ ID NO: 46951 - DNA, 255 bp, Glycine max
  Clone ID: 701133093H1
gtagtcatatgcttgtctcaaagattaagccatgcatgtgtaagtatgaactaattcagactgtgaaactgcgaatggctcattaaatcagttatagtttgtttgatggtatctgctactcggataaccgtagtaattctagagctaatacgtgcaacaaaccccgacttctggaagggatgcatttattagataaaaggtcaacacaggctctgcctgttgctttgatgattcatgataactcgtcggatcgca

SEQ ID NO: 46952 - DNA, 247 bp, Glycine max
  unsure (1)..(247): unsure at all n locations; Clone ID: 701133094H1
gaattagttatcttgaganacattattcccattgctatatnnttatggctagnctgaaggttacatgggtggttgtgatcatgtgcatggccgtggtgggtgcaccgatgatggcgcaagccatgacatgcaatgatgtgacggtgaacatggcacagtgcctatcctacctgatgcagggaggaacaccttcaacactttgctgcagcggagtcaagaacattcttggctctgctgtcaccaccgt

SEQ ID NO: 46953 - DNA, 251 bp, Glycine max
  unsure (1)..(251): unsure at all n locations; Clone ID: 701133095H1
cgaggagaaagatggaggggaaggagcaggatgtgtcgttgggagcgaacaagttccccgagagacagccgattgggacggcggcgcagagccaagacgacggcaaggactaccaggagccggcgccggcgccgctggttgacccgacggagtttacgtcatggtcgttttacanagcagggatagcagagtttgtggccattttctgtttctctacatcaccgtcttaaccgttattggagtncgccggg

SEQ ID NO: 46954 - DNA, 249 bp, Glycine max
  unsure (1)..(249): unsure at all n locations; Clone ID: 701133096H1
gaagcagaaagaggagacgaagcaatggcgccgaagaagccccgaaccacgtncgaggaaccctgatttggtcaggggaattggcaaatattcgangtcgcagatgtaccacaagaggggcatctgggccatcaaggccaaaaacggcggtgttttgcccctccacgntcccaagcccaantcccaggccccggcccagaanccgnccaattctanccggncgatgacgtgaagaagccctcgtcaaca

SEQ ID NO: 46955 - DNA, 276 bp, Glycine max
  unsure (1)..(276): unsure at all n locations; Clone ID: 701133102H1
cggggaggtagtgacaataaataacaataccgggctcattnagtctggtaattggaatgagtacaatctaaatccctnaacgaggatccattggagggcaagtctggtgccagcagccgcggtaattccagctcacatagcgcanatttnagttgttgnagttaaaaagctcgtagttngaccttgggttgggtcgatcggtccgcctccggtgtnncaccggtcggctcgtccctgctgcctgcgatgngntncctgtccttaactggnngggtc

SEQ ID NO: 46956 - DNA, 106 bp, Glycine max
  unsure (1)..(106): unsure at all n locations; Clone ID: 701133105H1
ctccctggagagagctcgtncgcggcggttgcagaagaagattgcaagatgaagttcaacatcgcgaatcccagcactggatgccagaagaagcttcgagatcgat

SEQ ID NO: 46957 - DNA, 275 bp, Glycine max
  unsure (1)..(275): unsure at all n locations; Clone ID: 701133106H1
agggaactaaacagaaacctcaaagagatttgagccagtcaataggtaagataattgagcttattgaagggattagcatgcctgctgaggatnatgataattcagattccttgtacagaagagatggaaatatccgtacacataagaatcaaggaatgccaacaggctacatggtccntgttttccagtggaaaacatctgaactcagtaatgtcttgcagcaatttctccatgtgtgttacgatttactcaatgacaaggctgatcatgaaaac

SEQ ID NO: 46958 - DNA, 273 bp, Glycine max
  Clone ID: 701133107H1
gctacttcctactccaaccgcacttctgctccgcaattatcatgggcaaggtcaagatcggaatcaacggatttggaagaattggccgtttggtagccagagtggctctgcagagagacgatgttgaactcgttgccgttaacgaccctttcatcaccaccgattacatgacatacatgtttaaatacgacagtgttcatggacactggaagcatcacgatgtcaccgttaaggacgagaagacccttctcttcggtgacaagccagtcacta

SEQ ID NO: 46959 - DNA, 273 bp, Glycine max
  Clone ID: 701133108H1
ggaaggcgagggattgcgctgcgtctcttcctcttctctttcgattcatccctcattcataatcttccaatccaacaacctcagcctcacactcacacatacacacatctgaacgcgtatcgtccctcccatggcttcaaagcgcatcctcaaggagctcaaggacttgcagaaagacccaccaacttcttgcagcgctggtccagtagctgaggacatgttccattggcaagcaacgattatgggtcctgctgatagtccttatgctggagg

SEQ ID NO: 46960 - DNA, 273 bp, Glycine max
  Clone ID: 701133109H1
ggtctttatatttagttattgacatcaacaaagtcatggaggaagttaatgtggttcaaaccaagaatggaactgtttcagtagcttctgcgtttgctggccataaggaagctatacagcaaagggaccacaaatttttaagaattgctgttgaagaagcgtataaaggggtagactgtgaagatgggggtccctttggtgctattatagtttgtaatgatgaaattgttgctagatgtcacaacatggttctgaggaacacagaccccctgc

SEQ ID NO: 46961 - DNA, 273 bp, Glycine max
  unsure (1)..(273): unsure at all n locations; Clone ID: 701133110H1
aaaaatccgcgattngctcttctcttggaaaagtnaaaaccagaagtacgaacgaaagagaagagcgatttagaagtgagagaagatggggttgtcgttcacgaagctgttcagcaggttgtttgcgaagaagganatgagnnntctgatggtaggtctcgatgctgctggtaagacaaccatcttgtacaagctcaagcttggagaaatcgtcaccactatccccaccatcggatttaatgttgagactgtggagtacaagaacatcagctt

SEQ ID NO: 46962 - DNA, 76 bp, Glycine max
  unsure (1)..(76): unsure at all n locations; Clone ID: 701133112H1
gttctcgtgtcaatttctaaatccaccannacaccctctgnttctattctntattantatnatctgncanacccnt

SEQ ID NO: 46963 - DNA, 270 bp, Glycine max
  unsure (1)..(270): unsure at all n locations; Clone ID: 701133113H1
ctttggttgagtctctggtgactgactttgaaggtttgaacgganagttctggactagtgcaaggaggtccattttgtctgctggttgggtcagatcctcatatgggaatgttactaccagttttgtccaagattttgttttcaacaattcaatggtgatgggaaagaatgggaatcagcaaattgtgaatcaagtgattctttcaatgacagtgttcatgctaaccttccatcaccctttgttgaggacacatacagaaaattttcccc

SEQ ID NO: 46964 - DNA, 264 bp, Glycine max
  Clone ID: 701133115H1
gcattattttctttccagatccaactcaaaattgcaatgggagtagaagatacagatatttgtatcatcaaggagccagatcatgttgtagtctattcagatggcatttcccatgattcaggtcatgaagctggaagtgatcatcacaatattacagagtcttatgaacaaatcaatgagactactgaacatcatagttcagaggagagtgcaaaggaatatgaggtgaaggaatgtacaacagaaatttctgttaaggtctct

SEQ ID NO: 46965 - DNA, 272 bp, Glycine max
  unsure (1)..(272): unsure at all n locations; Clone ID: 701133117H1
ccgtgttttcccaccaccgncgacccctttcgctctccctctgcgcaaacatgttgttcttctcgtacttcaaggatttggtggggagggaagtaatcgtggagctgaagaacgatttggccatcaaagggacgttgcattctgttgatcagtacctcaacatcaagctcgaaaacactagcgtcgtcaatcaagaaaagtaccctcacatgctttnactaaggaactgcttcatcagaggttcggtagtgagatatgtgcatngcctccag

SEQ ID NO: 46966 - DNA, 276 bp, Glycine max
  unsure (1)..(276): unsure at all n locations; Clone ID: 701133118H1
agggattcnctccccatacacctacaatntaagaaacacaggccctncatgatntttacattaaagttcactactgtggaatttgccattctgatctccaccagattaaaaatgntcttggcatgtccaactatcccatggtcccaggacatgaagtggttggtgaggtactggaggtgggatcaaacgttagcaggttcagagtgggagagttggtgggagttggactcctcgtaggttgctgcnaaaactgccagncangccancaagacattg

SEQ ID NO: 46967 - DNA, 273 bp, Glycine max
  unsure (1)..(273): unsure at all n locations; Clone ID: 701133119H1
ttgccattgaagtcaaccctccagcaatgactatcaaagcgggcgcatcgcgtcagttttcggtgtcacttacagtgcgctcagtgacaagaaggtatagttttggagaggttttgatgaaagggagcagagggcacaaggtgaggattcctgttctggccaatggacaccgacgatagatagcttagtaaagtttggtcggcaaanggaaggaaagcagtgctgcttgtaatattctttgtaacttgtggggaataaggtatggtgctacat

SEQ ID NO: 46968 - DNA, 104 bp, Glycine max
  Clone ID: 701133120H1
gttctcttttctcttctcactgaattttcagatctactttttctcctcagtggagtaataatattgattgattcacgcagctatagccatttcagatctaatat

SEQ ID NO: 46969 - DNA, 274 bp, Glycine max
  Clone ID: 701133121H1
ctcccccatgtgaacgttacattacaccttagtttggttttgtagcattattatccccaacccatcaaaagcaacaatcattgaattaattgcaccaaatattgttttgctgtaatcaatactccaatggggaatgccttggggggaaagaaaaccacaaaggtgatgaagattgatggggaaaccttcaagcttaaaaccccaataaaagtttgtgatgtgctaaaagaccaccctggccttgttctgttagaatccgaggctgtgaagcatt

SEQ ID NO: 46970 - DNA, 274 bp, Glycine max
  Clone ID: 701133122H1
gaaaaattaagatggaggggaaggagcaggatgtgtcgctgggagcgaacaagttcccggagagacagccgattgggacggcggcgcagagccaagacgacggcaaggactaccaggagccggcgccggcgccactggttgacccgacggagtttacgtcatggtccttttacagagcagggatagcagagtttgtggccacttttctgtttctatacatcactgtcttaaccgtcatgggagtcgccggggctaagtctaagtgcagtaccgt

SEQ ID NO: 46971 - DNA, 272 bp, Glycine max
  Clone ID: 701133124H1
ctctgtgtgttacaaagtaaaatacttaccttggctccttctctgcattctgtgctacattggctgtggattcttgttcataaaaggaagctcatcttaagcattgtggcagacctgagtgagcattttttgagtggaaaatatgagctacagtggctcctcaatgagttctggtagtggatcttctagaaggacatttgagtttggaaggacccatgtggtcagacctaaagggaaacaccaggcaactatagtttggctacatggccttg

SEQ ID NO: 46972 - DNA, 275 bp, Glycine max
  unsure (1)..(275): unsure at all n locations; Clone ID: 701133126H1
ctcgnaccgngaagacccttctcttcggtgacaaggcagtcactgnttttggacacagaaaacctgaagagatcccatgggggtcaactggagctgacatcattgttgagtccaccggagttttcaccgataaggacaaggctgccgcaacatttgaagggtggtgccaagaaggttattatttctgcccccagtaaggatgcccccatgtttgttgttggtgttaatgagcacgagtacaagccagagcttgatattatttccaacgctagctg

SEQ ID NO: 46973 - DNA, 262 bp, Glycine max
  unsure (1)..(262): unsure at all n locations; Clone ID: 701133127H1
gagaaattcgcaaaccctaatttcggaaagatcggcgatggctgcctccaagnatcgcgagancttcgtctacatcgccaagctcgccgaacaggccgagcgatacgaagagatggtggaatcaatgaagaacgttgcgaatctcgacgttgaactgactgtggaggagcggaatttactttctgttgggtacaagaatgtgattggtgctcggagagatcgtggaggatcctgtcttccattgagcaaaaggaagaaacaa

SEQ ID NO: 46974 - DNA, 275 bp, Glycine max
  unsure (1)..(275): unsure at all n locations; Clone ID: 701133130H1
cttcgctttcctgaaactagggttttcaatttcgattcattcgtnaataattaaagatgtntggganggcaccgaagangagcgataatacgaggtactacgaaatcctcggcgtctcgaagaacgcttcgcaggatgatctgaaganggcttacaagaaagccgccatcaagaatcaccctgacaagggcggtgatcccgagaagtttaaagagctggcacaagcatatgaggttctgagtgaccctgagaagcgtgagatatatgatcagtat

SEQ ID NO: 46975 - DNA, 273 bp, Glycine max
  unsure (1)..(273): unsure at all n locations; Clone ID: 701133131H1
gtttgagggaagacaatgtagagggaagggatctgaagaagccatttcttcacacaggaagttggtatcgtatgagtgggagacaatccagtgtgtttggttccacacaggcnatnanangatcctccatctctgtctttgcangtgttctaatcgttgctttgggtccaattcagtttggtttcactgctggttacacctcacctacanaatctgcnatcatcaatgacctaggccctntcagtctctnagttttctttgtttggtccttgt

SEQ ID NO: 46976 - DNA, 275 bp, Glycine max
  unsure (1)..(275): unsure at all n locations; Clone ID: 701133133H1
ggaaactcaaatagaacataatgttttgaggttccaacaaccaagtttggatcatccattacaaatgcatcagaggagggtctacatatcaagaatgcantagaaaatttgttgtgaaggcaatctctaaacaacctcttggttttgaagctcatgcttccaatcctaagaacattttggactctgtcaaaaatgtattgtctgctttctactggttttcctatccatacacaatgattggcataacattatgcgcattttcttcatctctnctc

SEQ ID NO: 46977 - DNA, 275 bp, Glycine max
  unsure (1)..(275): unsure at all n locations; Clone ID: 701133134H1
cggaagnccgtgnnnggctatggtcggcaagaactgcttcgccattgccagcgaccgaaggctcggcgttcagctccaaaccatagccacggatttccaacgcatttccaagattcacgacaagctcttcatcgctctctctngcctcgccaccgatgctcaancattgtatcagcgtcttgttttccggcacaaactgtatcagcttcgtgaagagagggatatgaaaccagagacctttgccagcttagtctctgctctgctttatgagaaaa

SEQ ID NO: 46978 - DNA, 271 bp, Glycine max
  unsure (1)..(271): unsure at all n locations; Clone ID: 701133136H1
gtnaatatggcatactctcaacttcaaaagctggaagctaacgtgagtatcaaggcttcagctgaacagttctatgatgttttatgccacaagacacaccaaattcccaaaattttccctgaaaaagcactgtctgttgaaattctgaaaggtgcatggggcaccgagggatctatcatctcctggaattatttatacgagggaaaagtttgtgtggctaaggaggtgattgaaggcatagacaagaaaaacaaaaaaatgagcttcaagg

SEQ ID NO: 46979 - DNA, 98 bp, Glycine max
  unsure (1)..(98): unsure at all n locations; Clone ID: 701133137H1
ctaagagtgagcaacttgtgagaaatggcttccaaggctgcacttactcttgtgtctcaatgttctctttttcactgtggttagttccacacaanana

SEQ ID NO: 46980 - DNA, 271 bp, Glycine max
  unsure (1)..(271): unsure at all n locations; Clone ID: 701133138H1
gggatattcaatgcaattagcgaatgagagaatgaagagccggtggttcgtgtggcttttggcggtactaggcatcatcggagccacactcttcatagtgagcttgatccaaacctcggagaacaacttcctatgttccataacaagaacgatnnnnnnnnnnnnnnnnnnnttcaccgatggccccacatcgatgcaactcaaagccatcctccactacgcgacctctcagattgtccctcaacaatctctttccgagattacaataacc

SEQ ID NO: 46981 - DNA, 269 bp, Glycine max
  unsure (1)..(269): unsure at all n locations; Clone ID: 701133139H1
gaaagtgaacggaagcgggatttcgacaaaaagagtgaaatggatcgtagggagcatcaganatctgggttagagagtggcaagggacagaataccaacaatgcacaaaataaaaatgtcactgcaaacaattataaccgaggaggtactgnaacaaggtatcttgaccgcatgcggggcacaattttgtcctcttcaaaagcatttggttttggtaggggtattaatgttcctagcactgtggtgaaaganaacaagtttaatagttc

SEQ ID NO: 46982 - DNA, 269 bp, Glycine max
  unsure (1)..(269): unsure at all n locations; Clone ID: 701133140H1
cccgagttcacaaacactgaacgccgctgctccgtagtttcgatcgacgcattcttcacttcaagatatcacaatgtctataacgcacagcctcactactccactcnnnnnnnnnnnnnnnnnnntcttagctccttcttccttcaattgcaggggacaggtttcgttgcctgtgaagagcgtgagatttgcaaatgcgttgccacacccgaagctgagactgcctacaagacaggggtcaatcgcaatccaaatatggggaaacttca

SEQ ID NO: 46983 - DNA, 266 bp, Glycine max
  unsure (1)..(266): unsure at all n locations; Clone ID: 701133141H1
angctagaganagtggtgatcaatatgtcaaagaatcnaaaagtntnctntgatattctaattggaaagatganagctngacgagtagtgatngagtngtttggacgntgcnaccccaaaaggagctgaaaacttcanggctccctgcactggggcgnaggggatnggacgatctgggaaacctgggncactacggggttctgtattcancgtantantccagaatnnatgtgtcaggnagnagtttcacggananaatnccaccg

SEQ ID NO: 46984 - DNA, 264 bp, Glycine max
  unsure (1)..(264): unsure at all n locations; Clone ID: 701133142H1
atttgctaganaggtgattgccggtgtaaacccaaatgtgatccgtcgtcttcaagaattcccaccaaagagcacactctgatcccacactctatggtgatcaaaccagtaccataacaaaagaacaattggagattaacatgggaggggtcacagtagaagaggcacttagtactcagagattattcatattagattaccaagatgcattcatcccatatttgacgaggataaacagcctacctactgcaaaagcttatgcca

SEQ ID NO: 46985 - DNA, 243 bp, Glycine max
  unsure (1)..(243): unsure at all n locations; Clone ID: 701133143H1
tcttagatctcttctttctctacgccgcacgccgaaaccatggccggaaaaggagagggtcctgctatcggaatcnatctcggaaccacctactcttgcgtcggtgtgtggcaacatgaccgcgttgaaatcatcgccaacgaccaagggaacagaaccacgccgtcttacgtcggattcactgacaccgagcgtctcatcggtgatgcggccaagaatcaagtcgccatgaaccccatcaac

SEQ ID NO: 46986 - DNA, 88 bp, Glycine max
  unsure (1)..(88): unsure at all n locations; Clone ID: 701133144H1
gnaganncgtctgtacactgtgattgttgaaaagtnccagacaatacaagtnatntttgtctatatagacgaactagttatcaagcnt

SEQ ID NO: 46987 - DNA, 268 bp, Glycine max
  Clone ID: 701133145H1
gttggtcccattccataggaagagatcaaagagaagagaaaagatgtttgagccgcagcagctatacacttcgagcgaagaccgaggaattcgacctcgaatcaggggaaaccctctacccagggctgagcgtcggcgagaaccagctccgatggggcttcatccgcaaggtctacggcatcctctccgcccagatcgtcctcaccaccctcgtctctgtcaccaccggtttctatatccaatcaatgacctccttcaagggcattcc

SEQ ID NO: 46988 - DNA, 269 bp, Glycine max
  unsure (1)..(269): unsure at all n locations; Clone ID: 701133146H1
tccccaaacaatcgcttattgctaacgcgacctcttcctgttcccgctgcatcagcctcagagcacccgctagggtttcttctgcacacccaaccaaatggcggatcctgagttggaagcaatcagacagagaaggttgcaggagcttatggctagccatggtggcgtgggaaatcaacagaaccctgaacaggagnaagctcaggatgatgcaaagagggaggctgaggaacggagacagatgatgcttagtcagatattgtctgctg

SEQ ID NO: 46989 - DNA, 207 bp, Glycine max
  unsure (1)..(207): unsure at all n locations; Clone ID: 701133148H1
taccgtcctagtctcaaccataaacgatgccgaccagggatcagcggatgttgcttttaggactccgctggcaccttatgagaaatcaaagtctttgggttccggggggagtatggtcgcaaggctgaaacttaaaggaattggcggataagacaaatgttgttgagttncgttttatttatagattgaattctcagttttgatttg

SEQ ID NO: 46990 - DNA, 275 bp, Glycine max
  Clone ID: 701133149H1
gctcgatctacctaccttggttcttctctgttctgttatttcagtgcagcagcagaaaatgaccatcctcattgagcaacctgcccttgagttacaagttgaaggcaacaatgtgcatgctgaagaaaccaatgagcttgtattggatggtggatttccattgccaaaggatggatatatggccccagaaatcaattcatttgggccactccttcagagaatatgatgctgaaagtgagagggcaaaaaggtgtggaggaattttataggttgca

SEQ ID NO: 46991 - DNA, 274 bp, Glycine max
  Clone ID: 701133150H1
tctccaacctttcactttcgtttctcagttttattcgaatccctctctcaatctcctttccaaatggccagcgttgaggttgcacagcaaacaccaacaacagttccagaaaatgaaacaaccgaggtaagcaagacccaggaaacaaccccagtcactgaggctcctgcaacagaacaaccagcagctgaggttcctgcaacagaacaaccagccgctgaggctcctgccccagaatcaaccaccgaagcaccaaaggaagaaaccaccgagg

SEQ ID NO: 46992 - DNA, 268 bp, Glycine max
  unsure (1)..(268): unsure at all n locations; Clone ID: 701133151H1
ggagtagaagtagaagcttcacttcactctgttcagttcttattgttgcatagataatttgtctctatttatgtnattctcttnctctctcctctttgtgcantntaatagcaactcttagtttccaatgtccaagatgttgggagtgtntgtgggncttttgctgtnggnggggttggctgcctctgccaagtttgatgaantcttccagcccagttgggctatggaccatntcatccatgaaggagaacttctcaaactcanactt

SEQ ID NO: 46993 - DNA, 271 bp, Glycine max
  unsure (1)..(271): unsure at all n locations; Clone ID: 701133152H1
acttgatctcatcataatcgtcagcgtcaattgaagaagatgccgatcagaaacatcgccgtcggaaggcctgaagaggcgactcaccccgacacgttgaaggcggctttggctgagttcatctcaaccttcatcttcgtgttcgccggctcaggctccggcatcgcctacaacnagctcaccgacaacggcgctgccacccctgccggcctcatctccgcctccatngnccatgcattcgccctcttcgtcgccgtctccgtcggcgnac

SEQ ID NO: 46994 - DNA, 62 bp, Glycine max
  unsure (1)..(62): unsure at all n locations; Clone ID: 701133153H1
aaangcgnctttggaatnnatatgactgatattggtggtttacnatgntgcagatatcggng

SEQ ID NO: 46995 - DNA, 251 bp, Glycine max
  unsure (1)..(251): unsure at all n locations; Clone ID: 701133155H1
tncaaaatgaaggtccttgttttcaccgttgctacaattttncntagcatggcaatgccatgacgtacgatatgttccctctccgaatgaacactggctatggtgcccgtactccggaggtgaaatgcgcaagttggaggcttgctgtggaagcacacaacatctttggctttgagancattcctgaagagtgcgttgaagcaacaaaggaatacatccatggcgancaatatagatcagactccaaaaca

SEQ ID NO: 46996 - DNA, 261 bp, Glycine max
  unsure (1)..(261): unsure at all n locations; Clone ID: 701133156H1
ctctgtacccttcgctaaaatgagagagtgcatttccatccacattggccattgccggaattcaggtcggaaatgnttgctgggagctctattgcctcgagnatggcattcaggctgatgggcagatgccaagtactaagaccattggtggaggtgacgatgctttcaacaacttcttcagcgagaccggtgcaggaaagcacgtgcctcgtgcagtttacgtagatcttgagcccactgtcattgatgaagtcagaactg

SEQ ID NO: 46997 - DNA, 268 bp, Glycine max
  unsure (1)..(268): unsure at all n locations; Clone ID: 701133157H1
gcagagctagttatcataaaggganctggtagggcttttgcgctggaggggatttgnanngtgttctatgacggcaggaaaataaaggatgcctgtcttgaagtggtctacagattttactgggcttgctatcacattagtacctataagaaaacccaggttgcgcttgttcatggaatttcaatgggtggaggtgcagctttgatggtcccattgaagttctcagttgtaacagaaaaaactgtttttgccactcctgaagcagttt

SEQ ID NO: 46998 - DNA, 261 bp, Glycine max
  unsure (1)..(261): unsure at all n locations; Clone ID: 701133158H1
cacaggcggcgttttctcgtttcgccacgcatcattcgatttcgctctgttcacgctacgctccactccgcaccataacgaatcnaatcgaatatcccgaaacaatcacgtgatattcgatcatnatctattntctccgntcaatcacgagatattcgatctccttctcaatctccacagtttaacaccagcttcaaacanacaccacgcgcgcaaacttttttntttntttanctnngngttgntatggntttcncgggg

SEQ ID NO: 46999 - DNA, 267 bp, Glycine max
  unsure (1)..(267): unsure at all n locations; Clone ID: 701133159H1
aaacagcgaaagtgaaagaaaaaagaacggaaccaaagaaaacagagccaaggactcctactattgaacgccctgtgcgggaaaggaagtcagtggagaggttggtagcatcaattgataaagatgcaaccanagaatttctcattgaaaagggtcgtggtacacctttaaaaaatataccaaatgtggcatttaagttatctagaaggaagactgangatacgttcaaattgctccatacaattctctttggaaggagaggaaggc

SEQ ID NO: 47000 - DNA, 143 bp, Glycine max
  unsure (1)..(143): unsure at all n locations; Clone ID: 701133160H1
cgcataaggntgagcaccatgctggagaatacaaaggggagcaccatggtgaacacagtagtgagtacaaangagagcatcatggtgaacacaaagctggagagtaccatggtgagcacaagccagagcacaaagaggggttt

SEQ ID NO: 47001 - DNA, 271 bp, Glycine max
  unsure (1)..(271): unsure at all n locations; Clone ID: 701133161H1
gccattctccatcttcaaacttgttttgacatcntttcttctctgctttttcttgcaggaacctaccaatgctgcttagaaagacctacattgtgtacatgggaggacattctcatggtccagaccctttgcctagtgatcttgaaacagccacaaattcccatcatgatttactcgcttctnacttaggaagtcatgagnaggccaaggaagcaatnatgtactcgnacantaagcacatcaatgggctttgctgccatacttgaagagg

SEQ ID NO: 47002 - DNA, 268 bp, Glycine max
  Clone ID: 701133162H1
agctttcggtaattcccttttctctctatttttccttttttccccctatttatgtgaggttcatgtttcaagttcccgtgcagtgggaccaacacagtacataataagcgatccaattggccaaaacctttgtcactgcgctcaaaatctgttcttgctgttgctggggctgaccctttggaaatggcagaggattggaaccgcacagcccttcttgtgatcgacatgcagaaagattttatagaagatgggggtcccatgctagtaa

SEQ ID NO: 47003 - DNA, 269 bp, Glycine max
  Clone ID: 701133163H1
caaggtgggcgccatagggtgcatgctggtgtccctcttcttcctcgggacatggcctgctgtcatgactctgctagaaaggcgcggtcgtcttcctcaacacacctaccttgattacaccctcaccaacctcatggctgctgttatcattgctttcacctttggtcagattggcaacgctcaacccaacttcttgtctcagctttctcaggataactggccttctgttctgtttgccatggggggtggagtggtccttagtgttggaa

SEQ ID NO: 47004 - DNA, 271 bp, Glycine max
  unsure (1)..(271): unsure at all n locations; Clone ID: 701133164H1
cantaatgaaacgagtacgtcatccaaatgtggtgttgttcatgggtgcagttactaaacgtccccatctatctatagtaacagaatatttgcctaggggcagtttatttcgcctaatacataagccagcatctggtgagattctagatccaaggagaagattacggatggctttagatgtggctaaagggatcaattatctccactgtctaaagcctccaattgtgcactgggatctcaaaaccccaaatctgttagtggacagaaattg

SEQ ID NO: 47005 - DNA, 269 bp, Glycine max
  unsure (1)..(269): unsure at all n locations; Clone ID: 701133165H1
ctttctttcacatccaatcaacgaaaaatgctggctgttttcgacaaatcggtggcaaagagcccagagggtcttcagagccctcactcaaattccgtctcagccctaaaagacggttttctcgcagngcacttctcttccgttcaccctggttccgtcaccgttaaccttggctcttccggtctcttggcctattctcttcacaaacagaaccccctcctcccaaggctgtttgcagtcgtggatgacattttctgtttntttcaang

SEQ ID NO: 47006 - DNA, 269 bp, Glycine max
  Clone ID: 701133166H1
ttctagagctaatacgtgcaacaaaccccggcttctggaagggatgcatttattagataaaaggtcaacacaggctctgcctgttgctttgatgattcatgataactcgtcggatcgcacggcctttgtgccggcgacgcatcattcaaatttctgccctatcaactttcgatggtaggatagtggcctaccatggtggtgacgggtgacggagaattagggttcgattccggagagggagcctgagaaacggctaccacatccaaggg

SEQ ID NO: 47007 - DNA, 192 bp, Glycine max
  Clone ID: 701133167H1
gagcttgtttaagcttttcttccattaacatattatcacaatgtgtggtattcttgctgttcttggttgttctgatgactctcgagccaaaagggtccgcgtgcttgagctctctcgcagattgaagcaccgtggccctgactggagtgggctccatcaacatggtgactgctttttggcacatcaacggtt

SEQ ID NO: 47008 - DNA, 266 bp, Glycine max
  unsure (1)..(266): unsure at all n locations; Clone ID: 701133168H1
cgggattttactctcacgagattagagattgaagatggtgtctgacgcgagcaagaagaaggctgcgcanaagaaggcggcggcagggccaagagaggaggcaaagcagcagctgcttcgtcgaaaacgacgtcgtcggngaaggccgccgacaagcttgccaacggaactggggaaattcagatatccgatcgaacctgcaccggtgtcctctgctcgcatcctctttccagggatattaggatagaatctctgtcagttacttt

SEQ ID NO: 47009 - DNA, 266 bp, Glycine max
  Clone ID: 701133170H1
tctttctctctttctagttcgtgttcttcgtcgcaaatccgaagtaggatctctcttgttttttctctaggtttttcgcgatggcgtcgaagcgaattttgaaggagcttaaggatttgcagaaggatcctccaacatcttgcagtgccggtcctgttcatgaagatatgtttcattggcaagctacaattatgggtcctccagacagtccctatgctggaggtgttttcctagtgactattcatttccctccagattatcccttt

SEQ ID NO: 47010 - DNA, 264 bp, Glycine max
  unsure (1)..(264): unsure at all n locations; Clone ID: 701133171H1
cgcctcaaccgtgcngtgccactagacaggcttgccactcttcttcgcggtgctcctnanttggttgagttgggcaccggagcttacacgacagagatgcgaccggaggtcttcacaaaccttgcggaggcatttnctnggtgcaagcaattgaagggcttatctggattttgggacgtgctcccttcctaccttccagctgtctatcctatttgctccaacctgacttcactgaacttgagttatgcaactattcaaagccct

SEQ ID NO: 47011 - DNA, 140 bp, Glycine max
  unsure (1)..(140): unsure at all n locations; Clone ID: 701133172H1
gncttgcnctggcttcccctgtccactacaagttcaaccccgtcaagactatcaagacgaatgtggtggggaccttgaacatgctggggcttgcaaagagagtgggcgcgaggttcttgttgacgagtaccagtgaggtt

SEQ ID NO: 47012 - DNA, 262 bp, Glycine max
  unsure (1)..(262): unsure at all n locations; Clone ID: 701133173H1
aaaaaacagtttcattgtgatgattgtgggatttgtagacttggtggtcgtgagaattattcccactgcagtaagtgtgggtgttgctactcaaatactctgcgtgataatcatttgtgtgtggagaactccatgaggcatcattgtcccatttgttatgagtatcttttgactcattgaaagacattgctgttatgaaatgtggtcacacaatgcatagtgatgcnaacnnggngtgctaaagnggggacnannttnttgc

SEQ ID NO: 47013 - DNA, 267 bp, Glycine max
  Clone ID: 701133174H1
aaaccgaggttagtgtgagattggaagccctctgggcagttctgtccaaggatttcgtcaccgtagctccaaaggtactccccaatattgtgaaggatgtgcaagtgattgaaggtgatggaggggttggtacaatcctcatctttaattttttgtctgatgtgtccccaagttaccaaagggagaagatcacagagtttgatgaaatttcacatgaaattgggctgcaagtgattgaaggaggttatctgagtcaaggattgtcat

SEQ ID NO: 47014 - DNA, 263 bp, Glycine max
  unsure (1)..(263): unsure at all n locations; Clone ID: 701133175H1
cgtgccgtctttgtagatcttgagcccactgttattgatgaagtgaggaccggaacttaccgccagcttntccacccagagcagctcatcagcggcaaagaagatgccgccaacaactttgcccgtggtcattataccattgggaaagagatcgttgatctgtgcttggaccgcatcagaaagcttgctgacaactgcactggactccaagggttcttagtattcaatgccgttggtggaggaactggttctggacttggttc

SEQ ID NO: 47015 - DNA, 79 bp, Glycine max
  unsure (1)..(79): unsure at all n locations; Clone ID: 701133176H1
gactattacaaacttcttcaagtggatcgaaatgtccagtgatgaggatctcaagaaagcctatcgcaagcttgcnatg

SEQ ID NO: 47016 - DNA, 267 bp, Glycine max
  unsure (1)..(267): unsure at all n locations; Clone ID: 701133177H1
tttaattgataaaaatgggatgcttaagattgcagattttggtcttgccaatttttatggtccagatcgtcaccgngcctctcacaagccgggttgtgacactatggtacagagctcctgagttattgttaggcgacacagattatggagttggtgttgatctatggagtgctggatgtctcctggcagaaatgtttacaggaattccaatcatgcctgggcagaaatgangttgagcagcttcataaaattttccggctatgtggg

SEQ ID NO: 47017 - DNA, 266 bp, Glycine max
  unsure (1)..(266): unsure at all n locations; Clone ID: 701133178H1
tantcatatgnttgtctcnaagattaagccatgcatgngtaagtatgagactaattcagactgtgaaactgncgaatggctcattngatcanttatagtntnnttgatggtatctactactcggataaccgtagtnattctanagctaatacgtgcaacaaaccccgacttctngnagggatgnntntattngntanaaggtcaacacaggctctgnctgttgctttgatgattcatgatantcgtcggatcgcacggcctttgtg

SEQ ID NO: 47018 - DNA, 266 bp, Glycine max
  unsure (1)..(266): unsure at all n locations; Clone ID: 701133179H1
agatgaggtgtttganaaattgagtgttagaagaggaataagcatagacattggaatttggaagggatgnatctaaggccattggggccattggttangatggctgcagttanatttggtggagtagccactttgaacttggcttctgctgctaccatcaaantncttcggtttgcatctgagangagacgggnntaagtngcgttgncctgntgggtttgtaganggacaggggtctatatntgcacnctntgcaacgggatcnc

SEQ ID NO: 47019 - DNA, 246 bp, Glycine max
  unsure (1)..(246): unsure at all n locations; Clone ID: 701133180H1
gaaatgtgtacaccactctggcaaacngaaatgccttgcataccgttggaggttgctgggaacccggatataccggtggcagaaggatctcatgtaacttcaactaatggaacaaaactccgtgttgcagattttgtccatggtgtagatggacttggnaaccagaattttcctccacnanaggggaagcccattgaagaatcagctgcttcttttttggttcatcaagcaaaagttaaccctggc

SEQ ID NO: 47020 - DNA, 260 bp, Glycine max
  unsure (1)..(260): unsure at all n locations; Clone ID: 701133181H1
agaaccttgaagcgagtctgggccacagcaaccagcgncaacaactcaatcagcnagggttgctttgcttgctatcttgttggaggattttctgttcaagagaagatggtaactagaattgtggatcttcgttcagacacagttacaaagccaactgaagcaatgagagctgctatggcaagtgctgaagttgatgacgatgttctaggctatgatccaactgcttttcgcttagaaacagagatggcaaagacaatggg

SEQ ID NO: 47021 - DNA, 267 bp, Glycine max
  Clone ID: 701133182H1
ggtgggggagggccaaacagtgcacactgagaaagcaatttctgttctgattcagcttgtggaaaaggagagggtcttgaagtgtgttaaaatgatccaagagctggcatcaaatagtggtggttctgccaagggtgctagtgcttctgtttctgtccctagcgtgcccgaaagcccactaggggtgttggtcactgcatgcttcagctacaaaagtgatgacacaaatgctgcttcatatgcaaattcttcacataacattagtcc

SEQ ID NO: 47022 - DNA, 269 bp, Glycine max
  unsure (1)..(269): unsure at all n locations; Clone ID: 701133183H1
cttccttaagctccttagtgctgctccttgcagctctaattctatcccctncaagttcttgcaaactatgagaatcccccagtgtataagcctcccactgagaaaccaccagtttaaaagcccccagtngagaagcctcctgtttacaancctccagttgaaaancccccantntataagcctccagtngagaagccaccagtgtanaagcccccagttgngaatccnccagtntncaagccnccagttgggggaaaccaccngtgtac

SEQ ID NO: 47023 - DNA, 265 bp, Glycine max
  unsure (1)..(265): unsure at all n locations; Clone ID: 701133186H1
aaaaaggcagtgttgatcggaataaactacccaggaacaaaggcggacttgagaggatgcataaacgacgtgtggagaatgcatcgctgcctgatcgagcgatacggtttctccgaagacgacatcaccgttttgatcgacacggacgagtcctacacggagcccaccgggaagaacatccggtcagcgctgaccaggctggtccgatcggcgganccggggacgttctgtttgtgcactacagcggacacggcacgcnccttcc

SEQ ID NO: 47024 - DNA, 243 bp, Glycine max
  unsure (1)..(243): unsure at all n locations; Clone ID: 701133187H1
gcctcaggtaagccaaagccatgnctaagcataacaatgtnatccccaacggacacttccgtaagcactggcagaactatgtgaagacctggttcaatcagccagcacggaagacaagaagacggttggctcgtcagaagaaagctgtgaagattttccccagacctacagctggacctcttagacccattgtacatggtcaaactttgaaatacaacatgaaagtgagagctggaaggggat

SEQ ID NO: 47025 - DNA, 136 bp, Glycine max
  Clone ID: 701133188H1
agcggttctacgccgcggcctcttacgttggattcgacggatccaccaaatctctcacttccaagttctccaactccaccgctcttctctctacagcctctatcagcaggctagtataggaccttgtaatgtccca

SEQ ID NO: 47026 - DNA, 266 bp, Glycine max
  unsure (1)..(266): unsure at all n locations; Clone ID: 701133189H1
gcagctggcttgtgtagatgtnattgancatggaatagtccatggaggctacagtggtgttctaaaggaggcagaagtattcaaacaattggttgtatctgacaccgcaaaangtttaattaatgtcttcttttctcagcgggcgatatcaaaggtgcctggcgtaaccgatatcggccttaagcccagaaatgtgaaaaaagctgctgttattggaggaggtctaatgggttctggcattgctacagctcttatactaggcaaca

SEQ ID NO: 47027 - DNA, 265 bp, Glycine max
  Clone ID: 701133190H1
gtgcgcaatgcatgcaagcagcaaaatgggtgaaaaatataaaccttggatcatctttcttcatctactagtaatcacgtgttcctgcaatagaagctgcagagccaggggattgattgaaacagaagacaaattcttcaaagcaacctcaaatgatcatcatgaaacagaacatgcacatgctcactctcacgtggatcacatagatccttctgtgatggtgtttttcaccatcgaagatttgaaggttgggaaaacaatgcct

SEQ ID NO: 47028 - DNA, 263 bp, Glycine max
  unsure (1)..(263): unsure at all n locations; Clone ID: 701133191H1
aacattattcccattgctatatattatggctagcatgaaggttacatgggtggttgtgatcatgtgcatggtcgtggtgggtgcaccgatgatggcgcaagcatggacatgcaatgatgtgacggtgaacatggcacagtgcctatcctacctgatgcagggaggaacaccttcaacactttgctgcagcggagtcaagaacattcttggctctgctgtcaccaccgttgacaaacaaactgngtgcaatgtctcaaggcggt

SEQ ID NO: 47029 - DNA, 265 bp, Glycine max
  unsure (1)..(265): unsure at all n locations; Clone ID: 701133192H1
tncggngcagtnnccggcgagtcancgncgtntccgccggnaagtntctcnccancgttgccntcctccttcagagaagttgagaaaatggacggccatatgggaatgaggaaaatcagntctcactgctctatncctgatttggatgattctgatatcttacgtttgcttgaaaagccaaagttgaacattgagagacagagatcatttgatgagaggtcantcagtgagntctcattggtcttgcgagaggggttggataant

SEQ ID NO: 47030 - DNA, 266 bp, Glycine max
  unsure (1)..(266): unsure at all n locations; Clone ID: 701133194H1
cttttgatcagagtgtaaaatggtgatgtgattttacaagggtcttccatgcccctttgagtttcagttttcaattttnaacccccttttttgtaatccataaccatagctggcagnatccttggttgagtcgagggatttgattatggataagtntgaggctgtnaaggatttgggagctgggaattttggggnggctaggctcatgaggaacaaggagancaaggagcttgttgccatgaaatacatcgagcgtggccanaaga

SEQ ID NO: 47031 - DNA, 265 bp, Glycine max
  unsure (1)..(265): unsure at all n locations; Clone ID: 701133195H1
caaccatgcgggagtgtggtgtacgtggcctttggaagcgaanaaaaccaagtcaagatgaagtgacacagatagctctaggtntggaggaatcaaagattcggtttttctgggtgcttagggttcaacgtgggccatgggacccagatgtgttacggttaccagaagggttcgaagagcgaaccaaagggcgtggaatagtgtgcaccagttgggcaccacagttgaagatactgagccacgtagcagttggtgggtttttgac

SEQ ID NO: 47032 - DNA, 267 bp, Glycine max
  unsure (1)..(267): unsure at all n locations; Clone ID: 701133196H1
ttgaattgacaatgaggcctgctcttgctttgcttcctcttctatttgctttctngttagctgccactacggaatcaagaaaagatccaggggaatattggaaaatgatcatgaaagatcaggaaatgccagaaggacttcaaggtcttgtttcatttcaatctgaaaataaccctaagactcaagagcagcttggtaaaggttccaaaaaccattgtgaagagtctctagttacaaatacacaagttaacagtgacttcgaaccca

SEQ ID NO: 47033 - DNA, 302 bp, Glycine max
  unsure (1)..(302): unsure at all n locations; Clone ID: 701133203H1
aaaagaaccgataatagttgttccttcantctccgntnctctctgccactgagccaagaagatnngcctcacagggttgcaaatctgcttccaganccgcgangtcccttctancctctcgntttcactctcaaggacgtgcgcttggggctnctgcggctgtttcattgagcagcaaantgcctcttttttacgganagnacggttcnggaaatggatccgtnnnnnnnnnnnnnnnnnnnnnnggatttcagagctcttgctctcctgccgcagttanatgttccaagatcnggggggcc

SEQ ID NO: 47034 - DNA, 302 bp, Glycine max
  unsure (1)..(302): unsure at all n locations; Clone ID: 701133205H1
acacccttcatttcctttgctccctctcattgtgctatatttccattacacaattantagtcctctttcctttgttggtgacacacccttttggcttattaaacacatatcataacaaggnataccnaaatgtgcggctctangaccaaagtgacgnttggcttagaagtcatcgntgctgctactactacaacaactgctaagcctcagtggctagaatcaatggaagggccagtcctccaaccaacttgtaaccgtgttccaaaccttganaggcngnnttcnatcaagaaaagtggcnc

SEQ ID NO: 47035 - DNA, 296 bp, Glycine max
  unsure (1)..(296): unsure at all n locations; Clone ID: 701133206H1
cnaaactcactattaaaattatgtgttatacatgcatgatctttntaatatatttttatgactttcataataaatatttttcnctnttagtttcttaattagtgatatcctaaaatactgttatcatcaagatccaaaaaaatatatcccatatcatacatgcacgttgcaatcaaagatcatangngtgatatatatagctttggcattcagtgcattattaactttaaattcttctacataattttaatagtgagttttgtgctttgtggccgtgacattaacaggtcataacc

SEQ ID NO: 47036 - DNA, 294 bp, Glycine max
  unsure (1)..(294): unsure at all n locations; Clone ID: 701133208H1
gggncgaacagnangaaactctggtngangcccgcanngatactgacgtgcaaattcgttcgtctgacttnggtatangggcgaaagactaatcgaaccgtactagtagctggttccctccgaagtttccctcaggatagctggagcccgcgggcgagttctatcgggtaaagccaatgattagaggcatcgggggcgcaacgccctcgacctattctcaaactttaaataggtaggacggtgcggctgctctgttgagccgcgccatggaatcgagagctccaagtgggccat

SEQ ID NO: 47037 - DNA, 291 bp, Glycine max
  unsure (1)..(291): unsure at all n locations; Clone ID: 701133209H1
ggcgaaacgctgtcgttgcgccaatcgcggcgttgttgttggtggtgctactcgcggcgagtgtggtggtggaggctcaggagaactcggacgtgaagacgctggtgaagcacatgcacgggaagaagtactgcgacaaaggatgggaatgtaagggctggtcaatttactgttgtaacctcactattactgattatttccagacctaccagttcgagaatctcttctccaagcggaatcgccggtggcncacgccgtcggattttgggactaccantcgttcatcgccgc

SEQ ID NO: 47038 - DNA, 252 bp, Glycine max
  unsure (1)..(252): unsure at all n locations; Clone ID: 701133210H1
tctaaccaagcttctcacactaaggcctcgagtagaactgcagattctcatattcatcactccatctgtcataacatctaatgctccaaccctcaaaagtttttcccaggaacaagggagagttttgccaggtcatatgcaaatttcttttgggggaaattacataacgcccctgnccaccccangggcaaccantactcaataacaaccatcctttntggcgcaacagtccaaggaacttccatacngggg

SEQ ID NO: 47039 - DNA, 184 bp, Glycine max
  unsure (1)..(184): unsure at all n locations; Clone ID: 701133211H1
cggatccagctacagcctacaacctacagatcaaggaaggaagatgttgggtgttataaggcacaagagtattcgccccgccttctccgcaatcagacacttctcttctgcagctaaagagattactgtcagggatgctctcaactccgcactcgatgnggaaatgtcagctgatcctaaagtc

SEQ ID NO: 47040 - DNA, 116 bp, Glycine max
  unsure (1)..(116): unsure at all n locations; Clone ID: 701133212H1
ccgcattactcctcaactgatctgggaaaataaggcgtctctncttaccagctgctgctaatgtttttcctggcctgcaattttccatcttccctgcagaaatttccaaaacaaat

SEQ ID NO: 47041 - DNA, 301 bp, Glycine max
  unsure (1)..(301): unsure at all n locations; Clone ID: 701133213H1
aaacatgggctagggttagtgctttgtttcactctttgctccttgatttcttcccttgtaattggcttctccaaatccatgtttccctctggngaaactaagtcccctggaactatcatgggaattactatttgttgacatgtccccaagcttgagaggattataaggaagcatcttgaggatgtcttcganaaggacagtggagtagctccggcatacttcgactcttcttccatgactgctttcctaaatggatgcgatgcgtctaatattgttgaatggagacggtgacgagangcac

SEQ ID NO: 47042 - DNA, 106 bp, Glycine max
  unsure (1)..(106): unsure at all n locations; Clone ID: 701133214H1
attggctaaaagncaaaaaatnctngaaagaacaccatgaaagttctgatttaacaatccggaaancatttctctncatcagcaaanctccattttccncanaana

SEQ ID NO: 47043 - DNA, 296 bp, Glycine max
  unsure (1)..(296): unsure at all n locations; Clone ID: 701133215H1
ggnccagagctctggaaagtcctcggtgttggaaagtgttgttggcaaggatttcttacctcgtggatgcagggattgtnactcggagacnccttgttttgcagcttcacaagattgatgagggtggcagagagtatgctgaatttctacacctccccaggaaaaggttcaccgattttgctgctgtgagaaaagagattcaagatgaaaccgatagcgagacggacgaacaagcccagatttncantggnccncttcatcttggcatatatncncccaatgnncctngaattgac

SEQ ID NO: 47044 - DNA, 291 bp, Glycine max
  unsure (1)..(291): unsure at all n locations; Clone ID: 701133216H1
ggagancacagaggcgaaagcaggacctttaagttcctaatcccatgtactacattgagtagtaccttcacctcactcaacaatctagctagagtttgttgtgagctataagcnagnnnatcgngaggagnatatgaagnngttngnagncttngttnctgcagtanntgtggtagcatggccangncatggcgcaggcnannaaaggtncgnnctccgaatgaaaacnggcnaggtgagcgtncntcggagggnaaaatgcncagttttaggcttgctgtggaagccgcc

SEQ ID NO: 47045 - DNA, 302 bp, Glycine max
  unsure (1)..(302): unsure at all n locations; Clone ID: 701133217H1
caattgnntcttctcttctcccagaatcggtgtaggttacaggtttaagggttttgtnttcatttaggtcactaatccgatatcatgaagctcgatacgactagtctcgaatcgtttcccacactgattgcaccttcaaaacgacgtcgccggagaactctccgacgctccgtnctttgaccttccgaattccaatgacttcgatgggttctgaaagacgctattcagatggtgaagcccgcgaagggtactacaatcttgcttttatattaaagaaggtgttatggtactgctgattctcc

SEQ ID NO: 47046 - DNA, 301 bp, Glycine max
  unsure (1)..(301): unsure at all n locations; Clone ID: 701133219H1
acttaatcgatcatcacttcacttcactaatacatcatggcagacgagacccagaacaagtatgagagctctgaggttgaggtccaggatcgtggtgtttttgactttctcggtaagaaaaaggatgaagaagacaagcctcatcctcaggaggaggtcatcgccaccgagtttcaaaaagtcactgtctcagaccaaggagagaacaagcacagcctcttagaaaagcttcaccgatctgacagcagctnctagntcttcaagtgangaggaaggagaagatggngcgaaaaggaagang

SEQ ID NO: 47047 - DNA, 100 bp, Glycine max
  unsure (1)..(100): unsure at all n locations; Clone ID: 701133221H1
ggacgagaaaatagttggatacgtnacggcgttccttaagaagaaaggcttnacgcaaaccgagaagncttttccaggaagaattccacaccaacatacc

SEQ ID NO: 47048 - DNA, 290 bp, Glycine max
  Clone ID: 701133223H1
aaggtgttgatgagtttcccttctgcgttcatctggttagctgggaaaaagaaaatgtttcaagtgaagcattggaagctgctagaattgcatgcaacaaatatatggcgaaatttgctggaaaggatgctttccacttgagagtcagagtacatccattccatgttcttaggatcaacaaaatgctttcatgtgctggagctgataggcttcagactggaatgagaggtgcatttggaaagccacagggaacatgtgctagagtcgccatggtcaggttcttctttctg

SEQ ID NO: 47049 - DNA, 289 bp, Glycine max
  unsure (1)..(289): unsure at all n locations; Clone ID: 701133224H1
cggagatgaagaagggcttgatgcatagctatggcgttgctgtgattgtgttggctttgagtttgtgtttgggttcatcatcggagcaattaagttcacgagaatgcgagaatctcggtttcaccggactcgccttgtgctccgactgcaacactctctccgagtacgtcaaggacaaagagttggtatcggattgtttcaagtgttgcaccgaagactccaacgatgccactaccaaggttacttactctggagctgtgttggnagtctgcatgaggaaactgttttc

SEQ ID NO: 47050 - DNA, 209 bp, Glycine max
  unsure (1)..(209): unsure at all n locations; Clone ID: 701133225H1
cctagttgttggtctttatatttagttattgacatcaacaaagtcatgggaggaagttaatgtggttcaaaccaagaatggaactgtttcagtagcttctgcgtttgcnggccataaggaagctatacagcacagggaccacaaatttttnagcnttgctgttgaagaagcgtataaaggggtagacngtgaagatgggggncccttnc

SEQ ID NO: 47051 - DNA, 195 bp, Glycine max
  unsure (1)..(195): unsure at all n locations; Clone ID: 701133227H1
gccaacaccaccagagatgacattagcattgtcccaattccccgctcttgaagtatatgcaaaactcggtgggaacgcaagacatggcgtagtgctgagttcataaagncaacaacaaanacttcaccaaataatattcagntcccagtttcctagttcctttccccttgtactcaatnaatcacaccccttcct

SEQ ID NO: 47052 - DNA, 291 bp, Glycine max
  unsure (1)..(291): unsure at all n locations; Clone ID: 701133231H1
tcagtttccaagaatcttaagctatgggaaagtcttacccaaccgtgagcgctgattaccagaaggccgttgagaaggcgaagaagaagctcagaggcttcatcgctgagaagagatgcgctcctctaatgctccgtttggcatggcactctgctggaacttacgacgtgagctcgaagaccggtggtcccttcggaaccataaagcacccctccgaactcgctcacggcgctaacaacggtcttgacatcgctgttaggcttttggagccactcaaancggagtttccta

SEQ ID NO: 47053 - DNA, 269 bp, Glycine max
  unsure (1)..(269): unsure at all n locations; Clone ID: 701133232H1
cacagttttcgtcccgaaaaatcncatagtatcgcgtgacncgcattgaagcacttgaaacatgcagaaattgggagagtttaaattaccacctttcttcaatnacccaccttacttcactttgcagccagtcagagacacaagagagaagcgctacagctatggaaagatcttattttagatttttgtaaaacacngangatatgtacatngggttgaagaagattnccnctatttnnanatcanggattgaanggtcncnactcatg

SEQ ID NO: 47054 - DNA, 282 bp, Glycine max
  unsure (1)..(282): unsure at all n locations; Clone ID: 701133233H1
gttcttgcagagtaagagagaggacngtggacaaataaagacctgatttttagaggggtncccancctcaccttctgccaaaccaaacccacccttttctgtcttcaagctactatcgataaatcagtttaaatttttgtggggtagtaataattgtagcatattgaggtaccttaaanaggatctggggtttgcatattttcctgcaaatctctcagctatttggcttggcttctgaatttnggttttcagtgctnagcagctgnacaagaagatgggggg

SEQ ID NO: 47055 - DNA, 302 bp, Glycine max
  unsure (1)..(302): unsure at all n locations; Clone ID: 701133234H1
ctattggctttggagcccctccttctccacttccgtttcatcttacgcctggcttcctctccttctcctttggccttcccaataatccacaaattccaaaacgcaggcaagtcagtgataacaatctgttcaaagaaaaatgcaaaatcaagggtggtcactctctgctctgcacctgtgcaagttgatatgcaggagcaggaggttagtgatattactttgagagagagaagtgtttcggttgtcctattggctgccagggcagggcaagncgatgggagctagcatgccaaagcagtatc

SEQ ID NO: 47056 - DNA, 301 bp, Glycine max
  unsure (1)..(301): unsure at all n locations; Clone ID: 701133235H1
cttcgctccaaaaaccttcattgggcaggtctcatggagagtaaangggaactncggtgaaggatgctgagaaacaaatcacccgtgttttgttttgtggaccccgtttccctgcttctcatgaatatacaattgagtatttggcnaaatcattcacatatcaaggttgatgttctccctttagaagatgtgccaaaggatattngccaactatcatncctgcatagtaaaanncatgagggctagattcagaaatatttctcgtgcatttcagctgcagcttataatgcagtanngtgtg

SEQ ID NO: 47057 - DNA, 293 bp, Glycine max
  unsure (1)..(293): unsure at all n locations; Clone ID: 701133236H1
gctatctctcccattctctcgcatctcaatacccttttgatttgtgaaaggaaagcaaacatgcttgatcaggtccaacaccctacaatcatggacaaggttgctggccagctccanctccgttctggtgtttctggtattaggagttatgaaggagcctactgccaccccacaatgtaccaaagaccctcttttgggaattactcgaatgctgcattgcagtatcctgtgatgccctcatgcaaagctactatggatttgtctgctgctgcaacaatgcctcccccgtcttt

SEQ ID NO: 47058 - DNA, 293 bp, Glycine max
  unsure (1)..(293): unsure at all n locations; Clone ID: 701133237H1
gctgtcactgagaaaggatctctatctacgaaggancggaataaaacccttgctctgctgtgattaagcgaatggcttcagatcggaaacttcacacttttgagnaggtggcaaagcacaaccagaccaaggattgctggctccatcatttctggcaaggtgtatgatgtcanccctttcatggangntcatcccggaggtgatgaggttntgttatctgnaacagggnaagatgcaaccatgatttgaagatgtggggcacagtgattctgctaganatatgntggnaaanc

SEQ ID NO: 47059 - DNA, 289 bp, Glycine max
  unsure (1)..(289): unsure at all n locations; Clone ID: 701133238H1
ctttaaataggtaggacggtgcggctgctctgttgagccgcgccatggaatcgagagctccaagtgggccatttttggtaagcagaactggcgatgcgggatgnaccggnagctgggttacngtgcccaactgcgcgctaacctagaccccacaaagggtgttggtcnnttaagacagcnggacggtggtcatggaagtcgaaatccgctaaggagtgtgtaacanctcacctgccgnatcaaanagccccganantggatggcgcnaaacgcncgacctataaccgnc

SEQ ID NO: 47060 - DNA, 291 bp, Glycine max
  unsure (1)..(291): unsure at all n locations; Clone ID: 701133239H1
ggntcgagcaaaatttcgtgctcttctctccctctcccttcattcatgntccttnncncctnnaagctcttatccatggcctcctatggtggtgagcttcttctagactcatcttctccttgaagtggngtctcnnnnnnnnnnnnnnnnnnncattccgctgccattcatctcncaagaagcaaaggaatccattgatgaagaagaacttaggcctacaagctccaatggagcttgcatcatgtggtatcaagagcatcttcatgtgttgaggaaanaaacccagagttt

SEQ ID NO: 47061 - DNA, 285 bp, Glycine max
  unsure (1)..(285): unsure at all n locations; Clone ID: 701133240H1
cgnncttggtggccactgtatatnnatnagntntttatnttnttcgttcatgcagttcagttccncaacacantcattttgtanatgatcaaattaangtgntgnggggcatctgttctaggnanagagangagcatgagcatgttgtggaagatgaattacacagaggagtctcggggaggtattgtaggagtggcagcacaaaatggatganggccagaagtttacgtgctaagcccnatcattgtgccggagggggaacatgcccctcnctcaggattgtgc

SEQ ID NO: 47062 - DNA, 213 bp, Glycine max
  unsure (1)..(213): unsure at all n locations; Clone ID: 701133241H1
ccttgtctactgcactgctgggatctcagggggtcacattaacccagcggtgacatttgggctgtttttggctcgcaaggtgtctttgatccgagccatcatgtacatggtggctcagtgcttacgtgctatctgtggagttggtttggttaaggctttccaaaagtcttanntcaacaagtatggtggtggggctaattcctcgnngtgggt

SEQ ID NO: 47063 - DNA, 79 bp, Glycine max
  unsure (1)..(79): unsure at all n locations; Clone ID: 701133242H1
gtatgttcctacnatggtgacatantgggntgcaantgtnantgaccaggtgnagtgantaanatggtgaagcaagtgg

SEQ ID NO: 47064 - DNA, 139 bp, Glycine max
  unsure (1)..(139): unsure at all n locations; Clone ID: 701133243H1
cacaaactcaacagatcgaaaatccataatgtngttgcgtaanaacaattaaaaatgctcccatttgtgtntncttctcttcagggcanaaccaacaaaacctctctctncatnggnatctcnanaaagaatggacccc

SEQ ID NO: 47065 - DNA, 157 bp, Glycine max
  unsure (1)..(157): unsure at all n locations; Clone ID: 701133244H1
gcgagatcttgagtcgccgatttgaaaagatgagtaagcttcagantgatgctttgcgtgaagccatctcaggaatcatggccgattccaaggagaagaatcgcaaatttgtggagaccatcgaactccaaatcggtttgaaganctacgatccanc

SEQ ID NO: 47066 - DNA, 246 bp, Glycine max
  unsure (1)..(246): unsure at all n locations; Clone ID: 701133247H1
acttcatcctattattactttccctctttgcattccaaatggccactgttgaggttgcacagcaaacaccaacaactgtgacagagaatgaaacaacgactgaggtaaccaagattgaggaaactaccccagaacagccagccaccgaggttactgccccagaaacagtcaacgaagnagcaaaagaggaagcagcagttgagactaatgaggcaacagaagttaccagaggaaggaaggctgaga

SEQ ID NO: 47067 - DNA, 295 bp, Glycine max
  unsure (1)..(295): unsure at all n locations; Clone ID: 701133249H1
cgaacacacacgcagagatgntggaagagaattcgcgtggttgggactcaggaggaatggtgttaganaccctaagaaaacgaggttggtgtttggaagatacggaccgattgacggccatcatcgacattcaatccgcactcgctgatgaccgttccagattggtagattctgttgagtcagagctcctaaattccgacctcagatccatcgccgccaagtccttgccccaaccctctcttcttcgcaagcttccatttccttcaggncccaaagtcttcagataanttcagtg

SEQ ID NO: 47068 - DNA, 212 bp, Glycine max
  unsure (1)..(212): unsure at all n locations; Clone ID: 701133250H1
agggccaggtagaattacagnatacttgcnatctggaggtccatttgttagaatggatagccatgtttatcctgattatgtggttcctccaagctatgactcccttcttggaaagctgattgtatgggctccaacaagagaaaaagcaattgaacgcatgaaaagggcacttgatgacactattatcacaggagttcctactacattgatta

SEQ ID NO: 47069 - DNA, 290 bp, Glycine max
  unsure (1)..(290): unsure at all n locations; Clone ID: 701133252H1
gctcttcagccaccataccatagatccttcattctctgcaacgatcaaacccaaaaaacactgcacctcttcttctgggtttgatgggtgcgatcagatttggtgaagaagagagtgtgatttgatgattatgaattgaagtttgaggtggagacatgaacgtgagccatgcttcggttcatccngttgaagaagctccaacgactgaaggtggtggtgctgaccaaaacgtcaacgctcctagggtgaggatgaaggatatccaaggcatgcccggcactgccggtggc

SEQ ID NO: 47070 - DNA, 204 bp, Glycine max
  unsure (1)..(204): unsure at all n locations; Clone ID: 701133253H1
ttcggaancagttagcaatgttcagatttctgattgtgcgcaggggatcacaagagcaacaatcgcaggatggttcttcgcagtcacagtcgtggtatccgccatcggtggtgagttcacctanttnntcgaggcctgttacaccgactgcatcttcttcttcattatcgcagagggcttcgtctcatgttccacacaacatac

SEQ ID NO: 47071 - DNA, 287 bp, Glycine max
  Clone ID: 701133254H1
gcagcttttgcctacaactcccttcaccatggctgaacaaaccgagaaagcttttctgaagcaaccaaaagtgtttctcagcacaaagaagactgggaagggaaagagacctggaaaaggtgggaaccgcttttggaagtccattgggcttggatttaagactcccagggaagccatcgaaggaacctatattgacaagaagtgccccttcactggcaatgtttccatccgtggccgtatcttggctggaacatgtcacagtgctaagatgaacaggactattattg

SEQ ID NO: 47072 - DNA, 199 bp, Glycine max
  unsure (1)..(199): unsure at all n locations; Clone ID: 701133255H1
agaggttaggctatggctgatgagagcgtcgttgagtccccagtgaagaggcagagagatgatgatgaagaaaatgaggtctctgtttccatggatgtngagggtggcaaagaccctcttagtaacggtttatcatctgtgattcctgggtggttctctgaaattagttcaatgtggcctggagangctcactcctgaa

SEQ ID NO: 47073 - DNA, 284 bp, Glycine max
  unsure (1)..(284): unsure at all n locations; Clone ID: 701133256H1
agggtttgatcagactcaagggtttaagccatgggaaaaaggaaggcaaaggcaaagcctcctccaaagaagcgaatggataagctcgataccgtcttcagcngccctttctgcaatcatggcagcagcgtcgaatgccgccttgacatgaagaacttgataggggaagctatttgcgggatatgccaagagagctttagcactaccatncacagctttatcagagccaatagacatatacagtgagtggattgatgnacacngaatggtaaaccacncggacg

SEQ ID NO: 47074 - DNA, 212 bp, Glycine max
  unsure (1)..(212): unsure at all n locations; Clone ID: 701133257H1
cgcgattngctcttctcttggaaaagtnnaaaccagcangtacgaangaaagaacnagagcgatttagaagtgagagaagatggggttgtcgttcacgaagctgttcagcaggttgtttgncgaagaaggganatgagacttctgatggtaggtatcgatgcngctggtaagncaaccntcttgtcacaagctcaaggttggcnaaatcgnc

SEQ ID NO: 47075 - DNA, 153 bp, Glycine max
  Clone ID: 701133258H1
gagcagcttggtaaaggttccaaaaaccattgtgaagagtctctagttacaaatacacaagttaatagtgacttcgaacccataccaagtgttaccaaatatgatgatttggaattcaagtcaagcattatcaagaacgatgattttgaatcg

SEQ ID NO: 47076 - DNA, 225 bp, Glycine max
  unsure (1)..(225): unsure at all n locations; Clone ID: 701133259H1
ccaccaccgtgggaaggtggcgcgtgaggctgtttccggcgacctataccggcggcgctgagtggtgatcaaggaaatgggtcagaggctaagctgcgtgcaacagcagcacgaggagcatggtgtgctcttcccagcacttgcaagtggagaattggaggttgttgaggccatggtggaggaaanccccatgtgttggancacaccactggctgtnnccgcttc

SEQ ID NO: 47077 - DNA, 110 bp, Glycine max
  unsure (1)..(110): unsure at all n locations; Clone ID: 701133260H1
gaaattttngtgaganacaacaaaacnaaaancattncaattcaaagatagtaggctgccangcaccgcacaccgccanncgcactttctccgntcctcanaatttnnnc

SEQ ID NO: 47078 - DNA, 168 bp, Glycine max
  Clone ID: 701133262H1
tctcaatctcctttccaaatggccagcgttgaggttgcacagcaaacaccaacaacagttccagaaaatgaaacaaccgaggtaagcaagacccaggaaacaaccccagtcactgaggctcctgcaacagaacaaccagcagctgaggttcctgcaacagaacaaccc

SEQ ID NO: 47079 - DNA, 285 bp, Glycine max
  unsure (1)..(285): unsure at all n locations; Clone ID: 701133263H1
acagcgctcaaccaaagatgcagaacgaggaaggacagatcactgagctttacattcctaggaagtgctccgccacaaacagattgattaccgctaaggaccatgcttcggttcagatcaacattgggcatgtggatgagaatggcgtctacaatggccatttctccacttttgccctctgcggattcatccgtgctcagggtgatgctgacagtgctctagaccgcttgtggcagaagaagaaagttgaagttaagcaacagtagacacccncgatagtttgtt

SEQ ID NO: 47080 - DNA, 288 bp, Glycine max
  unsure (1)..(288): unsure at all n locations; Clone ID: 701133266H1
gctcagcgaagtcacagcattcagaatcagtatcggagaattttatatttttctctaaatctctctgtaagttgaataatagacatgtctgagactgaggtaatccaactatcagcaagtcaatggattgcctcgaaagcgcttctatcgagcacgagcacacagcaatccactgagtgactctcacttcccagtgccaatttcacccagccatgttgactattctctccattaccctcagttantcccttgtctggtcagctgatagttccaaaaagatccagtttg

SEQ ID NO: 47081 - DNA, 246 bp, Glycine max
  unsure (1)..(246): unsure at all n locations; Clone ID: 701133267H1
ctctctccactcccatatcgnaacaaagtcgttttgagttccgccnaaggatccgtangntgcagcagntatggattnggcatccaatctcggtggcaagattgacaaagccgaanttctctctgccgtncagaagtatgagaagnatcatgtttgccntggaggtcaagaggaagagngaanagctaattataccgatatggttaatananccnatgatctngttnccngctttatgatttggcc

SEQ ID NO: 47082 - DNA, 287 bp, Glycine max
  unsure (1)..(287): unsure at all n locations; Clone ID: 701133269H1
accgtcgcaccttccctgaggcttctcttgtctgtcgcgagtngaccatggtgagggttagtgtggctgaacgatgctctgaagagcatgtacaangctgagaaaaggggaaagcgccaagtcatgattcggccatcctccaaagtncattatcaaattccttttggtgatgcagaagcacggatacattggagantttgagtatgttgatgcccacagggctggtaaaatcgtggttgaattgaacggtagactgaacagtgtggggttattantccccgttttga

SEQ ID NO: 47083 - DNA, 283 bp, Glycine max
  Clone ID: 701133270H1
ggtcttcctgtcacaatgggtgcatatatctatacattgatctttgtcactgttccatcattggcctctgtttataatgagtatgctttgaagagccaatatgatacaagcatttatctgcagaacttattcttatatggatatggagctatattcaattttcttgggatacttgggactgttgttgtcaaagggcctagcagctttgatatcctacaaggtcattcaaaagccacaatgcttttgatagcaaacaatgctgcccaagggatttatcctcttt

SEQ ID NO: 47084 - DNA, 83 bp, Glycine max
  unsure (1)..(83): unsure at all n locations; Clone ID: 701133271H1
cgataatggcaataagaggcataggaatgtcgttctctgctccatcaacaacaagaccanatacttncccctncaacccacga

SEQ ID NO: 47085 - DNA, 280 bp, Glycine max
  unsure (1)..(280): unsure at all n locations; Clone ID: 701133272H1
ttccanntcatcgttatacccctctcaaganagcttggatggatatctatagtcccatatatgancanatganaattgatgtccgtatgaatttnaaggctcgtagagtggagctgaagacaaggcctgatacacctgatattagtaacctgcnaaaatgtgctgattttgtccatgntttcatgttgggtnttgatgtcatagatgccattgctcttctgcgtntggatgagctctacattgagtcctttgagatcaaggatgttaaaacacttcgagg

SEQ ID NO: 47086 - DNA, 130 bp, Glycine max
  unsure (1)..(130): unsure at all n locations; Clone ID: 701133275H1
ttgcattccaaatggccactgttgaggttgcacagcaaacaccaacaactgtgacaganaatgaaacaacgactgangtaacccagattgaggaaactaccccagnacagccanccgcacgaggttcncc

SEQ ID NO: 47087 - DNA, 272 bp, Glycine max
  unsure (1)..(272): unsure at all n locations; Clone ID: 701133276H1
ttatgtgcaaagggtaaaggatgaagaaggtgaaggatgcaatcttcaaggatctcttgaagttaataaagtagcaggaaattttcattttgcaactgggaaaagctttcttcagtctgctatatttctggctgatgtgctgcttacaggataatcattataatattagccatcggatcaacaaattaagttttggtcaccatttccctggattggtaaatctcttgatggggtaaggngggtgcaaggacctatcatggcagtnccagtnt

SEQ ID NO: 47088 - DNA, 279 bp, Glycine max
  unsure (1)..(279): unsure at all n locations; Clone ID: 701133278H1
gcggtggtaccttacaccaccggttctgcacctcttctttctcctccttcctacttctagtgttgccacaaagctctactccgganngaaacttcaagctgcgagtcctttcggagctgcaaaacctaacgtaaccgctgagttttatggaaaagttcacaacactcttcactgtcggtatgctaaccacaatacancaatggcacgtattcgaatgatgccaatagggactcctaaagtcccctataggacacctggtgaaggaacttggcaatgggt

SEQ ID NO: 47089 - DNA, 85 bp, Glycine max
  unsure (1)..(85): unsure at all n locations; Clone ID: 701133279H1
tgggtccctatggttcaagaaattgcanggttnagagtantcacaagnngagnaattggctaanctaccanaatnggagcnaaaa

SEQ ID NO: 47090 - DNA, 75 bp, Glycine max
  unsure (1)..(75): unsure at all n locations; Clone ID: 701133280H1
ctcggtaagaaaaaggatgaagaagacaagcctcatcctcaggagacaggtnatcgccaccgactttncaaaaac

SEQ ID NO: 47091 - DNA, 219 bp, Glycine max
  unsure (1)..(219): unsure at all n locations; Clone ID: 701133282H1
attcgttttgccccttttgttgccctaatttcaaccatgcctcgccgtagctccggtngaagatctgcccgtnctgctcctcgggaagctcntcgtcctgctccagttcaccatgctcctcctncagcccctgctcagagtggtggtggatctangcntggtggcattggntcaaccatagctcaaggnatggtttnggnaccggaacngcagnngcac

SEQ ID NO: 47092 - DNA, 277 bp, Glycine max
  unsure (1)..(277): unsure at all n locations; Clone ID: 701133283H1
gaaggccttcaggttctgaccttggaggatgttgtttctgaggctgatatctttgtcaccaccaccggtaacaaggacatcatcatggttgaccacatgaggaaaatgaagaacaatgccattgtttgcaacattggtcactttgacaatgagatcgacatgcttgggctggagaataccccgncgtgaagcgcatnaccatcaagccccaaataacaangggtcttccctganacnacaccggtancatngnctgncngangccccncccgaattc

SEQ ID NO: 47093 - DNA, 281 bp, Glycine max
  unsure (1)..(281): unsure at all n locations; Clone ID: 701133284H1
aaaatggcagatattcctcgggtgaagcttggaagccaaggcctggaggtttccaagttaggatttggttgtatgggcctaagtggagtgtacaacgatcctgttcccgaagaggttggcatctctttgatcaaacacgcattcacnaaaggggtcactttctttgattctgcagatttttatggagcacgtgccaatgaagttttggtcggaaaggctctcagggactttcctcgagatcaatttcagattgccacaaagtttgggatgtcaaaatggac

SEQ ID NO: 47094 - DNA, 273 bp, Glycine max
  unsure (1)..(273): unsure at all n locations; Clone ID: 701133285H1
tttcgcttttccattccaacctctttcanacttcagatctgtttcttcatcggntgttccaagtaaatggcctttgtcacnactgctgaagtgtgtgatgcgaacccacagttaattttgagtggggagcttcgtgcccttcagncagtttttcagatttatggccgtcgacaggttttctctggacctanagtnnncttgaaggtgtttgaagacaatgttttggttcgtgagttccttgaagagaaaggcaatggaagagttctattgttg

SEQ ID NO: 47095 - DNA, 279 bp, Glycine max
  unsure (1)..(279): unsure at all n locations; Clone ID: 701133286H1
gcgtgtgtgagagagaatcagaatcagaagatgaagaaagaagacacaccgaagctgatcagttccgaangtttcgaatttgtggtcgacaaagaagctgcaatagtttcacagaccatacataacatgcttacttctccagggagtttcgctgagaggcagcacggcgaagttacctttcctgagatcagcaccaccattctcgagaagattgccagtacttttattggcatctccaatcgccagtgggaaggagacggaattttccattgaacctga

SEQ ID NO: 47096 - DNA, 247 bp, Glycine max
  unsure (1)..(247): unsure at all n locations; Clone ID: 701133287H1
agaacgagacatgttccttcaccgatttcccagaggacattcaggtgtccatcctctcgttcctgggcncatcggagatcgcaaccctagcctgcacctcgaagaaactgggctctctctgctccaccgtctccaagctctggttctctatgtgcgagcgcaggtggggctcaacacccgcatcaccaatggccaaagccgcattctnaagaattanaactcacgtggaattctggtttggcgaggg

SEQ ID NO: 47097 - DNA, 280 bp, Glycine max
  unsure (1)..(280): unsure at all n locations; Clone ID: 701133288H1
ctgtnntaactgtccctcncaaagccttggccattnttataatcaacagccaaacccacgagatcttaattgatctaaaggcaaggcgcattgncctccgacaatattcactccgggaatggcttccctaccctttccgttgatgaacaagtcnttgccatagagctgccactganatacggtccnttcattgagtcagtgaacaagagagggctgaacctctctgaggtggtgtgttccacattcanaaaaanntcaaanngagaaancaaggacagaa

SEQ ID NO: 47098 - DNA, 172 bp, Glycine max
  unsure (1)..(172): unsure at all n locations; Clone ID: 701133289H1
ggcgcatacaagaacattactttggttttaggtccaaacatgctgaaatggttatgtcccacggcagtaagccatctgnaggatggggttagcttccccacgntacgtgataattctacaactttctggtctggccaagtcangnaccanagcaggtcatgcatatggatcc

SEQ ID NO: 47099 - DNA, 200 bp, Glycine max
  unsure (1)..(200): unsure at all n locations; Clone ID: 701133294H1
ccatttctcttcacaattatccctttttccactctgacgccatntnattattcantncatataaattaggctcnctnatcttccatnccaattantatnagattctgcntccgttattttntcnctcttcttcacttcctctttactattcgttcgttctggatnccagtangagggaanaaangtgggtggtngnaggc

SEQ ID NO: 47100 - DNA, 275 bp, Glycine max
  unsure (1)..(275): unsure at all n locations; Clone ID: 701133295H1
caagaattcagccccattgagtggtgttgtgagcaaagcaagtgcgggatcanttgaattnctggaacttagatattggaagaatatgatgcaattcttagtgtctcaggctgaaaatggttggcgngttcttgggggntctgtctcctccaaacccattgcttggatgaggttgtgcctggtncaacgaccattcttgtnttaggtagcgagggcactggtttnagaccatnngtggagagatcagtactcagttagttaggttccctgggnac

SEQ ID NO: 47101 - DNA, 91 bp, Glycine max
  unsure (1)..(91): unsure at all n locations; Clone ID: 701133296H1
atttgcttgcagggtgaagattgccctcnagttgaanggagtnaaatannaantactgtggaagaaaatttgagggaacaannagtgaact

SEQ ID NO: 47102 - DNA, 288 bp, Glycine max
  unsure (1)..(288): unsure at all n locations; Clone ID: 701133301H1
aaactttcaaaccccatttttattttttttatctctctttctcgtgtgcctttctagtgtcttgggatttcctggttttctgtttctttctgggtctttgttgagagatatttctcccttcgcagttgtggtgtgatgctttcagatccttcaacagtgttggttgattgacaccattgttctcttatgcaaaatattgtcatcaaangctctcatcattncnaancncctgattcanaanagangtccagancaacaaatactttngactacnatncgaggcnaagg

SEQ ID NO: 47103 - DNA, 279 bp, Glycine max
  Clone ID: 701133303H1
gcagatggcactgcaacaagcacaaaggaaaatgaagattgcccattatggaagatccaaagtctgcaaagtttgaaagagttgttcctcttgatccttcaaacactagtcttgcatcaaagccaactgaggaggagaagagatgcagctttatcacacccaattcagatcccatctatattgcttatcatgatgaggaatggggagttccagttcatgatgacaagatgctgtttgaacttttagttttgagcggtgctcaagttggatctgattgga

SEQ ID NO: 47104 - DNA, 283 bp, Glycine max
  Clone ID: 701133304H1
cttctgtgctcgcccttgtattccttcttgtcatactatttcaggaaggattggtaacatgtatgaagaatgaagacggatcagaagaatggggatatgtgcaagttagaccaaaagcccacttgttctggtggctttacagaagtccatacagagtggagaatccctccaagccttggccaatcattctctggcttcagggaggaccaggctcttcaggagttgggtttggaaattttggagaggttggtccttggatgctaatttgaagccacgaaatttc

SEQ ID NO: 47105 - DNA, 283 bp, Glycine max
  unsure (1)..(283): unsure at all n locations; Clone ID: 701133305H1
tttggagtctcaagccttccctgattcagtgaatcagcctaatttcccttcaacaattgtgacaccagaanagccttacaagcattatatgctttttaagttttccaccaaaaatcnctacattagttcaaagtgagataggaggagtgagctttcccccatttttaatgtgccatcgtaagtcagtgtagcatttataactttggatttcatccaaacttggggtccttttagaatgaataattagagtcccatggttagtctcataattggtggcagcttc

SEQ ID NO: 47106 - DNA, 84 bp, Glycine max
  unsure (1)..(84): unsure at all n locations; Clone ID: 701133306H1
gaacctcaatctccaccttcacaccttccacacaacatcacgagcnngcgaaagggggatgtgctggtanacgaaaangnnang

SEQ ID NO: 47107 - DNA, 262 bp, Glycine max
  unsure (1)..(262): unsure at all n locations; Clone ID: 701133307H1
ggnctgattgtgtgtcacagcaacacntgagggattatgtacgcctaaatgcatgccttgataataagctcaataccccaaatcctgattgcattaatggcttgtgatctgcatgtcagcgatcatatggtaacaccaggcattaaagttttgaaggttaagtgtatttggaaagtgtaagtttacatgatcatggaatatggctacattagagtactaggcaaaatgctatttttgtttggagtttcagaaggttttctga

SEQ ID NO: 47108 - DNA, 259 bp, Glycine max
  unsure (1)..(259): unsure at all n locations; Clone ID: 701133308H1
tgcccctttcattttctntgcatnngtagtatctatcaccaatcaattccactgcttcntcccatatcaacaacaaaaaatcaatctgggaaacaaaaacaaaatgccgtcattagaggaggaactcttcccatcaaccccaggaaagttcaagatcgagcggtcccaccacatgaaccgccaactctatcgctgtttcgcctccaccagcaccatgttcctgtgggccctcttcttaatcgccctcaccgcttcctat

SEQ ID NO: 47109 - DNA, 279 bp, Glycine max
  Clone ID: 701133309H1
gggtgccctgagatcactttgagcaatggtgaaggctgtggcagttcttggcagcagcgagggtgtcactggaactattttcttcactcaggagggaaatggtccaaccaccgtaactggatctcttgctggtcttaagcctggtctccatggcttccatgtccatgccttgggggacactaccaatggttgcctgtcaactggagcgcatttcaatcctaataacaacgagcacggtgcccctgaggacgagaatcgtcatgctggtgatcttgggaa

SEQ ID NO: 47110 - DNA, 282 bp, Glycine max
  unsure (1)..(282): unsure at all n locations; Clone ID: 701133310H1
ctctctntnagcaaagccttcctagaacgatggganaaaannngagcaatttnccctcaccaaagangangaagcaaacaatggccgatcaanttaccgntgaacagatctccgagttcaaggaagccttcagcttgttcgacaaggacggcgatggttgcatcacaaccaaggagcttggaactgttatgcgttcattggggcaaaaaccccaactgagggcagagtccaggacatgatcaatgaagtggatgctgatgggaatggtaccattgacttccc

SEQ ID NO: 47111 - DNA, 268 bp, Glycine max
  unsure (1)..(268): unsure at all n locations; Clone ID: 701133311H1
aactgagctgaggcttggactgagactaggactccctggaaatggagccgcnccaacaactgaagctgctgcggaattaggagtgaggaagagagggttctctgaaactgaaaccgatgaaacaacctccgttgatttgatgcttaacctctctcccaaggaannnnnnnnnnnnnnnnnnnnnnnnngagcagatccacgtgagaatccaaagacttcgccgaaggagaagaatcttcctcttctcgatcccgcaaagcctcctgcc

SEQ ID NO: 47112 - DNA, 278 bp, Glycine max
  unsure (1)..(278): unsure at all n locations; Clone ID: 701133312H1
cctctctgnggtggtgtgttccacattcacaatgggctnngtttgganaaaccaaggacagaaggacagtgagagtggaatgcttcatgaaagaaagcagccccaatatctgggtgaggcctatcagtggactcacaatggtggttgaccttgaactcatgaagatcgttcagtatcacgacggtggcattataccagtaccaactgccgacaacactgaataccgcttttcacatcagaacccaccanttcggtccacacaaaancnnnnngcaaaa

SEQ ID NO: 47113 - DNA, 275 bp, Glycine max
  Clone ID: 701133313H1
ctgccagtagtcatatgcttgtctcaaagattaagccatgcatgtgtaagtatgaactaattcagactgtgaaactgcgaatggctcattaaatcagttatagtttgtttgatggtatctactactcggataaccgtagtaattctagagctaatacgtgcaacaaaccccgacttctggaagggatgcatttattagataaaaggtcaacacaggctctgcctgttgctttgatgattcatgataactcgtcggatcgcacggcctttgtgccg

SEQ ID NO: 47114 - DNA, 276 bp, Glycine max
  unsure (1)..(276): unsure at all n locations; Clone ID: 701133314H1
ttccacttgtctccgaattagttatcttgagaaacattattncccattgctatatattatggctagcatgaaggttacatgggtggttgtgatcatgtgcatggccgtggtgggtgcaccgatgatggcgcaagccatggacatgcaatgatgtgacggtgaacatggcacagtgcctatcctacctgatgcagggaggaacaccttcaacactttgctgcagcggagtcaagaacattcttggctctgctgtcaccaccgttgacaaaccaactg

SEQ ID NO: 47115 - DNA, 277 bp, Glycine max
  unsure (1)..(277): unsure at all n locations; Clone ID: 701133315H1
gaaagtgcttgtnttgtttgttgctacagttttggtagcatatgaatgccatggctcagactaccagaagttccctctccaaatgaaaactgggtttggtgggcaatacagcaatgaggtggcatgtgccagttggaggcttggcgtggaagcaaacaacgtagtcaagtggcaaactgttcctgcagcttgcggagagtacatagctgactacgttctaggagaccaatatagatcagattccaaaacagttaaccaacaagcttatttctatgct

SEQ ID NO: 47116 - DNA, 279 bp, Glycine max
  unsure (1)..(279): unsure at all n locations; Clone ID: 701133316H1
ggagttaggttctgcacgctctgcttccagcgagtgttctttcttcgtttcaacaccttaatttgcacacgctgcttcttcngcttgagaaatggcacaagaaacctttctattcacatctgaatctgtaaacgagggtcaccccgacaagctgtgcgaccagatctctgatgcagtgctcgatgcgtgccttgaacaggaccctgacagcaaggttgcctgtgagacatgcaccaagaccaacatggtcatggtctttggagagatcacaaccaaggc

SEQ ID NO: 47117 - DNA, 286 bp, Glycine max
  unsure (1)..(286): unsure at all n locations; Clone ID: 701133317H1
agattccgngagttgcaaaaatgaagacgattctttccaccgagaccatgaacnntcccggacggcgtgagcatcaaagttcatgccaaggtcatcgaagttgagggcccccgcggaaaattggtgcgagacttcaagcatttgaatctcgattttcagctcattactgacgaaaacggtaaaagaaagctgaaaatcgacgcgtggtttggttctcggaaaacatccgccgccattcgcaccgccttgagccacgtggagaatctatcaccggcgtcaccaaggg

SEQ ID NO: 47118 - DNA, 284 bp, Glycine max
  unsure (1)..(284): unsure at all n locations; Clone ID: 701133318H1
cgataagcaaccaaaccgacgtcgctctgagcatcacaaagctcctgttgtcgaaaaacgctcgggacagtaacctcgtgtactcgccgctgtcgttgcacgttgttctgagcatcatcgcttctggctccaagggccccacactcgatcagcttntctccttcctccgatccaagtccaccgaccatctcaanncttcgcctctcagctcgtcgccgtcgtgctctccgacgccgctcccgccggcgggcctcgcctctccttcgccgacgggtgtgggttga

SEQ ID NO: 47119 - DNA, 285 bp, Glycine max
  unsure (1)..(285): unsure at all n locations; Clone ID: 701133319H1
gattccagatcctgaanctcngccaacaacccaaagataaaaagcacaacacaagacactgaactcgcactcanctgggttttcaaccatggatgcgatacggaagcagctcgatgtgttgatgggagccaaccgtaacggcgacgtccgtgaagtcaatcgcaagtactacgatcgcgacgtctgtcgtctctacctcgtcggtctctgccctcacgaactcttccagttaacgaaaatggntatgggcccttgccctaaggtccactccttgcagtccngaaa

SEQ ID NO: 47120 - DNA, 273 bp, Glycine max
  unsure (1)..(273): unsure at all n locations; Clone ID: 701133323H1
gtttcgtgatttctgtctcacctggaaanggaatatcaagaagaagaattgtttatctacatcngattcaagtccatgaagccancaatcatcgtctttgaatccatatgcaacgtcatangttcctctctctaaaaggggagtngatggtagaacaccttcgactgaaaaagattccaagacttataatgggacagtatggtttcagactcatcagggtgccacaaatgatccacaacttatcaanatagcttggaaaggctctcgaaatcc

SEQ ID NO: 47121 - DNA, 278 bp, Glycine max
  unsure (1)..(278): unsure at all n locations; Clone ID: 701133325H1
gctagctattagttcgattttgtagtaagtgaggtgccaatatggtgaagatagctcttggtactttggatgactcttttagcgctgcctctcttaaggcttatttcgcagagttccacgcaactctgatttnccgtgttcgctggtgttggatcagccatcgcttacaacgagcttacaaaagatgcagccttggatccaacggggctggtggcagtagctgtggcacatgcatttgcactgtttgtaggtgtctccgtcgccgccaacatctcagg

SEQ ID NO: 47122 - DNA, 102 bp, Glycine max
  unsure (1)..(102): unsure at all n locations; Clone ID: 701133326H1
gccagtactccgataacttcctcgacagctcatccnnaggcaacaggtggctccagtcggctggccttcaacaccttcaatnntannaacaatcaacntact

SEQ ID NO: 47123 - DNA, 273 bp, Glycine max
  unsure (1)..(273): unsure at all n locations; Clone ID: 701133328H1
gaaagtgcttgtnttgtttgttgctacagttttggtagcatatgaatgccatggctcagactaccagaagttccctctccaaatgaaaactgggtttggtgggcaatacagcaatgaggtggcatgtgccagttggaggcttggcgtggaagcaaacaacgtagttcaagtggcaaactgttcctgcagcttgcggagagtacatagctgactacgttctaggagaccaatatagatcagattccaaaacagttaaccaacaagcttatttct

SEQ ID NO: 47124 - DNA, 278 bp, Glycine max
  unsure (1)..(278): unsure at all n locations; Clone ID: 701133330H1
gcatccctcttgatttgtagtttgnctttgtgctttagataaaagtccctgccaaatcaagaggggttttaagatccatagtgtgtgttttgcaacaatggctaagttcnntgctgctatgatcttggcactcttngccatttccatacttcaaacagtgntaatggctgctaatgaacaaggaggccacttgtatgacaacaagagcaaatatggaagtggaagtgtcaagagttaccaatgcccatcacaatgctcgnggagatgtagccagaccc

SEQ ID NO: 47125 - DNA, 276 bp, Glycine max
  unsure (1)..(276): unsure at all n locations; Clone ID: 701133331H1
gcttggtgatgtccctttctgttctcttcactcttggtcttgcgagagaaagccatgccagagacgaagatttttggcatgctgtttggccaaacactcccattccaagttcattncgagagnttctaaagcctggccctgcaagtgttgaaatcgatgatcaccctatgcaaattgaagaaacacagtacccgaaaaccttcttctataaagaagaccttcatccaggcaaaacaatgaangtacaattcagcaagcctccctttcnacaaccat

SEQ ID NO: 47126 - DNA, 230 bp, Glycine max
  unsure (1)..(230): unsure at all n locations; Clone ID: 701133332H1
gattgaagaagatgccgattcagaaacatcgccatcggaaggcctgaagaggctactcaccccgacacgttgaaggcggggttggctgagttcatctccaccttgatcttcgtgttcgccncttcaggttccggcatcgcctacaacaagctcaccgacaacggcgccgccactcccgccggcctcatctccgcttccatcgcccatgctttcgccctcttcgtcgccgt

SEQ ID NO: 47127 - DNA, 144 bp, Glycine max
  unsure (1)..(144): unsure at all n locations; Clone ID: 701133333H1
ctnagttcncctctctantctaagttggtgagtagttnnnggtgaaggagaagaaggagtggctttatctttttgtgggtaaggatacagcagcatgcggtggnngcttagtctttctgttnatgtattccacacaacatangg

SEQ ID NO: 47128 - DNA, 271 bp, Glycine max
  unsure (1)..(271): unsure at all n locations; Clone ID: 701133335H1
ttgatttggaggcaagtnaattcactgcacggatcttaggtgatgatctagaccctttgcaatcccctaaccaatcaaaggatttgactagcgaaggtgcattgaaagaggacttggaatccaaggcagagttgtgaacatgatagacaaaagttttgtgcaagtcaaagttcctgaaaaaaaaaactgttccttgatgcaattggcaccgcatagcatcatgatatctttctgatcatggactgcctggctgatatatttgcattcccac

SEQ ID NO: 47129 - DNA, 282 bp, Glycine max
  unsure (1)..(282): unsure at all n locations; Clone ID: 701133336H1
ggnagagagtattggcgcttcatcaagatgggtatttctagggattccatgcacaagangaatnnnaatncgtggcaagaaaaaggcttggagaaagaagagaaagtatgngcttgggcgtcaggcagcaaacaccaagttatcaagcaacaagacaatcaggaggattcgtgttagaggtggcaatgttaaatggagggcattgaggctggatactggcaattactcatggggtagtgaagcagttactcgcaagactcgtattctagatgttgtttacaa

SEQ ID NO: 47130 - DNA, 278 bp, Glycine max
  unsure (1)..(278): unsure at all n locations; Clone ID: 701133338H1
ctccnaagggnanaaccttncctggctgtgttaatatgcgtntnagcactgtcantcagtncttncngntgcgngggaagggnaaaataatggccttgttangaacttctacaaggaatcatgccntcaggctgaagacatcatcacagnacaagtcanantncnctacaagcgccacaagaanactgcttnctcctggntcaggaacatctccatgcantgcgctgttcagagttgtgagntngaanagtggctggactccacaagtttgagttnnc

SEQ ID NO: 47131 - DNA, 85 bp, Glycine max
  Clone ID: 701133340H1
gcttcacgcaggctcgtatcttctctgattcgatcctcccttcgtagatctcaatcgaagccctcaatttccacacaacatacgg

SEQ ID NO: 47132 - DNA, 276 bp, Glycine max
  Clone ID: 701133341H1
gttcaaagtctgctttccaagtctatgacagcatcatagtgtcttccacgtcaccatttccatataacctatacctcacagccacacttacccttgaagattttctccgaccatcgggactattacatatgcctgccttcagattgtgatcacaggtcttggagcagccttaatagataaagctggcaggaagccccttcttctattatccggatcgggattggtcgcaggatgcacatttgtagcagttgcattctatctcaaggttcacgaggt

SEQ ID NO: 47133 - DNA, 271 bp, Glycine max
  unsure (1)..(271): unsure at all n locations; Clone ID: 701133343H1
cggctcggggcagngcacaacatcgattatccaaatgggcgaanaaaggccttggttccggaatcggtggtgaagaaggagaaaaggaacgaggagtgggctttggcgaagaagcaggaactcgatgccgctaagaaaatgaggttcgaaacgcggaagctgatttttaacagagccaaacaatataaanggaatacgacgngcagcaaaaggaactgattaggttgaagcgtgaagccaagcttaagggagggttttatgttgaacccga

SEQ ID NO: 47134 - DNA, 272 bp, Glycine max
  unsure (1)..(272): unsure at all n locations; Clone ID: 701133344H1
ccattttgccccttcctcctttccttgtttccgaggagggccaaccacatatgctaaacaaggaaactaaattctaacctccttcagatctacaccacccttctcttttttttccagtttcataaattctacaccatgggcacggtngttctacggccacaagattgtttcacccaccgcatcgctgttccaccggcggggttttcccggagaagaacctctgggacacacaacaacaattacttcaggggcacgcggaagccggttacccg

SEQ ID NO: 47135 - DNA, 271 bp, Glycine max
  unsure (1)..(271): unsure at all n locations; Clone ID: 701133347H1
gggaataggagagagtgtngtcatactcangaatttgaacgcantcctcngngggaaacaggtacagaagaagagtgtcnncntaggattnagacggttaaacctaataataatcataggaaccgcgagantcgtcaggttgagcagttgcggtacccgggttatggntctgagaatggaaatggtttttacagggggaaggagcagtattttggtcatggggtgaagggggaagagagagaggagagccctgttgagattgatattcttt

SEQ ID NO: 47136 - DNA, 273 bp, Glycine max
  unsure (1)..(273): unsure at all n locations; Clone ID: 701133348H1
agcggtcgtcggtgcagatcttggtggtagtagcaaatattcaaatgagaactttgaaggccgaagaggggaaaggttccatgtgaacggcacttgcacatgggttagtcgatcctaagggacgggggaagcccgtctgatagcgctctgtgcgcgtactccgaancggaatcgggttaaaattcctgaaccgggacgtggcggctgacggcaacgttagggagtccggagacgtcggcgggggccccggaaagagttatcttttctgtttaa

SEQ ID NO: 47137 - DNA, 280 bp, Glycine max
  Clone ID: 701133349H1
caaaaacctactatggtgttgatatgagcactttaacgaggcctttttcggaggagcagagaaaatactatctacagacatcattgtggaacaaccttcatccacatcaagtcgtaggaactgctggtataataaaggaaattgattgtttaactgccacggtggctgacatagagaaagtcagatcagatttttcaatgtcaataaccgtggataacacaaagttatgtggatttggagggtggtttgatgtacattttcggggaagaagtgaggatcc

SEQ ID NO: 47138 - DNA, 281 bp, Glycine max
  Clone ID: 701133350H1
cgctcgcaaacgcaaataataaaaaacaaggttttagccatggcatcgaagcggatcttgaaggaactcaaggatctccaaaaggatcctcctacctcatgcagcgccggtcctgttgctgaagacatgtttcactggcaagcaacaattatgggtcctccagacagtccttatgctggaggtgttttcctagtcactattcatttccctccagattatccctttaagccacccaaggttgcattcaggacgaaggtatttcacccaaatataaatagcaa

SEQ ID NO: 47139 - DNA, 279 bp, Glycine max
  Clone ID: 701133351H1
cttcgatcaaagggaagaacaaacattcaattcatggcggctgcaaagcttcaagctttatggaatcacccagctgggcctaaaaccattcacttctgggcacctacctttaagtggggcatcagcattgccaacattgctgatttctcaaaaccacctgagaaactttcctatcctcagcaaatagcggtcacagctactggaattatctggtctcgttacagcactgtaatcaccccaaaaaattggaacctgtttagtgtaaacattgcaatggca

SEQ ID NO: 47140 - DNA, 277 bp, Glycine max
  Clone ID: 701133352H1
cagttctctagaggattctattcggtgaaatagaatacgaactacgaagtgcaaacatccgaagacaccgagcgacaaagatcgacgatgacggacgaaaccgaagaattggaaccgttgtttgattacagccgggttcagcctctgaaccccatcgacctcgatgatggctttgatgattacgaggatgtgatttgcgttgatagtaaaaagaggaagaattcccaggctgttgggaatgagaagactaatgggaaaggagtaacagtggtggaca

SEQ ID NO: 47141 - DNA, 277 bp, Glycine max
  Clone ID: 701133353H1
ctgactcaactggagcatacacaatgtacgtggacgaggatcacgcagatcaaatatgcagtgccaagcttgtaagcagccctcaccctcaatgcaaggaagtcaccccgggccgcgacgaagccgtcgttattctcacccgctacaacggcattgcatccgatgataggttcgccaatgccatgggcttcatgtctcaggaggttgcttctggctgtgctgaggtcctcaggcaatacgaggagttcgacaatgagaattaattacgtaattaatt

SEQ ID NO: 47142 - DNA, 108 bp, Glycine max
  unsure (1)..(108): unsure at all n locations; Clone ID: 701133355H1
ggcacccgtctaatacactgcaacaggaatccngtagagagattctcactctagaattacgtttactaatttttctacgtttaaacgcggaatccacacaacatacgg

SEQ ID NO: 47143 - DNA, 277 bp, Glycine max
  unsure (1)..(277): unsure at all n locations; Clone ID: 701133356H1
ggttgattgaacatccaaattntttgncaactnannnttacattggtggcgattcatactactggcattactattccagcaattgttcaagancatttctctaggaaatgaaaaagggctccaaccatggataaatctccagggatacctgctggggaatccagcaacaactcgaaggcatgaaaactatcgaatatcctttgctcatggaatgggacttatttctgatgaactatacaggtcatgcaaaaaaattgtaaaggagagtacataaatg

SEQ ID NO: 47144 - DNA, 270 bp, Glycine max
  Clone ID: 701133357H1
cggggttggatttgtgcatgaccaagatcgttcttgtggtagaactaacactttgcatcttcaaaatgctcctaaaagccctagctctctctcctttttgctctccgtgcgagcttcagaaagtagatcagatgccgttgttgttcagagcaagggtcgatcgtctttttctcaaacagctgctgtgaggcatcttacaggttctgttaccagagcccatggacttcgttttgctgtggttgttgctagatttaatgaaattgttaccaa

SEQ ID NO: 47145 - DNA, 196 bp, Glycine max
  unsure (1)..(196): unsure at all n locations; Clone ID: 701133358H1
cagccaaagaagagaacgttcaagnagttcagcttcaggggggtggatctggacgcgcttctggacatgtccactgacgaactcgtgaagatgttcagtgctcgcgcacgcagaaggttccagagaggtctcaccagaaagcccatggccttgattaaaaagctccgcaaagcgaaaagggaagcaccagcaggtg

SEQ ID NO: 47146 - DNA, 265 bp, Glycine max
  unsure (1)..(265): unsure at all n locations; Clone ID: 701133359H1
gcggctagggttttagcgcanttcttctagatttaaggnagatgggtaaggnaaaggttcacatcagtattgtggtcattggccatgtcgactctgggaaatccactaccactggtcacctgatttacaagcttggaggcattgacaagcgtgttattgagaggtttgagaaggaagctgctgagatgaacaagaggtctttcaagtatgcctgggtgctggacaaactaaggctgagcgtgaaagaggaatcaccatgatattg

SEQ ID NO: 47147 - DNA, 268 bp, Glycine max
  Clone ID: 701133360H1
aaacagagacgcaaaatgaagacgattctatcgtccgagaccatgaatattcccgacggcgtgagcatcaaggttcacgctaaggttatcgaggttgagggccctcgtggaaaactcgtgcgagacttccaccatctgaacttggacttccaacttattaccgacgatggcggtaaaaggaagctcaagattgattcttggtttggttctcgtaaaacctccgccgccatccgcaccgccctcagccacgttgagaatttgatcaccg

SEQ ID NO: 47148 - DNA, 100 bp, Glycine max
  unsure (1)..(100): unsure at all n locations; Clone ID: 701133362H1
tttccagtcncangaaatctagagtgattntcttgggtgaancaaggccaatgggagtgaagggtctcgntgatttgaaanntngcaagtgtnnnntcag

SEQ ID NO: 47149 - DNA, 271 bp, Glycine max
  Clone ID: 701133363H1
ctgtcactgagaaaggatctctatctacgaaggagcggaataaaacccttctctctgtgattaagagaatggcttcagatcggaaacttcacacttttgaggaggtggcaaagcataaccagaccaaggattgctggctcatcatttctggcaaggtgtatgatgtcacccctttcatggaggatcatcccggaggtgatgaggttttgttatctgcaacagggaaagatgcaaccaatgactttgaagatgtggggcacagtgattctgc

SEQ ID NO: 47150 - DNA, 275 bp, Glycine max
  Clone ID: 701133365H1
agagcttgctgtctcttctctctctctttggtgacattcatctctttctttctctatttgttgttcaaagttagtgaaccttttctatttggaatcaaagtcttcaactttggctatctttttgttcaagtgattcctctcctgttggtgggtgtggccagaatttccaaaggagagaccaaaaactatgctgccttgttcttctcagtggctttctctgctgtgcctctgatcctctatattccaccactcagaagctgaacctcttgttgaaa

SEQ ID NO: 47151 - DNA, 278 bp, Glycine max
  Clone ID: 701133366H1
gcgcaatccctcgccttcccaatcccaaatcctcagcctcacactcacacatacacacatctgaacgcgtatcgtccctcccatggcttcaaagcgcatcctcaaggagctcaaggacttgcagaaagacccaccaacttcttgcagcgctggtccagtagctgaggacatgttccattggcaagcaacgattatgggtcctgctgatagtccttatgctggaggtgtattcctagtcactattcactttcctccggattatcctttcaaacctccca

SEQ ID NO: 47152 - DNA, 276 bp, Glycine max
  Clone ID: 701133367H1
ctagcactctcttctgcagctttcgccgacagcttcattcaccatggctgagcaaaccgagaaggcttttttgaaacaaccaaaagtgtttctcagctcgaagaaaactgggaagggaaagagacccggaaagggtgggaaccgcttttggaaatccattgggcttggatttaagactcccagggaagccatcgaaggaacctacattgacaagaagtgccccttcactggcaatgtttccatccgtggccgtatcttggctggaacatgtcacag

SEQ ID NO: 47153 - DNA, 237 bp, Glycine max
  unsure (1)..(237): unsure at all n locations; Clone ID: 701133369H1
tgaatacaccctccacaaccaccnctannntcanctttaaatagcctattgattaatgtcttatagtcttctatgaataagatcttcagattttgttacagtttttcaaattattctgtggcaaggagagaagaaaagatcatagaaagtggtgattcttcgaatattgaagagagaaatatggggttgagattgaaggagacattctacttgtcccatggagcaccaactcttgcc

SEQ ID NO: 47154 - DNA, 272 bp, Glycine max
  unsure (1)..(272): unsure at all n locations; Clone ID: 701133370H1
catgggccnagctctctatctgtctggtttgtaagattcaattttagcatgaatggtttttgaaggttaattatagacggaacctctacaacttgcaactcaatctccttctttgttgctggtgtccccaatatttgctgggtctgcaaacgaccgggttcacccaaatttgttcgccatgttatctggagtttaccaagaacattacttccttcaacttttgtttgnggcgaaccatctgataacgttttcaattggatagagatagttgt

SEQ ID NO: 47155 - DNA, 275 bp, Glycine max
  unsure (1)..(275): unsure at all n locations; Clone ID: 701133372H1
cctagctagggtttggaagaagctgatccgagangatggtgcagcgtctcacctaccgcaaaacgccacagctatgctacaatcancaaccagcacagagtcgtcaagactcccggtggcaagcttgtttatcagaccacgaagaagagggncagcgganccaagtgccctgtcactggaaagaggattcaagggattccacatttaaggccagcagagtataatagatcaaggttacacagaaaccgaaggactgtgaaccgtgcatatggtgg

SEQ ID NO: 47156 - DNA, 268 bp, Glycine max
  unsure (1)..(268): unsure at all n locations; Clone ID: 701133374H1
cccanagannanaagcacaacacaagacnctnaantcgnantcnggaaggtnttcaaccatggatgcgatacggaagcagctcgatgtgttnatggganccaaccgtaacggcgacgtccgtgaagtcntcgcaagtactacgatcgcgacgtctgtcgtctctacctcgtcggtctctgccctcacgaactcttccagttaacgaaantggntatgggcccttgccctaaggtccactccttgcagctccngaaagaatacgaggag

SEQ ID NO: 47157 - DNA, 266 bp, Glycine max
  unsure (1)..(266): unsure at all n locations; Clone ID: 701133376H1
ctttttttatttgggtacaataattttctattcttgttttatatcanggggtggtcgacttaaaagtagtacaagcttaattccccccaagtaagatcttgaatttgatctgtatgggaaaaaaaatataggacgagctagtcccaccatactgtgaatgttctgatctcgtataggattttctcccctatggataatacctacagtctaggaaaaaaatgcagagacatttgctacttagctactatcattttgagggaagaatg

SEQ ID NO: 47158 - DNA, 267 bp, Glycine max
  unsure (1)..(267): unsure at all n locations; Clone ID: 701133377H1
gcaantaccaagatctgctcgatttaatgcctcccgagaggcaccggaatctctccaagaaggacatcttcgcgctgctcncctcgcgcagtgccctttgatgacggcaacaaggaagtgtggctggataggnttaccggaagagtttgcatgtcaatttcggcgaaggcgatgtctattactggaattgatgaccgcagatactggacttgngtcctactgncagaatctaggttaggttttcagaacctgtagtttactttgtnc

SEQ ID NO: 47159 - DNA, 143 bp, Glycine max
  unsure (1)..(143): unsure at all n locations; Clone ID: 701133378H1
caaatncttagcaaattgccnaagaaggtgccnaaatctgactcatacagattctgcaaggagtgattctagcaataccactacttntgggaaagagtttcagtgtacaaatgttggaagtaccatttcaagcaaattaaatg

SEQ ID NO: 47160 - DNA, 268 bp, Glycine max
  unsure (1)..(268): unsure at all n locations; Clone ID: 701133379H1
caaaacaggggatgttagttcatgtccttataaagacaagtgtcgtttcagccatgatttggaagccttcaaggcacagaaacctgctgatctagagnggcaatgtcctttctttaaatctggaggcgcttgcccatatggtttagggtgtagattttcgagtacgcatgaagatggtgtgccttctgccaatctgaatgntcttaagaataattccgaggtgaatgggtngagcanacatgttcaaaagcttaagtggtaaganaga

SEQ ID NO: 47161 - DNA, 276 bp, Glycine max
  unsure (1)..(276): unsure at all n locations; Clone ID: 701133381H1
tgaataggggtcgtgttggagtgatcaagaacagagagaagcataagggaagctttgagactatccatgttcaggatgccactggccacgagtttgcaactcgtatgggcaatgtgttcaccattggcaagggaacaaaaccatggntatctcttcccaagggtaaaggtattaaactatcaatcattgaggaagctaggaaaaggattgccgcccaacaagcaactgctgcttaaatctttaggaaatgaatagactttgagtgtttggtagttt

SEQ ID NO: 47162 - DNA, 272 bp, Glycine max
  Clone ID: 701133382H1
gcaacttgaagcttcgattctgtgttgttgcttttacttcccatcagaatcagaatggatggtgcaaagacacatggtgctgtgttggcatgtacagatggagcagttcttcccgtcagtcaagtgtttgatgcaattagagagcttgggaatgaaggagttgagcaatgggatcctctagttcttacttctgcctcactcttgagcaagttgccagtggattcttcctctgttgattttctgattttaatttggctgtcaatgatgtcctg

SEQ ID NO: 47163 - DNA, 274 bp, Glycine max
  unsure (1)..(274): unsure at all n locations; Clone ID: 701133383H1
cgatcatcacttcacttcactaatacatcatggcagacgagacccagaacaagtatgagagctctgaggttgaggtccaggatcgtggtgtttttgactttctcggtaagaaaaaggatgaagaagacaagcctcatcctcaggaggnggtcatcgccaccgagtttcaaaaagtcactgtctcagaccaaggagagaacaagcacagcctcttagaaaagcttcaccgatctgacagcagctctagctcttcaagtgaggaggaaggagaana

SEQ ID NO: 47164 - DNA, 161 bp, Glycine max
  Clone ID: 701133384H1
cctctgtaatcagcagtaccaccaacaccaatggttgatgctggtagtggtagagagtttttcagatcatagacaacaaaacacaaaacaccgtagaagagaatctaaacggtttaaccttgttctttttaaaatatttccctccattccacacaacatag

SEQ ID NO: 47165 - DNA, 273 bp, Glycine max
  unsure (1)..(273): unsure at all n locations; Clone ID: 701133385H1
cacaaaactaaattaattcagaccacaccacatcgtacnggacacacacacacanttttgtcaaggcataggattggtgaggtaaacttgaattgaagtgaagaaggagatggctgcaacctcttccttgtgctcatcgaccctccaatcccagatcaatggattcttccttcacaaaacctctctttcccatactccttccctcactttctccaggaggaaaatttcaaccacagtgaaggctacatctcgagtcgacaagttttcaaaaag

SEQ ID NO: 47166 - DNA, 272 bp, Glycine max
  unsure (1)..(272): unsure at all n locations; Clone ID: 701133386H1
ccaaaatccgttccccctttctttcaaaccctttttttttttcttccaacaaatcagcnatnnccgacgacgtcggtggtgccggcnaatcggcggcgtgcggcggcgaaccccgccgaggatatggacttcgagacgacggagggcgtgaaggccatcgcgagcttcgaggagatggggatcaaggacgatctgctccgcggaatctaccagtacggcttcgagaagccctcagccattcagcagcgggccgtgactccgatcattcaggg

SEQ ID NO: 47167 - DNA, 276 bp, Glycine max
  unsure (1)..(276): unsure at all n locations; Clone ID: 701133387H1
gttcatactcagccacttccttcnncacnacnnaananatntaaaanagtcaatataagngctaaacngtcngaggtcaatgnaangtagtgtttagnttnttgnaattgcatcagcagggaatagnagtccaagnttaggatnatcaagtaggaatggagcttggcacaaagnancaatctgacgagggncagctgagtggtttntgtcnnaatgnatgtgggttgccaatacaggnttagggaatggctgctatcttagntnggaaatcactcc

SEQ ID NO: 47168 - DNA, 252 bp, Glycine max
  unsure (1)..(252): unsure at all n locations; Clone ID: 701133388H1
tcagaaaagcagaaagaaataacccattcaaaaaaaganagagcaatcaattccaatcacaatggcaactcaactcaccgatgaacagatctctgagttcaaggaagccttcagtttgttcgataaggatggagatggttgcatcacaacaaaggagcttgggaccgttatgcgttcgttgggtcagaacccaacagaggctgagctccaagacatgatcaacgaatagatgctgatggcaatggcaccatt

SEQ ID NO: 47169 - DNA, 266 bp, Glycine max
  Clone ID: 701133389H1
atgtacataggcataaatgggtgctctctgaagacgactgagaaccttgatgttgttaagggtattccagttgagagaatgatgattgagacggactcaccatactgtgaaatcaagaatactcatgctggaattggttttgttaaatctacatggccttctaagaagaaagagaagtatgatcaagagtgcattgttaaaggccgcaatgaaccttgtttagttaagcaagttcttgaagtggttgctggctgtaaaggcatcaa

SEQ ID NO: 47170 - DNA, 264 bp, Glycine max
  Clone ID: 701133390H1
gggactttcaatcactatgtgattgttaagttcaaggatggtgtggctgttgatgaactcattcaagggttggagaagatggtctcggggattgaccatgtcaagtccttcgaatggggaaaggacattgaaagtcatgatatgctaagacaaggtttcactcatgttttcttgatggcattcaatgggaaggaggagttgtcttaggggtggtttctttttggctccagctattgttattttgtaattttcagatgggttagg

SEQ ID NO: 47171 - DNA, 264 bp, Glycine max
  unsure (1)..(264): unsure at all n locations; Clone ID: 701133391H1
ctcttcttcttatatactntggtatatgacataagtttggaagtcaaaatggtttagacacagtccaacgttgtaggtttggtgtttgtcatgtcataagacgaagaaaggcatnggtgatagggtggagacgcttgccagattagcccagtggaaaatcgacaactttggaccttgttcctacaaaaaatctgaccccttcaagctcggaatctggaactgtgaggaataagtacctctacatacatctttttcctgnacctt

SEQ ID NO: 47172 - DNA, 263 bp, Glycine max
  unsure (1)..(263): unsure at all n locations; Clone ID: 701133393H1
gcgttctatatattattgnattgacaatgaggcctgctcttgctttgcttcctcttctatttgctttcttgttagctgccactacggaatcaagaaaagatccaggggaatattggaaaatgatcatgaaagatcaggaaatgccaganggacttcaaggtcttgtttcatttcaatctgaaaataaccctaagactcaagagcagcttggtaaaggttccaaaaaccattgtgaagagtctctagttacaaatacacaagtt

SEQ ID NO: 47173 - DNA, 266 bp, Glycine max
  unsure (1)..(266): unsure at all n locations; Clone ID: 701133395H1
gctgggctggcaaaccttacaagtttaactggcctcactgacctagatttgtttggtgcacgaatcacagattttgggacaaactatttganaaaatttaagaacctgaggtccttggaaatatgcggtggagtattgactgatgctggtgtgaaaaatatcaaagagctttcttctctagtgtgcttaaatttatctcaaaacagcaaccttacagacaaaaccctggagttaatttctgggcttactgggttggtttctttgaa

SEQ ID NO: 47174 - DNA, 269 bp, Glycine max
  unsure (1)..(269): unsure at all n locations; Clone ID: 701133396H1
gttgctcccccattacaccaatggtccnccaaggaaatnctccgacattaaatcgcaatgcggtcatggaagtatagttgctatggagcacgtctcagaagttcaaccacacagacgatgntgcagaggaacagtgattctgacgtcggcattctcatcggatttgtaggtggtcgtcgatggcgacattggaatctagaaggatcttctccgtcattggcaccagttggaaaatgattgctccacgtgaccattgcctcgtcgtctca

SEQ ID NO: 47175 - DNA, 283 bp, Glycine max
  Clone ID: 701133401H1
tccgaacgagtgaccttcttcgtttctcgcaaagtttaagtaatcatgggtaaggaaaaggttcacatcaacattgtcgtcattggacatgtcgactctgggaagtcaactaccactggtcacttgatctacaagcttggaggtattgacaagcgtgtgattgagaggttcgagaaggaggctgccgagatgaacaagaggtcattcaagtatgcctgggtgctcgacaagctcaaagctgagcgtgaaagaggaattaccattgatattgctttgtggaagt

SEQ ID NO: 47176 - DNA, 278 bp, Glycine max
  Clone ID: 701133403H1
ggaaaaccctaagagatgaagagaactcctatcttgttccctctcttctttcttctttgtgccttcacctcatatctaccttcagccaccgctgatgatgatcatgtgtacgacactgacggcgataagcttcaatacggtgtcaattatttcgtgttgccagtgataagaggaaatggcggtggaatacaagtagcaaaagcaggaaacgaaacttgccctctgactgtggtgcaatctggcaacgagctctctgaggggttaccgataaagattgc

SEQ ID NO: 47177 - DNA, 278 bp, Glycine max
  unsure (1)..(278): unsure at all n locations; Clone ID: 701133404H1
gcagcagagccctgatatcgcccagggtgtgcacggtcacttcaccaagcgcccagaggaggttggtgctggtgaccncggtcacatgtttggctatgccactgatgaaacccctgagtacatgcccctcagccatgtccttgcaaccaaactcggtgctcgcctcaccgaggttaggaaaaatggtacctgtgcttggctgaggccagatggcaagacacaagtaactgttgagtactacaatgacaatggtgccatggttccagttcgtgtccaca

SEQ ID NO: 47178 - DNA, 198 bp, Glycine max
  unsure (1)..(198): unsure at all n locations; Clone ID: 701133405H1
aancccacgagatcttaattgatctatangcaaggngcattgtctccgacantattcactccgggaatggctccntaccctttncgctgntgatcaagncgttnccatagagctnccactgaaatacggtccnttcattgantcagtnnanaagagagggtganccnntctgangtggagtgttccacattcnnnang

SEQ ID NO: 47179 - DNA, 278 bp, Glycine max
  unsure (1)..(278): unsure at all n locations; Clone ID: 701133406H1
cttttgctgagaagcactatgtctgatttgtctgccaagcctttctctagtggtttggtggattacattatctctggccntgttgttgccatgatctgggagggcaagaatgttgttacaactggccgaaagattatcggagccacaaacccagctcaatctgagcctggaactatccgtggtgactttgccattgacattggaaggtatagacttgttttcatcatcgttcaagcaagtttacgttttcaaatcttttgttttaacacatgaatatg

SEQ ID NO: 47180 - DNA, 281 bp, Glycine max
  unsure (1)..(281): unsure at all n locations; Clone ID: 701133407H1
tagctctgtcgttncgtcgttgangatggcgtttcgggtgcgaagncctgaantccgctctctcnntnttntctcttctcttgtnccagcgcttcngncaatgtcntcttcacnagagcgtttcgatgacgggtgggaaaatcgatgggttaaattcagattggaaaaaagatgagaacgtggctggggagtggaaccacacctctggtcaatggaatggagacgctaatgacaaaggtattcaaaccagtgaggattacagattctatgctatttcagct

SEQ ID NO: 47181 - DNA, 282 bp, Glycine max
  unsure (1)..(282): unsure at all n locations; Clone ID: 701133408H1
ggtgaagactacgtgggcgcctaagccccgtcggtgttttcagttgcaaagtagaganaagaagacacagaaacaaaacaatggcgantctgaatctgntctctcagccatggcaacctacaatttcacctttttgttgttcnnnnnnnnnnnnnnnnnnnnnngttgtttatgcttatcataatcataataattctaaattacatttcttttccaattctcgtcaattctctgttctttctcaattgtccaccaactcctcaaaancagttagtggaagtt

SEQ ID NO: 47182 - DNA, 249 bp, Glycine max
  unsure (1)..(249): unsure at all n locations; Clone ID: 701133409H1
aatgaagggtggtggtgggaagagaaaggcttctacctcggaggctccgaacnnnnnnnnnnnnnnnnnnnnnnnnnnntctgctccttctgatgatgctgatttgggtgttggagatgtcgggggtgtgaaagttcaaaactttgagggaaacgagggtacccagttgccggaatactgaagaacaggaagaagaaccccaccacgtggagggtgatgaaggaggagaagacgaagaagattatgccg

SEQ ID NO: 47183 - DNA, 281 bp, Glycine max
  unsure (1)..(281): unsure at all n locations; Clone ID: 701133410H1
ggattagcgagtgagatcctccatggaagatatcggtccgaactcatgcacgaggcaagtggcagagaagaaagcaagacctcaagagcaattgaattgtccaaggtgcagttcaaccaacacaaagttctgttattacaacaactatagtctcacacagcccagatacntctgcaagacttgtagaaggtattggacagaaggagggtctctcagaaacgttcccgttggaggtggctctaggaagaacaagagggtcacctcatcaaaggttcntcctg

SEQ ID NO: 47184 - DNA, 281 bp, Glycine max
  unsure (1)..(281): unsure at all n locations; Clone ID: 701133411H1
aaacgctattgagagtaaaatggcggattcagtgtcggtggacatngaagccatgctgctcctccacccgaggaacatgcnngtagaactgcgtcatggttgtgtctcagttgctgtgtatggggaccaggacaagccagcgcttatcacgtatcctgatttggctttaaattatgtctcctgctttcaggggttattattttgtccagaagcctgttcattgctgctccacaatttctgcatatntcatatcngtccacctgggcatgagttgggagctg

SEQ ID NO: 47185 - DNA, 280 bp, Glycine max
  unsure (1)..(280): unsure at all n locations; Clone ID: 701133412H1
gtttatcgtgaggagaatatgaagttgtttgtnttctttgttgctgcagtagttttggtagcatggccatgccatggcgcaggctaccaaaggttccctctccgaatgaaaactggctatggtgagcgttcttcggaggtaaaatgcgcaagttttaggcttgctgtggaagcacacaacatccgagcacntaaaaccattcctgaagagtgcgttgaaccaacaaaggactacattaatggcgaacaatttagatcagactctaaaacanttaaccaac

SEQ ID NO: 47186 - DNA, 283 bp, Glycine max
  unsure (1)..(283): unsure at all n locations; Clone ID: 701133413H1
tccatctcttgcttcttgcttctattacttgcttctttcttcaccatgtcacttgctgggaaaatcnccactgaaattggggttcatgcaaccgctgcaaagtggttcaacctctttgcaacacaacttcatcatgttcaaaaccttactgatagagtacatggaaccaagctgcatcaaggtgaagactggcatcacaacgagacagtcaaacactggacttataccatagatggtaaggctacaacatgtctgggagagtattgaatccattgatgaacag

SEQ ID NO: 47187 - DNA, 244 bp, Glycine max
  unsure (1)..(244): unsure at all n locations; Clone ID: 701133416H1
tcaagaccttcnccgtccttctcgaagtccagggggttcttatggactcgcaccgcgttggaaatcgcctcgccttcaataaagcgtttgagaagcttggactcgattgcgccaactggactgaacctgtctattccgatctttcaaagagaagtgctggagatgaggaaaagatggtgtttctgtattttaatcgtattgggtggccttcttcgttacccacaaatgagcagggatgtttgca

SEQ ID NO: 47188 - DNA, 257 bp, Glycine max
  unsure (1)..(257): unsure at all n locations; Clone ID: 701133417H1
tggaaacacgttgaagccaagcacttgagtaaataaagacatatggcatgcgtgattcanacttcagatactgaacgtacatggggcaagagataaagattgagaattgataataatttctttaagcattatatgtgttttccgtaatgagtttttgtttcaaggatttagctacgctattccttgataaataagcaattaagtgtggggtgtgcaatgcttaagcttggttataatccctttgggacgaaaattgt

SEQ ID NO: 47189 - DNA, 276 bp, Glycine max
  unsure (1)..(276): unsure at all n locations; Clone ID: 701133418H1
gtcttcataaacgccgcccaaaacttctcatacccttttattcattccattcgtttctagggttttcttttctttgccgagaaaatgagagagtgcatttcgatccacattggccaggccgntatccaggttggaaacgcctgctgggaactctattgccttgaacacggcattcagcccgatggacagatgccgagtgacaagaccgttggcggaggagacgacgccttcaacacatttttcagcgagaccggcgccggaaagcacgtgccccgc

SEQ ID NO: 47190 - DNA, 120 bp, Glycine max
  unsure (1)..(120): unsure at all n locations; Clone ID: 701133420H1
agcacacctatgtttctcatntctcggaagattaaatcacttggtgtcaaatgggttatgctcaggagaaggatctgatgagatctttggagggtatttgtacttccanaaggcacccna

SEQ ID NO: 47191 - DNA, 276 bp, Glycine max
  unsure (1)..(276): unsure at all n locations; Clone ID: 701133421H1
tcggtgctccgctgaattcggttgtggcccctgcgctccgctgcaattttacactcaaaaggacctcatgtgctaacatagaggagaacaaagatctgggacagatggacgtggatgcatctgatgagtcagctaacatgccatcaccccaaaagcaggaggagtctgtaaagaaaaagtatggaggaatgctgcccaaaaagccaccactcatatctaaggaccatgaacgtgcttacttcgattctgcggattgggcattggaaagcnaggcgg

SEQ ID NO: 47192 - DNA, 242 bp, Glycine max
  unsure (1)..(242): unsure at all n locations; Clone ID: 701133424H1
tcccagtnatcaattcaacgatgtnagagcagttgcngatatncacgcgcggagggctcatcctctggacctgcaaccanctcagcaacgccctgaggggatctccgatcgacacgttgatccgatcctgcctcctggangagcgatccggtgcggccnccttcaactacgacgnanctggagccgcatactctctcaaatggaccttccacacaacatanaanaaatnnngagnggatgtg

SEQ ID NO: 47193 - DNA, 275 bp, Glycine max
  unsure (1)..(275): unsure at all n locations; Clone ID: 701133425H1
accgcgtaggtgctcaaatcatagtctcagcatataaagtaatatcttaacctatctgcttaattgtttgattgtnatggcggatgaagggggaattgagaagcggcgctacgatgtttttctgtgttttagaggggaagacacgcgctacaccttcacaggnaatctctatgctgctttgcggcaggcgagattgaggaccttcttcgatgatgggttcaagagtggcgaccaatctttgacgttgttcttcaagcaattcaggaatcaaggnt

SEQ ID NO: 47194 - DNA, 278 bp, Glycine max
  unsure (1)..(278): unsure at all n locations; Clone ID: 701133426H1
ccacctccacctgaaaagtctccagctccaactccttattactanaagtctcctccaccaccatccccatcacgtccaccnccttactatgtgagccctccacnnncttctccatctcctcctccaccataccattacncatcaccacctcctccttccccagctcccgctcccaagtacatttacanatcacctccacctccagtttacatatatgcttctccacctccacgtatctacaagtaagttcgaattgcggaagcaccattcacgataaa

SEQ ID NO: 47195 - DNA, 192 bp, Glycine max
  unsure (1)..(192): unsure at all n locations; Clone ID: 701133429H1
gnccaattnagcataagcccagcatggccanngnaacancagaatananntcnnccttcatggggacgngcctnntggaggncnactccgnggcggggcgggtgcaggcccggttcgggtttggcaanaagaaagccgccgccccgaagaaantttcnagggggtcgggntctanctccgataggnccctgt

SEQ ID NO: 47196 - DNA, 283 bp, Glycine max
  unsure (1)..(283): unsure at all n locations; Clone ID: 701133431H1
ttccttctatatcttcagantagcatagcatatcatatccatggaaacttctcagccncctttctatagaaagcttctcatacagttggttagtgaacctaaggccatcagcactagaaagcctagaaagctccctaagaactccccttgatgcatctgatgaaacttcttccttcattgagatggacccaagaatgccaccttctaaaagattctttaagaactcacaggactccaaatttgacttcccaatttcacagtccctctcactcttgtcnatgca

SEQ ID NO: 47197 - DNA, 115 bp, Glycine max
  unsure (1)..(115): unsure at all n locations; Clone ID: 701133432H1
ctcgtgaccgatacttgccaggcacactgaaatagtgtataaatatggaggagttggaagtttcatcatatagagtgtgatttaattctgtaaagagggaaagagatataaaanc

SEQ ID NO: 47198 - DNA, 277 bp, Glycine max
  Clone ID: 701133433H1
catagagaaagcaactgctgagattagtatcttgaaggtagctgctacatcattgaaattggaacttgaacaagaaaaagcaactcttgcctccattaggcaaagagaaggaatggcctccgttgcagtggcatctctggaagctgaattggaaaagaccagatcagaaatagctttggttcagatgaaggagaaagaagctaaagagaaaatgaccgagcttcccaagaaactacaactaacagctgaagagactaatcaagccaacttgcttgct

SEQ ID NO: 47199 - DNA, 273 bp, Glycine max
  unsure (1)..(273): unsure at all n locations; Clone ID: 701133435H1
ctgcctggnanacggaggcactgaagaagtgctcatcaggaagaggggtttctctgagactgaaactngtcatgaagatncagtctgccaccactgtggatttgatgcttaatctttcttctaaggaggccgcaaccannnnnnnnnnnnnnnnnnnnnnnnnngataagcacaagactttgcctaaggagaagacccttctgccagcagatcctgctaagcctccagccaagacgcaggtngtgggttggncacctgtgcggtcctccggaa

SEQ ID NO: 47200 - DNA, 274 bp, Glycine max
  unsure (1)..(274): unsure at all n locations; Clone ID: 701133441H1
atttccttccccagaaattgatatgaaatggcagatttgaaaatgttgacgggtatttatntttgagtctgggtnttagttcanaacaaaatgcatgggcagggccngatcattggaagnatcgaaaatccaaagtctcagaggttcatcctacttctgaagatgggtcgaccctaaaaagtagacagccaaagagtaagagacaaactgaagttgatttaaatttcacaaattctcttgagaaaaaaatgctagatacattttctcctcccaa

SEQ ID NO: 47201 - DNA, 134 bp, Glycine max
  Clone ID: 701133445H1
cctagctcaatgtgtaaagaatctgagtccatttgtattgctgtgtgcatatggaagacggttgacgtgcatttaataatgtgccaacaagttggactaaaataaagatcatattgattgttttacccatcaaa

SEQ ID NO: 47202 - DNA, 140 bp, Glycine max
  unsure (1)..(140): unsure at all n locations; Clone ID: 701133446H1
gcaatttaacggttttgatcatttaagaattgcggnnctatcggtgttgaattgggaacagagtttacatattattcattgctgtttcagtctttaaaattgtattatgtttctttcaacaatctcgaataatttacctt

SEQ ID NO: 47203 - DNA, 273 bp, Glycine max
  unsure (1)..(273): unsure at all n locations; Clone ID: 701133449H1
atgaggaggaggttctgatcttctttctttgttntctggttccctttcttccttcnaccaatttgcganatccgaaaccggcatnagatccgatccgaaatgtacggattcgaagctctcaccttcaacatccacggcggcttcctagaggccatcgtccgcggccaccgcgccggcctcctcancaccgccgattacaanaacctctgccaatgngaaaccctcgacgncatcaagatgcacctctccgccancgagtacggtccttacctc

SEQ ID NO: 47204 - DNA, 268 bp, Glycine max
  Clone ID: 701133450H1
atcctttaacaattcaggattggttcttaaagagctttttgatccaggagctactgcaggagcaatgttgggacagtgtcaatcttttgaccagcgttcatctgattatcgtttcagtggttcaatattttcaattgaggaagacacggatcttgggaaccagtttatgtacttgcctacagatcccaacttccagcaagtgactggaattacacctccaacatgttctttgccatatcttcctagggattgtggagatgagacatgt

SEQ ID NO: 47205 - DNA, 268 bp, Glycine max
  Clone ID: 701133451H1
cagtgtccttcctttctggacaatgtttttggtgttgacccttcagaagtgcacctgcatgtgcggcgtattccggtggaggagattccagcttctgaaaccaaagctgcttcttggttaatcgacacattccagatcaaggaccaattgctttcggatttcaagattcaaggccatttccctaaccaactaaatgaaaatgaaatttctagatttaagagcctactctcttttatggtgatagtttcttttactgccatgtttattt

SEQ ID NO: 47206 - DNA, 270 bp, Glycine max
  unsure (1)..(270): unsure at all n locations; Clone ID: 701133453H1
cagttacngcgcgttgacgtgcgccgcggaanttctcgcgactttgctagcttntgctgtccgtcaaagccacgcttttggccccggatctctaccggctgctattgaccaacacgcctacaaccaaaggagagagaaaaactcagagtcaagacaagcaacgtgatgcagagggcgaagacggtaacgatgatgaaggggacgatgatgacgatggagatggtggatttgggganggtgaagaggagttgtcatctgaagatggaggtg

SEQ ID NO: 47207 - DNA, 273 bp, Glycine max
  unsure (1)..(273): unsure at all n locations; Clone ID: 701133456H1
ggagtgncaaanggnaagcccaccatantnaanttagctcagncatacctactggaacttngctggccacaactcanggaatatacttgaccattcaattcagttatgggctaatcatatcacancctgtgaacgagaataccgtgccaaccggtgaaatcatgccagtnaagggtaccccttttgattttacatcttttaatagaataggcagcaccannagtcaggttggactgggatatgatcacaattnantgcttgattgtggggaag

SEQ ID NO: 47208 - DNA, 271 bp, Glycine max
  unsure (1)..(271): unsure at all n locations; Clone ID: 701133457H1
gggtgcaccgatgatggcgcaagccatggancatgcaatgatgtgacggtgaacatggcacagtgcctatcctacctgatgcagggaggaacaccttcaacactttgctgcagcggagtcaagaacattcttggctctgctgtcaccaccgttgacaaacaaactgtgtgcaactgtctcaaggcggatgctgctaggtacaacatcaatgaccagtatgctcaggcactccctggtttctgcaagtcaatgtcccttacaagatcagccg

SEQ ID NO: 47209 - DNA, 271 bp, Glycine max
  unsure (1)..(271): unsure at all n locations; Clone ID: 701133458H1
caagtttcaattttnttgggttaggaatttgctttgaacggaacaagaatccaatagaagannagaagaagatgtggctttcggatcatcgattgtntcttctctgcattgtttgtggcctttacttttctctgcagttcacaacgggtcatgcagattcaaatgctggangaacttggaatcaggagggtggtgatcatcaaatacattgctctagagaaagcaagtagaacagcttggaaaatcattcaagagtatttgatgccctttg

SEQ ID NO: 47210 - DNA, 270 bp, Glycine max
  Clone ID: 701133460H1
ggtgtgtgttatggcatgctgggcaacaatctaccgtcagcaaacgatgttataggtctttatagatcaaataacataaagagaatgagactctatgatcctaatcaagctgctctagaagcacttagaaattctggcattgaactcattcttggggtgccaaactctgaccttcaaggccttgccaccaatcctgacacttctcgtcaatgggtgcaaaaaaacgtgttgaacttttggcctagtgtcaaaatcaagtacgtggcagtt

SEQ ID NO: 47211 - DNA, 285 bp, Glycine max
  unsure (1)..(285): unsure at all n locations; Clone ID: 701133464H1
ctgnaaaacaggttatttcagttnangncgtattaannctggctactaatngacttttgacccagcataataagataggtgaagggggctttggaccagtatacaanggtgtncctatcagatggtgctgtgattnccgttaagcagctctcctccaaatcacagcaagggaatcgcgaattcatcaatggaaatangccatgatatctgctttgcngcatccaaatcttgtgaaactttatgggcgttgattgaaagaaaccagttgctggctagtatatgagt

SEQ ID NO: 47212 - DNA, 268 bp, Glycine max
  unsure (1)..(268): unsure at all n locations; Clone ID: 701133465H1
ggntctatgtgagnnnnatgtttnctttgttgangcagtagttttggtagcatggccatgccatggcgcaggctaacaaaggttccctctccgaatgaaaactggctatggtgagcgttcttcggaggtaaaatgcgcaagttttaggcttgctgtggaagcacacaacatccgagccttnaaaaccattcctgaagagtgcgttgaaccaacaaaggnctacattaatggcgaacaatttagatcagactctaaaacagttaaccaa

SEQ ID NO: 47213 - DNA, 266 bp, Glycine max
  unsure (1)..(266): unsure at all n locations; Clone ID: 701133466H1
gtccttacttgcaacaatgaagcttgtctttggcaccctactattatgttctcttcttctaagcttctnctttcttggagccagtcatagcctatgaagactcatcttattgcagcaacaagtgtgcggacagatgctcatcggcaggggttaaggataggtgtgtgaagtactgtggaatatgctgtgctgagtgcaaatgtgttccttctgggacctatgggaacaagcacgagtgtccttgctacagggacaagctcaacaag

SEQ ID NO: 47214 - DNA, 270 bp, Glycine max
  unsure (1)..(270): unsure at all n locations; Clone ID: 701133467H1
ggcagnctnnaatncgngccactctcttcaaaatggccgttaccttactcaaatctccacacagaatgcagngnaccnantncgtcgacgagttcctctcntgggaaggtctacgtttctggggatnagttcacanaggncgacatcaaagtgtatggtgctgttttggagaagccaggtgactcttttnccaatgncngccaagtggtacgaggttgtctcatctcagcttgctgnaagcttccccggcaatgctcaangggtgagatt

SEQ ID NO: 47215 - DNA, 102 bp, Glycine max
  unsure (1)..(102): unsure at all n locations; Clone ID: 701133468H1
ctcccaccagtgatggcaggtttggctccanagggaacacaattcgatggtgcgccaatatgnntnncaagatgagtgaattggctttccacngntgggcaa

SEQ ID NO: 47216 - DNA, 267 bp, Glycine max
  unsure (1)..(267): unsure at all n locations; Clone ID: 701133469H1
gcaagnttctgttcatcggagggantggttacatcggaaaattcatccgtggaagccagcgccaaagctggccacccaactttccttntggtgagggagtccactctctccaaccccgcaaaatcacccctcatcgacaatttcaaaggcctcggtgtcaatcttgttttaggagatctatacgatcaccaaagtttggtgagtgctataaagcaggtcgatgtggtaatttctactgtaggacacctgcagctagctgatcaagat

SEQ ID NO: 47217 - DNA, 257 bp, Glycine max
  unsure (1)..(257): unsure at all n locations; Clone ID: 701133471H1
caatttggagctcagtgcttgcttcctactgtatttgactaaattctcatgttattcttttntcaaattcctaaagagcttttcgnctcgtcaaattggtcaaactcctaaagagcttttcgattttgcatttttcgattagagttgactgaacaattccatctgattattgacatatcacttctttctttattatgctctatttatcccctgtaactgtgagtttagataggtcatagccttgatattgatanacc

SEQ ID NO: 47218 - DNA, 267 bp, Glycine max
  unsure (1)..(267): unsure at all n locations; Clone ID: 701133472H1
cttggaagcacccgagangccactcagccagactgcattcaggccctcatcgttgaattcatagccaccttcctctttgtctttgttggcgttgcttcttccatggtcgttnacaagcttggtggggatgcactagtgggattgtttgctgtggccgtggcacatgcacttgtggtggctgtaatgatctccgccgcccacatttctggtggccacctcaaccccgccgtcacccttggcctccttnctggtggtcacatcaccatc

SEQ ID NO: 47219 - DNA, 265 bp, Glycine max
  Clone ID: 701133473H1
gtggtttgacacctcaatgtgcgattattgtggcaactatcagagcactaaaaatgcatggtggagggcctgcagttgttgctggaagacctcttgaccatgcatatttgactgaaaatgttgccctggttgaggctggttgtgtgaacatggcacgacatatatcaaatacaaaatcttatggtgtaaatgttgtagttgccatcaacaagttttcaactgacactgaagccgagctaaatgcagttcgaagtgctgcatagct

SEQ ID NO: 47220 - DNA, 222 bp, Glycine max
  unsure (1)..(222): unsure at all n locations; Clone ID: 701133474H1
atggctttgnccaatcagcagaccgtggattaccctagtttcaaaactcgtcatcgtcggtgacggcggtacaggaaagacaacgttcgtgaaaaggcatcttaccggtgaattcgagaaaaaatacgaaccgaccattggagtggangttcacccattggatttcttcacaaactgcggaaagttcgcttctactggttgggatactgctggacaaaagaa

SEQ ID NO: 47221 - DNA, 268 bp, Glycine max
  Clone ID: 701133476H1
ctttagccaagagtccctagccaaaaaattaacatggcatggtcaacttcctcctctagcacccctcatcaaaagcatgaagtgttcctcagcttcagaggtgaggacacacgctacaccttcactgggcaccttcatgcctctttaacaagactccaagtcaacacatacattgactacaaccttcagagaggtgaagagatatcatcctcacttcttagggccattgaggaggcaaaactctcagtcgttgttttctccaaaaact

SEQ ID NO: 47222 - DNA, 272 bp, Glycine max
  Clone ID: 701133477H1
gccctaactacgcacgcactcattcttgagaaagctcaatattcattcgtccatggcactctcttctcgtctcttttccaaatccaaattgatctatggctgtcaaatacttctgcaaaaggagcatggctattccagttcgtcactttgctaaagagtctgcccctcctgcccttaagggagatcagatgctgaagaacatttttgtggaggtgaagaacaaatttgagactgccataggaatattaaagaaggagaagatcaccattgac

SEQ ID NO: 47223 - DNA, 272 bp, Glycine max
  unsure (1)..(272): unsure at all n locations; Clone ID: 701133480H1
gggcatagtctatgtcatcttctgcccaggagcattcgantgaaaaagtatgccattagtaagactctctagaagccttaggagctatggagtctggtgaggtagctcttgtctcttggtcagctgtttccgctcgagtgaaaatgctgatggggcgagattgccttgggtnnagatccgggtgaggtttaataaaaaaagtcaagtaggacagcggtgaaccgcgaatgggcaatagttcgtcacttgcggtataaaaagaaagtcaggag

SEQ ID NO: 47224 - DNA, 263 bp, Glycine max
  unsure (1)..(263): unsure at all n locations; Clone ID: 701133481H1
tcctaatccgaaacagaaagaggggatttgcaattgtggagtagatctgaattgtgagcaatatagattcttcaaatttgtaggcaatgngtggcttcaccgctgaagatctatcgaccattggcggaatcgccaccgtctcgcttctccattccttcattcccactcactggcttcctttctccattgtcggtcgcgctcagaaatggactctctccaccactctcatcgtcactgcacttggagcaattttgcacgtaata

SEQ ID NO: 47225 - DNA, 262 bp, Glycine max
  Clone ID: 701133482H1
ctcaaccttctttcttcttatatatcgaacatggctaagtatcattcaagtgggaaaagctcttccatgactgctatagccttcctgtttatccttctaatcacttatacaggcacaacagatgcacaatccggggtatgttatggaagacttggcaacaacttaccaacccctcaagaagttgtggccctctacaatcaagccaacattcgcaggatgcgaatctacggtccaagcccagaagtcctcgaagcataagagg

SEQ ID NO: 47226 - DNA, 168 bp, Glycine max
  unsure (1)..(168): unsure at all n locations; Clone ID: 701133483H1
gcttaattagtccatgcatcttgagcaccatgagaatgagattgtgtataaaataaattatcatgtgctgtgtgttgtgcaagtactaccttctctagctagattgctagagctagaatttcaacctacctatgtgtactgataagatctgcttccnnacnacannng

SEQ ID NO: 47227 - DNA, 263 bp, Glycine max
  unsure (1)..(263): unsure at all n locations; Clone ID: 701133484H1
acttatgttatggcattctaactctgaacgatgaaatgaaatggagttccaagataagcgtttatctctgagatcgagcttgacgttcagcgagacgctgtgcgcagtgttcattccgttcataggaatagtcgaagctttggttttcacattcactagttgcttnnatttccaatctcccaggaataagaagaaacattcttctaccttcgacgacattctcaccctcgccgaggattctccatttagtattaatgaaatcg

SEQ ID NO: 47228 - DNA, 263 bp, Glycine max
  Clone ID: 701133485H1
gagtgatatcatgaagaagcaagtctgagtacaagtttcataaaaagaggagttacctttgtatcactagttcaaagttcaccttctcagaagctacatagatacactgatggagaagcttgtaaggtcctgtgacaaagaatatatgaggatggccatgttaaaacacgaagaaactttcaaagagcaggtatatgagcttcatcgtttgtaccaaattcagaagatactgatgcaaaacatggatgccagaagaggaattg

SEQ ID NO: 47229 - DNA, 266 bp, Glycine max
  unsure (1)..(266): unsure at all n locations; Clone ID: 701133486H1
atcacggccctgttgttctccccagtggngttttcggaactntgcaacccanaggacaaganagtgctgntcccaaatnaagaaggacttcaacaacccttacctgctagnctcctggaaccctaacaccgnttgntgcaactggtactgncgtccagtgccaccccgaaacgcaccgcatcaactccctcgtcatattatcctctgttccccanaccaatttatcnaggnncaatagcancctccgtcggtgattaccttttctt

SEQ ID NO: 47230 - DNA, 262 bp, Glycine max
  unsure (1)..(262): unsure at all n locations; Clone ID: 701133489H1
ttttcgggacgaagaagaagatggtgtcangttctggaatctgcgcaaagcgggtggtggtggacgcncgccaccacatgctgggtcgtctagcctccatcgtggcgaaggagcttctgaacggccagaaagtggtggtcgttcgctgtgaagagatttgcatctcgggcgggctggtgaggcagaagntgaaatacttgaggttccttcgcaaacgcatgaacaccaaaccctcccatggccccatccattccgtgccccc

SEQ ID NO: 47231 - DNA, 263 bp, Glycine max
  unsure (1)..(263): unsure at all n locations; Clone ID: 701133490H1
ggaactctttgactgctccagtggcagttccaagcacaagaagcgcaagcaattgcagacggtggaggtgaaagtgaagatggactgcgaaggatgcgagangaaagtgaggaaggcggtggaggggatgaaaggcgtgaaccaggtggatgtggagcgtaaggccaacaaagtcactgtggtcggctacgtcgaggcctctaaggtggtcgcccgcatcgctcaccgcaccggcaagaaagcagagctctggccctacgtcc

SEQ ID NO: 47232 - DNA, 265 bp, Glycine max
  unsure (1)..(265): unsure at all n locations; Clone ID: 701133491H1
gtctgctatgtgtgcagtggtggttgtagcacttcttcttctggcggnggtggggcccatggctgaggctgtgacatgcaccccaacagagttgagtccgtgtcttccagcaatcacttccggtggctanaccttccaatgcntgttgcacgaggctgaagcagcaaaaaccatggcttatgtggctacctcaaaaacgctagcttgaagcagtatgttaactctcctaatgcccgaaaaaccgttgcttcttgngggattccct

SEQ ID NO: 47233 - DNA, 264 bp, Glycine max
  Clone ID: 701133492H1
ctggctttcaacaatgtcatgactctgtttatgaaactgggtgaaccccagaaagtgcctcagctagtggagcttatgaaaaagaggaccattcccatgtccccattcacatatcatatctggatgaacagctgcgcctcttcaaacgatcttggtggggcggagagagtctatgaggagatgaaaactgaaaatgaaggccaaattggttggcacacttacagcaaccttgcttctatttatgtaaagtttaaggactttgag

SEQ ID NO: 47234 - DNA, 252 bp, Glycine max
  unsure (1)..(252): unsure at all n locations; Clone ID: 701133494H1
ggaagagcatcacttcgattctcaggcggatgcgggagcgtccacagacgtatcctcagcaggnnggtaccattcgcaagaatggctacatcgtcatcaaatccaggccttgcaaggttgtagaggtctctacgtcaaagacagggcaagcatggacatgcaaagtgtcactttgttgcaattgatatttttaatgggaaaaagcttgaagatattgttccatcatcccacaactgtgatgttccacatgtg

SEQ ID NO: 47235 - DNA, 262 bp, Glycine max
  unsure (1)..(262): unsure at all n locations; Clone ID: 701133502H2
ccccagagagcgcgtcttaataaacnctcttctctgaanacccccatttcttttcttcactcttccnctctttccgcttcttcgatcttcgatcttcgtcgctgaaaatgagagagtgcatttcaatccacatcggccaggccgggattcaggttggaaacgcctgctgggagctttactgcctcgaacacggcattcagcctgatgggcagatgccaagtgacaagaccgttggtggaggtgatgatgctttcnacacctt

SEQ ID NO: 47236 - DNA, 279 bp, Glycine max
  unsure (1)..(279): unsure at all n locations; Clone ID: 701133503H2
agaaggaggagttcttgagaganaacggcgacaacgaaaaccgttccgtctcgcggantgacttccctcncaacttcatctnccggagttgccacttctgcatatcagatagaangtgcttgtaaggagggtggtagaggtcctagcatatgggatgcctttacacacacggaaggaaanattcttgncaaaagcaatggtgatgttgcagttaatcattatcatcggtacatggaagatattgatcttatagccagttgggtttgatgcttatagatt

SEQ ID NO: 47237 - DNA, 281 bp, Glycine max
  Clone ID: 701133504H2
attggtacacttgtgttgtgcctctaattaaatctaagaagaaatgtctggggtttgggttttcaagaacggtgtggtgaggctagtggagaaccatggctcagatcgcaaggtgttggttcacactgcaagcaacgaaatcatcacttcctatgcagttttggagcacaagcttacgctcactggggtgggagcgttactatgatgaccctgatcttctacaattccacaaacgctccaccgtgcatctaatttctcttccaagggatttcaacaagttc

SEQ ID NO: 47238 - DNA, 276 bp, Glycine max
  unsure (1)..(276): unsure at all n locations; Clone ID: 701133505H2
gccggcctcaaattcctgtcccttttccttctcctgccggggacattaccatacttgctggagattggntcaagcttgaccaccgaagactgagacgnntcctagagaatggtcataatctccccttccctgatggccttcttatcaatggacgtggttggaatggaaacaccttcactgttgatcaaggtaagacttatagattcaggatatcaaatgtggggctcacaacatcaatcaacttcagaatccaggggcacagtttgaaaattgtgg

SEQ ID NO: 47239 - DNA, 276 bp, Glycine max
  unsure (1)..(276): unsure at all n locations; Clone ID: 701133506H2
ctcttctcncttccttttnngatcacacgcacacagttacgctcttcaaatctatntcttctcagcgattcttgcttcaanttccagaaatgggtgtggcnccaaaacattcccgntgcggaggagggaaccttggagattggaatggaatacagaactgtntctgcngttgctgggccattggtcattcttgataaagttaagggacccaagtttcaagagattgttaacattcgcttaggagatggtactactcggcgtggacaagtgctagaa

SEQ ID NO: 47240 - DNA, 229 bp, Glycine max
  Clone ID: 701133507H2
tagtgcctccttgccagaagttaaaatggcccaagaaactttcctattcacatctgaatcagtgaacgaggggcaccctgacaagctctgtgaccagatctccgatgctgtgctcgatgcatgcttggagcaggaccctgacagcaaggttgcctgtgaaacctgcaccaagaccaacatggtgatggttttcggagagatcacaaccaaggccaacgtggactatgag

SEQ ID NO: 47241 - DNA, 269 bp, Glycine max
  unsure (1)..(269): unsure at all n locations; Clone ID: 701133509H2
ctacagcttcaggatggccttcctttgatgacatcaaatcatctnctctcacttattctctatcagcagaagagaaagcaactgtggcagtgctgcaattgcagcacagagcattagaagcttgccagaagttcttagttggggatgctggttctgacagtgacgaagatgatgaggaggcggaggatgaagatgagctggtagataatgattctgaagaatctgaggagtataagttctttganaaagtgtttgcagaagatggtgac

SEQ ID NO: 47242 - DNA, 268 bp, Glycine max
  unsure (1)..(268): unsure at all n locations; Clone ID: 701133510H2
ggcgatcctagcactctcttctgcagctttcgccgacagcttcattcaccatggctgagcaaaccgagaaggcttttttgaaacaaccaaaagtgtttctcagctcgaagaaaactgggaagggaaaganacccggaaagggtgggaaccgcttttggaaatccattgggcttggatttaagactcccagggaagccatcgaaggaacctacattgacaagaagtgccccttcactggcaatgtttccatccgtgggccgtatcttgg

SEQ ID NO: 47243 - DNA, 267 bp, Glycine max
  unsure (1)..(267): unsure at all n locations; Clone ID: 701133512H2
tttcnttcnccacttgtactcntctctttttcacaacttntncnntgncntctgatactaatggnagttccagtgattgatttatcnnaagctgaatggtgaagaaagaancaaaactatgncacagattgctaatgggtgtgaagagtggggattttttcagttgatcaaccatggtattccagaggaactcnctgtncagggtgaagaaggttgcctctgagttctatangctggaaagagaggagatttcaagaatcnacatca

SEQ ID NO: 47244 - DNA, 121 bp, Glycine max
  Clone ID: 701133514H2
cctttatttgtttaggtttgcttagtctgagccaaaataatttggtggataaaaatgcgcttctaattcatgttatttgtcattttttcaccaaggaatgaattttatttaccatacatgc

SEQ ID NO: 47245 - DNA, 270 bp, Glycine max
  unsure (1)..(270): unsure at all n locations; Clone ID: 701133515H2
ccgtaacctccgagctctgcaccgaagaacgaagccatggggaagacacatggaatgggntctgctcgcaagctcaagtcccaccgcaggaggcaaaggtgggctgacaagtcatacaagaaatcacatcttggaaatgaatggaagaaaccttttgctggttcatcccatgccaagggaattgtccttgaaaagataggtattgaggctaagcagcccaactctgccattcgtaagtgtgccagggttcaacttatcaagaatgggaag

SEQ ID NO: 47246 - DNA, 275 bp, Glycine max
  unsure (1)..(275): unsure at all n locations; Clone ID: 701133519H2
ggggtcaaaaacttttcacaaattactccttcacaagtggagaactataaagatatatagaattctaattccanagcagaatcaaacaacaagcaagtgatgggtctgggaagattgatggtgactctgaaatctaagataaggtctttgaagattatgaagaagcctgattatgataaggtggagaagagtgagagcatgagaatggagattaggagcaggaaggccagaaagctcattgaagagaccctcaaagtggctgattcaccaaagtc

SEQ ID NO: 47247 - DNA, 275 bp, Glycine max
  unsure (1)..(275): unsure at all n locations; Clone ID: 701133520H2
ctacgccgctaactctctctcactctcgcgctctctctttcacaaccttcactttactctctctggacagctaaaatgcaaggaggatttcaatcatttttgtcacacgggaatgtcattagnaatgctgttctacaangggtgcncatngtgaaccccctgttanagccaatngcctcntcgggggttgaatctggtaaacctgctcgattgaggagcatggttttgagagcaccacanttcagacatcttgaatgataaagggcagggngcng

SEQ ID NO: 47248 - DNA, 156 bp, Glycine max
  unsure (1)..(156): unsure at all n locations; Clone ID: 701133522H2
attctcgccattgacatctacttccctcccgcttgcgttcagcaggaagcattgnagactcatgatggtgccngtnaagggnagtataccattggacttggccaagactgcatgtcattctgtaccgaagtagaagatgtcatctcaatgagtttg

SEQ ID NO: 47249 - DNA, 269 bp, Glycine max
  unsure (1)..(269): unsure at all n locations; Clone ID: 701133523H2
gggaattgcgcttcaaggcgtctcgtagggctaatccgcctcacgagggtcaccaacggcacgtgcctttngggggccgaggccccctactgctggtcggcaaacggacggcgggcgcacgcgtcgcttctagcccggattctgacttagaggcgttcagtcataatccaacgcacgactgcttcgcgccactggcttttcaaccaagcgcgatgaccaattgtgcgaatcaacggttcctctcgtactaggttgaattactattgcga

SEQ ID NO: 47250 - DNA, 159 bp, Glycine max
  unsure (1)..(159): unsure at all n locations; Clone ID: 701133525H2
ggcatcccaatattgtcaggttcaaggaggtaatattgacccctacacatttggctattgtgatggnatacgcttctggaggagagttatttgagcggatatgcaatgcaggacggtttagtgaggatgaggcacgcttcttcttccancaacttatat

SEQ ID NO: 47251 - DNA, 242 bp, Glycine max
  unsure (1)..(242): unsure at all n locations; Clone ID: 701133526H2
accgtgggcaactacgataacatacattgattgggagttacnaacaagtggctcaatcaacaccctcgattgctctctcgggtatattggaacttaagggagtggatattaagcacaagagtgagatcaagagcgatcaacatggtatcttggtgtcggcnaacagcattggtgtttaccacgaccacttctacatttaccatcttgaccttgacattgatggtgttgccaactctttgaga

SEQ ID NO: 47252 - DNA, 263 bp, Glycine max
  unsure (1)..(263): unsure at all n locations; Clone ID: 701133527H2
tggcactatgcgaccatcagncnaatatgaatacgatcttcacaacaaggtgtcnctagattggcttctagccttaggtccaagcttgggaattgctagagtcccaggaataggcctagtgttcactgacctcaccactggcatcccagcaaacttctcccgctttgttaccaacctccctgcatatcaccgcatccttgttttcgtgtgtgtaaaatcagtgcctgtccctcatgtccctgctgctgagaggtatctggtag

SEQ ID NO: 47253 - DNA, 262 bp, Glycine max
  unsure (1)..(262): unsure at all n locations; Clone ID: 701133528H2
aacctaaccctcacgaaagcccttttcgattccgataactctcgttgttccgaaaccctaaccctaaccgggttttttcgtttgtttggattgaattggcatcggagggaggcgatcgattggaaattggtagtagtagtttagcgttgaagaacgatgtctnctgctgtgtgcggaaccaagagatcttnncatcgaagagcttcctccttctccgccactctccaagaggctccgttgttcctcttcgccgatcgattcc

SEQ ID NO: 47254 - DNA, 262 bp, Glycine max
  Clone ID: 701133529H2
ccgtggcatcccagatcatttgctgttaaggatgagatattctgcttgtttgagggggctctagacaatttgggcagcctgagacaacagtatggactggccaagtcagccaatgaagtggttttggtgattgaggcttacaaagctttacgtgatcgagcaccataccctgccaatcgtgttgtatgccatctcagtgggagctttgctttcatagtttttgacaagtccacttctaccctttttgtggctctgatcaagc

SEQ ID NO: 47255 - DNA, 114 bp, Glycine max
  unsure (1)..(114): unsure at all n locations; Clone ID: 701133530H2
gaanatnnttatgtcnttggaagctcttttgcctggagtgntgatcnatattagagcctgaagacattggtagtttgnatnctaatcntcaaaggaactttcactgaagnttnt

SEQ ID NO: 47256 - DNA, 260 bp, Glycine max
  Clone ID: 701133532H2
aacagtgcacgagactaaactgaaggttgacctaactcagtatgtagaaaagcatgaatttgtctttgatgctgttttaaatgaagaggttacgaatgatgaggtgtatcgtgaaacagtagagcccatagttccaataatatttgaacgcactaaggcaacttgctttgcatacgggcaaacaggaagtggaaaaacttacacaatgaagccactgccacttaaagcatcaagggacatccttagattgatgcatcata

SEQ ID NO: 47257 - DNA, 276 bp, Glycine max
  unsure (1)..(276): unsure at all n locations; Clone ID: 701133533H2
gcttaatatttgcttcaaagcaacttcgtatagcttcatgaaatcatatctcaganctcagtaaataaattaatatgataagctaagcctcgccagtaaataaattaatatgataagctaagcctcgctagttgcctcaaagttatcatattatgggaacaggtacagaacttcaaaattcggccgagtgcagctatgataaaataaaagtctaattcaaacagaatagagtcgcaatcagatattattcgaccagttagcagcactcccaancct

SEQ ID NO: 47258 - DNA, 272 bp, Glycine max
  unsure (1)..(272): unsure at all n locations; Clone ID: 701133534H2
cncctctgcttctctctctgtctttctcagaagacaactcaaaaaaaccatggacgtgggtcagatgcagagacagtggatcgactacaccaaatccctcttccttgagggcttcctggatggtcagtttctgcaacttcagcagcttcaagatgagaacaaccctgactttgtggtcgaagttgtctctctcttctttgaagattctgaaaggctctcaaagatctcacctttgccctagatcagaatggtgttgacttcaaaaaagttga

SEQ ID NO: 47259 - DNA, 273 bp, Glycine max
  unsure (1)..(273): unsure at all n locations; Clone ID: 701133535H2
gncacaacnancatattttcncaccatttacgcacagttgatcaccttttcagttgagcangccttccaccatgganaggaatnttgggagtttccaaatccctgcaggctctgtcacagtcttttttgtggctgcaatactaatcactctggctgtctatgaccgactcatcatgcccctttgganaaantggaacggcaaaccaggtttcactgacctacaaaggatagcaattgggcttgtatttccatttttggaatggcggctgcttt

SEQ ID NO: 47260 - DNA, 272 bp, Glycine max
  unsure (1)..(272): unsure at all n locations; Clone ID: 701133536H2
ggcaaatggttcctgaatttgaagaggctgcatttactgcacctttaaaccaagttgtaaggtgcaaaacnnaaatttggatggcacctgctgcaggttttatctgaaagggaagaatcaattcttcaagacattcaacctgatgagctgcatatgaaaattcacganncccagctttttggatgaggcacaattaattgatgtgcgagagcctgatgaagtggccaaagcatctttgccaggatttactgttcttcccctccgacaatttg

SEQ ID NO: 47261 - DNA, 269 bp, Glycine max
  unsure (1)..(269): unsure at all n locations; Clone ID: 701133537H2
tgctccagtagccggcactaaacaacatggcggacaaggcagtcaccatccgaaccnggaagtttatgacaaacaggcttctctccagaaagcagttcgtcgttgatgtccttcatccagggagggctaatgtttccaaggctgaactgaaggagaagctgggaagaatgtatgacgtgaaagacaccaacactgtatttgtcttcaagttccgaactcattttggtggtggcaagtccactgggtttggtttgatctatgattcagtt

SEQ ID NO: 47262 - DNA, 84 bp, Glycine max
  unsure (1)..(84): unsure at all n locations; Clone ID: 701133538H2
ctcggtagnaatagtatagtctacaaggtttcgtattnctactancttganacctaactacttcactnacntcttncanccnnc

SEQ ID NO: 47263 - DNA, 262 bp, Glycine max
  unsure (1)..(262): unsure at all n locations; Clone ID: 701133540H2
cgaaactcaagaagatggagaaagcgatcaacagacagaagattttgcttcatcatctcaacccttcatcatccacccaccccaacgaancatcctccctccatgcttcagcatgtgtggcgggggatagcgctgcttatcaaaggacatcgacattcggggacgatgttgtgatcgtggctgcttatcggactgctcattgcaaagctaaacgaggtggtttcaaagacactcttcctgatgatctactggctcctgtttt

SEQ ID NO: 47264 - DNA, 257 bp, Glycine max
  unsure (1)..(257): unsure at all n locations; Clone ID: 701133541H2
cnaataccacaaagacttatgcctacaagaaccatatttttcttgaaaaatgatggaactttgacgccattggccattgagttaagtaagccacatcctcagggtgaagcatatggtcctgttagtgaagtctacgtgccttcgagtgaaggagttgaagcttacatttggttactggcaaaggctacgttgttgtgaatgatgctgctaccatcaaatcattagccatggctaaacactcatgcggttgtggagcc

SEQ ID NO: 47265 - DNA, 258 bp, Glycine max
  unsure (1)..(258): unsure at all n locations; Clone ID: 701133542H2
ctcgtctccgagctcgtttcgttctcgaagaatcgatctgcgatantgactcgcggtaaccagagggatcgtncttcgcgaaanggctcaggctagaaccggtggtaaaggcaagcagaaagatgatgggttgacccctgaacagcgcagggaaagagatgcgaaggcgctgcaggagaaggcggcaaagaaagcggcacaggatgcaggagggaataatgcaggtggaaccaaaaaataggcaatattcaatgagtg

SEQ ID NO: 47266 - DNA, 256 bp, Glycine max
  Clone ID: 701133543H2
gatgacattaaatgttgccatttcttatgaaaacttttcagttttgattctttaattagtgttgttaagtgtccttagggaactacttatcattctccttagtaataaagcacttttaaagatagaaaatatgctccaaaatcgttcccatttcaactcttgtagtgttattcacaactcactaaatctctttttccatcttcaggactggacttagaatggaattatggaaatgaatccttaccagaggcttcaa

SEQ ID NO: 47267 - DNA, 211 bp, Glycine max
  unsure (1)..(211): unsure at all n locations; Clone ID: 701133545H2
ctcttcttctacattagtttttgtnacntcattattcattctcagcttcttntcttcnggggggcaaaaggggtcacttttcagatccgagattgagctcctttacccatcatcatcatggagctcctcgggtacctgaatcagggtcacccttctagaggaacaacacttgttattactctttcattggtgctttcgacacttgtgtcct

SEQ ID NO: 47268 - DNA, 259 bp, Glycine max
  unsure (1)..(259): unsure at all n locations; Clone ID: 701133546H2
gttcttcgacactttattcagtatcattattaatttttttagaaccagaattagtttattgcactattnttttagtcatcctcaatagcagataacagaaacttatcaattgaattgcaaattgaactcgaaccacaagtgaaaccttgaaaataggaaaggtcaaatagaagatattggggttggctgtntgctggggttctcaacaagaatttccagcaagggaaaaactaacttctaaaaatcccttgnattaatg

SEQ ID NO: 47269 - DNA, 261 bp, Glycine max
  unsure (1)..(261): unsure at all n locations; Clone ID: 701133547H2
ttggctttgttcaccatggactcttctaagagacttacattttcggaaccctttatgtcacaggggagaaaggtgatttctgggttcagtttgggcgttggagtttctctccttttcctcactcttatcttgntcaacagcacttccctctccgttcccaaggttcaagtgtttctccaaggatccgattccaattccacttcttcgttctcgcggcgttttcccttcacaaccgctctttcttccaacgggttccgtgag

SEQ ID NO: 47270 - DNA, 272 bp, Glycine max
  unsure (1)..(272): unsure at all n locations; Clone ID: 701133548H2
tnagttcaacctcaanctcnntatgnggtgttgttactgctgctcttttctcttttcttttctctttagttctctcttcccctnnnnnnnnnnnnnnnnnnnnnnnnngagcttgtttaagcttttcttccattaacatattatcacaatgtgtggtattcttgctgttcttggttgttctgatgactctcgagccaaaagggtccgcgtgcttgagctctctcgcagattgaagcaccgtggccctgactggagtgggctccatcaacatg

SEQ ID NO: 47271 - DNA, 272 bp, Glycine max
  Clone ID: 701133549H2
tgaagagggccctgccggaagaagataaataccgtctttcattttccggcgatctcttttttcttccatcaccgttttccggctatccctaatccttaacagaaatgacgacatcaaggcgccttgcggacaggaaggtggagaagtttgagaaaaacatcaccaaaagaggatttgtgccagacacaaccactaaaaaggggaaagactaccctgttggcccagtgctgctcggtttcttcgtctttgttgtcattggatcatctctcttc

SEQ ID NO: 47272 - DNA, 261 bp, Glycine max
  unsure (1)..(261): unsure at all n locations; Clone ID: 701133550H2
ttcaactttgtgggactacatgttgaagtttgattggtgaacgaggtgcgctaatgccttcttaagttttgcttttctgtcactttccctctgtgttggtttgctctgatcacttttgtctgcattacaacctgagcctcagatctgatctcttgatccacaaaaccatggctnncaaggtgaccatcatgaaactcaaggttgaccttgagtgtgagaaatgctacaagaaggttaagaaacttctcggcaagtaccctc

SEQ ID NO: 47273 - DNA, 270 bp, Glycine max
  unsure (1)..(270): unsure at all n locations; Clone ID: 701133551H2
tccatttccattttctctctnacttttcaagaatcgtaagctatnggaaagtcttacccaactgtgagtgctgattaccagaaggccgttgagaaggcgaagaagaagctcagaggcttcatcgctgagaagagatgcgctcctctaatgctccgtttggcatggcactctgctggaacctttgncaagggcacgaagaccggtggacccttcggaaccatcaagcaccctgccgaactggctcacagcgctaacaacggtcttgacatc

SEQ ID NO: 47274 - DNA, 205 bp, Glycine max
  unsure (1)..(205): unsure at all n locations; Clone ID: 701133552H2
aacccantgatctcaccctcactctgnttctgatttctcactcntcgtttgctcgntcggttcancagcgtgtatctcagccatggcgtttcnctacatagaanccgntgtcggatttatgatattaatatacanttttnaaacttacttggangtgcgacnacatagggccctcanacttcctacnctnccnaagacnttagna

SEQ ID NO: 47275 - DNA, 267 bp, Glycine max
  unsure (1)..(267): unsure at all n locations; Clone ID: 701133553H2
gagaaattaaacgtctgcggnaagcaanaatgtcaggacctgagtgttgctcaaacccacnagntctgaaccncaatgcaggagctggccatgttgaaaaactcgctggtctcaattcctatctctccggttcngcctaattccattgccattcttctcatctccgacatttatggctatgaagcaccaaatttgaggaatattgcagacaaggttgcagctgctggttatnatgtggttgttcctgacttcttccatggtgatcca

SEQ ID NO: 47276 - DNA, 265 bp, Glycine max
  unsure (1)..(265): unsure at all n locations; Clone ID: 701133554H2
acgctgtcactgagaaaggatctctatctacgaaggagcggaataaaacccttctctctgtgattaagagaatggcttcagatcggaaacttcacacttttgaggaggtggcaaagcacaaccagaccaaggattgctggctcatcatttctggtnaggtgtatgatgtcacccctttcatggaggatcatcccggaggtgatgaggttttgttatctgcaacagggaaagatgcaaccaatgactttgaagatgtggggcacag

SEQ ID NO: 47277 - DNA, 260 bp, Glycine max
  unsure (1)..(260): unsure at all n locations; Clone ID: 701133556H2
gccgaagaggggaaaggttccatgtgaacggcacttgcacatgggttagtcgatcctaaggnacgggggaagcccgtctgatagcgctctgtgcgcgtactccgaaagggaatcgggttaaaattcctganccgggacgtggcggctgacggcaacgttagggagtccggagacgtcggcgggggccccggaaaganttatcttttctgtttaacagcctgcccaccctggaaacggctcagccggaggtagggtccagc

SEQ ID NO: 47278 - DNA, 256 bp, Glycine max
  unsure (1)..(256): unsure at all n locations; Clone ID: 701133557H2
ctgctccgtaccagtttcactgcataaatttgagagaaaactctgcaaacatgttggtttatcaggacctccttacaggtgatgagcttctctcggactccttccgttacaatgaaattgagaatggaatgctgtgggaagttgaggggaagtggnctgttaagggagcagttgatgttgacattggtgcaaacccttctgctgagggtggagaagatgagggagtcgatgacgcagctgttaaggttgttgacat

SEQ ID NO: 47279 - DNA, 259 bp, Glycine max
  unsure (1)..(259): unsure at all n locations; Clone ID: 701133558H2
ttttctcttaatccaaatatcatcatctgaaacgatggctgccatggcaaccacaaccctctcttcaaacccgaaactctcatttttccacggaaagcccgttcnntattcttcccgcgtcgcacccaccaccaagttattctcatccaaacaaggcacaatctcccatgtccctaacccaacccccatacgacctccaattccttcaaattccaacccatcanagaatccatcgtctcacgcgaaatgacgcgccgct

SEQ ID NO: 47280 - DNA, 257 bp, Glycine max
  Clone ID: 701133559H2
gggcactatcgtcatatcgaggaaagtcttagggtttcgcctcacaaggtggcatatataatagcccacctacatcttccccgaaattctgttccgcagaaaaccttagcccaaccggatcttcacgattaggagatggctaagtcgaagaaccacaccgctcacaaccagtcctacaaggcccacaagaatggcatcaaaaagccaaagaggcaccgccacacttccaccaaagggatggatccaaagtttctgag

SEQ ID NO: 47281 - DNA, 255 bp, Glycine max
  unsure (1)..(255): unsure at all n locations; Clone ID: 701133561H2
cttcggttgatgctgtttatgctgcattggaganagcaggaggngggtcattgaacataggcgtgtctgagagtggatnnccttcttctggtggaactgcaacttcacttgataatgcaagaacttacaacacaaacttggttcggaatgtgaagcaaggnacccctaaaaggcctggtgcaccccttgaaacttatgtgtttgccatgtttgatgaaaatcagaagcagccagagtttgaaaaattttgggggc

SEQ ID NO: 47282 - DNA, 259 bp, Glycine max
  unsure (1)..(259): unsure at all n locations; Clone ID: 701133562H2
gggaagaaagaaacagacaaaaatggcgccaaacgctctctttctcttctctgtccttcgccattcccctcctccttctgccctgcccaaccgccgccggccacgacnaccgcgacgccctccgcaaaagcattctcttcttcgaaggccagcgctccggcaaactccccgccgaccagcgcctccgctggcgccacgactctgcattgcacgacggcgccaccgccggagtggacttgagcggagggtactacgacgc

SEQ ID NO: 47283 - DNA, 138 bp, Glycine max
  unsure (1)..(138): unsure at all n locations; Clone ID: 701133565H2
gnnngctcnacngtggatgagaacacttgatctgtggctgtaaatgtaaatcttcattttattcattgatgtgccacttctccagaaatatgtctgtagtcatgacaataaactaacggaagctcttcgtgggttaaa

SEQ ID NO: 47284 - DNA, 268 bp, Glycine max
  Clone ID: 701133566H2
ggctgtgtccgttactcgggagtggaagatggcgacggcgccgggaaatcaaatgttggagggcggaggaggagcgccgcagcctccgggtacagacatgaccggaatatgcttccgggatcagctctggctcaatagcttccctctggatcgcaacttggtcttcgattacttcgcactctcccctttctacgactggacctgcaacaacgagcagctccgcatgcgctccgttcaccccctcgacatctctcaatctcgaaaatga

SEQ ID NO: 47285 - DNA, 270 bp, Glycine max
  unsure (1)..(270): unsure at all n locations; Clone ID: 701133567H2
gcggcgcattcntcttcattcattcgttgggaatgatagcttgcaggtctctcatcggagnggagtnagttctcaagtttaccaatacttangtgncatcaangtcttattgctttcagggtcagagcgcttatcattgcttaagctgcaattttatgatgagtggtagaaagnnagaaanncntgtcttgaagancatagcatnanacagaaganaatgnattntatctggagaccaattgccancaatgctagttcnntgtgacgana

SEQ ID NO: 47286 - DNA, 72 bp, Glycine max
  unsure (1)..(72): unsure at all n locations; Clone ID: 701133568H2
cacccattcatacgtggtgttgttactgctgctcanttctantttcttttctctttagttctctcttcncct

SEQ ID NO: 47287 - DNA, 258 bp, Glycine max
  Clone ID: 701133569H2
accaaatcctctaattcaagtttgcaccaagttttcctgagaaaatgtctggtacgtggaaagggtggaaagggtttgggaaagggaggtgccaagaggcacaggaaggttcttcgcgacaacattcagggcattacgaaacctgcgattcgtaggttagcgagaagaggtggcgtgaagaggatcagtggtttgatctacgaggaaaccagaggggttctgaagatattcttggagaacgtgattcgcgatgctgtg

SEQ ID NO: 47288 - DNA, 132 bp, Glycine max
  unsure (1)..(132): unsure at all n locations; Clone ID: 701133570H2
cctggaaacttgggtgcgattccttacntcacaacaacaacanntcactatggnctcttctgantcgagcctgcttcacgcttccctcagctggtttcccctccaaagggtagtttcactcccacacaacnt

SEQ ID NO: 47289 - DNA, 242 bp, Glycine max
  Clone ID: 701133571H2
aattaagaaagctcttggtcattcacttgctagctccaataactgggttctagcagattgtcattcattttagcacttgtgcttgtaacattttcattcatcatgatcattgactcaagggttgcagaggcacgtaccctgccaaaatcagccttattgccttccaaagtttatatacctactgttcctcttcctactctgccattactgccaaaggaagagttgcctgttccagtccctcc

SEQ ID NO: 47290 - DNA, 262 bp, Glycine max
  Clone ID: 701133572H2
accgatctcgcgccaaatacaaattcgtgtcaacccaacccagggttccggcgagcatggccgacggtccggctagcccaggcggcggcagccacgagagcggcgaccacagccctcgctctaacgtgcgcgagcaggacaggtacctccctatcgctaacataagccgcatcatgaagaaggcacttcctgccaacggtaaaatcgcaaaggacgccaaagagaccgttcaggaatgcgtctccgagttcatcagcttcat

SEQ ID NO: 47291 - DNA, 257 bp, Glycine max
  unsure (1)..(257): unsure at all n locations; Clone ID: 701133573H2
ctcaaacctcagacagaatcaaaaccacacttctcttcttccattgtctcacgttatcagcatcaacacagtgtcacatccataatcgagagatatggagtttagttaggaaacaccagtggtaaagttgtgagaaacaggaagaacatggctccntctagcaaggctgagaagaaggctgctatggatgcagctgcatggatgttcaatgttgttacatctgttggaatcatcattgtaaacaaagcttgatggcc

SEQ ID NO: 47292 - DNA, 253 bp, Glycine max
  unsure (1)..(253): unsure at all n locations; Clone ID: 701133574H2
tatttctcagcgcgtaaagcatggctttgttggtggagaaaaccacgagtggtcgcgagtacaaggtcaaggacctttcccaggccgacttcggccgcctcgagatcgagctggccgaggttgagatgcccggcctcatggcctgtcggaccgagttcggcccctcccagcccttcaagggggcccgcatcaccggctccctccacatgaccatccagancgccgttctcattgagaccctcaccgcccttgg

SEQ ID NO: 47293 - DNA, 252 bp, Glycine max
  Clone ID: 701133575H2
gagccttggttggatggaactttcaaagggaatggttttctctatgaaagaaaatggcgtggacttgttactaaacaaggctctacagattcgactgctgattttgggtttggaatttacaatgatcaccatttccatttgggctacttcatttatggaattgccgttcttgcaaagattgatcctcaatggggacaaaagtacaagccacaggtttattcacttgtgacagatttcatgaacttgggtcaa

SEQ ID NO: 47294 - DNA, 140 bp, Glycine max
  unsure (1)..(140): unsure at all n locations; Clone ID: 701133576H2
gatacatagaaaganaganaaaaaaaaatgagtttgagggaagacaatgaagagggaagggatctgaagaagccatttcttcacacgggaagttggtatcgtatgagtgggagacaatccagtgtgttcggttccacaca

SEQ ID NO: 47295 - DNA, 233 bp, Glycine max
  unsure (1)..(233): unsure at all n locations; Clone ID: 701133577H2
ggggatgnccccaagatncaagtncttctagcatttaggangcagcctcagtgtatgttgtcatcccgtgataaaattnatgcagtgatgagtttttgggtagaacaggtgggtttcaattctgcagagattgtcaaagctccaggaatttttctatttagtctccagaagnggattgctccaagggctttagttgtgcagtttcttatctcaaaaagtctgctacaaannga

SEQ ID NO: 47296 - DNA, 258 bp, Glycine max
  unsure (1)..(258): unsure at all n locations; Clone ID: 701133579H2
ctgacattnacgtcaaggcatnaatacgtttcntacttgcattaatctctaggactgctcattaggtagttttttatttagaggctaacatgagctttgctgcgccatcacttggttctgctggtggtagatctgctagaagagcntttgagtttgggagaacctatgttgtcaggcctaaaggtaaacaccaagcaactatagtctggttgcatggcctcggggatcatggctccagttggtcccagctattagaga

SEQ ID NO: 47297 - DNA, 257 bp, Glycine max
  unsure (1)..(257): unsure at all n locations; Clone ID: 701133580H2
gaaaaaagaatcctattcagacaagtttctccaacaagtggcgttgaattttatcctagctggtcgtgacacctcatcggtggcattaagttggtttttttggttggtgattcanaaccctaaggtggaagagaaaattctacgtgaaatttgtacagtcctgatggagacacgtggcaatgatgacatggcaaagttgtttgatgagccttggcctttgaggaagttgaccgtttggtttatctcaaggctgcatg

SEQ ID NO: 47298 - DNA, 268 bp, Glycine max
  unsure (1)..(268): unsure at all n locations; Clone ID: 701133582H2
cnctcttcccttgttcgaaactagcctaatcaaaaccgaaacaaacgattacaaaaacaagaaaagaagaaaaataatcattcattgctcggtgagaagagagagaggaacggcccgatgaccgggaaggcgaagccaagaagcacacggcgaaggaaatcgccgcgaaggtggacgccgctcaccactaaccgcggcggcgggaaggccggcctgaaggaccgatccgggttggagaagggcgggcacgcgaaatacgagtgccctc

SEQ ID NO: 47299 - DNA, 257 bp, Glycine max
  unsure (1)..(257): unsure at all n locations; Clone ID: 701133583H2
cgaaaatggtccttttcagcttaccaagaacttgtctcttgtgtggaatgactanggctgggacaaggcatcaaatattatatttgtagaccaacccactgggacgggtttcagctatacttctgatgagagtgacattcgccatgatgaagagggtgttagcaatgatttgtatgacttcttgcaggcatttttcaaggagcaccctcagctcactaagaatgacttttatattactggagagtcatatgctggac

SEQ ID NO: 47300 - DNA, 265 bp, Glycine max
  unsure (1)..(265): unsure at all n locations; Clone ID: 701133584H2
gcgatccgaganaaactctgtaaacatgttggtttaccaggacctccttacaggtgatgagcttctctcctgactccttccgttacaaggaaattgagaatggaatgctgtgggaagtngaggggaagtgggttgttaaaggagcagttgatgtagacattggtgcaaacccttctgctgagggtggaggagaagatgagggagttgatgatgcagctgttaaggttgttgacattgttgacacattcagacttcaggagcaacc

SEQ ID NO: 47301 - DNA, 261 bp, Glycine max
  Clone ID: 701133585H2
tttctctgtctgcttcttcactttctctcgtttcaatcgaaaccaaaacaaaaacatgggcagaaaattcttcgtcggtggcaactggaaatgcaatgggaccactgaggaggtaaagaagattgttactactttgaatgaggctaaagtccctggagaagatgtcgtagaagttgttgtgagccctccttttgtgttccttcctgttgtaaaaagtttgctgcgccctgatttccatgtttcggcacaaaactgttgggt

SEQ ID NO: 47302 - DNA, 261 bp, Glycine max
  unsure (1)..(261): unsure at all n locations; Clone ID: 701133586H2
ganaataaccctaagactcaagagcagcttggtaaaggttccaaaaaccattgtgaagagtctctagttacaaatacacaagttaacagtgacttcgaacccataccaagtgttaccaaatatgatgatttggaattcaagtcaagcattatcaagaacgatgattttgaatcgagaccaagtgttactaagtatgatgattttgaactcaagtcaagcgttaccaagaacaatgattttgaaccgagaccaagtgctacc

SEQ ID NO: 47303 - DNA, 259 bp, Glycine max
  Clone ID: 701133587H2
ctgatcccgacaagttgatggtcaaagctgataaactaacaagactcagtctcacgaggtggagtgcggattggaaaagtgctactgttctttatgagcaggcagctaatgggtttagagttgccaaggactatgagaatgctaaaatagcatatgagaaagcttcgaaaggacaagaaatgctttcttcaccttgggatgcggctaagcacatggaatccgctgctgctctcgcaaaggatctaagacactggcaaga

SEQ ID NO: 47304 - DNA, 257 bp, Glycine max
  unsure (1)..(257): unsure at all n locations; Clone ID: 701133588H2
tgaaaatgaaggtccttgttttcttcgttgctacaattttggtagcatggcaatgccatgcgtacgatatgttccctctccgaatgaacactggctatggtgcccgtactccggaggtgaaatgcgcaagttggaggcntgctgtggaagcacacaacatctttggctttgagaccattcctgaagagtgcgttgaagcaacaaaggaatacatccatggcgaacaatatagatcagactccaaaacagttaaccaa

SEQ ID NO: 47305 - DNA, 255 bp, Glycine max
  Clone ID: 701133589H2
agaaattgaggagcaaggacatgaagaagtgatttcagacaaaacattcaagaagcagcaggaaactcttgatgaaattctttcacgacacaggaaagagatattgcagctgcagaaaaaggaagttgagatgaaaaaggctgcagctagaggtagcaaggctgagcagaaagctaagaagaagcaagtggaggaagaggtttctcaactttctgctaagcttaaggaaaaccaagccaaagagctggctgcatt

SEQ ID NO: 47306 - DNA, 253 bp, Glycine max
  unsure (1)..(253): unsure at all n locations; Clone ID: 701133590H2
gnaaaagcttaattcacgtatttttttctcagagaggaacatccaaggtacctggggttacagattgtggtttggttccaagacacgtcaagaaggttgccctcattggcggaggactaatgggctctggaatagcaacagctttaattcttagcagctatcctatcatattgaaagaagtaaatgagaagttcttagaagctggtatcaataggattaaagcaaacttacagagccgtgttaagaaaggtaa

SEQ ID NO: 47307 - DNA, 254 bp, Glycine max
  Clone ID: 701133591H2
tttctctccttcctttctttgtgtacctcttacaatttcttatattattgttattgtaatagtctcccacatagacatcccctgcatagtagtatataaggccaagagattagaggtaccccaatagtccaatacttgttcacttggcaccaaattcaaaggctcatcaaaatcaaataccaattcagttgcgtacccaacatggcctcatggaagaagaccattgccaccccattcaaaaaagcttgcacttt

SEQ ID NO: 47308 - DNA, 235 bp, Glycine max
  unsure (1)..(235): unsure at all n locations; Clone ID: 701133594H2
ctcatctaacaatcatgaaggtgtntcaatgccctcaaacagatcaccttccaatgcctcgtacggaacccacctcctccaccttcatctggagaacccaaaacttcaccacaaccaccccctgcttctaggggagggggaagtgggggtgcacttggtgctttctggtccactcagcatgcaaaggaatcacttgttgctgaggataagagtaaaccaatttttgatgaagaac

SEQ ID NO: 47309 - DNA, 257 bp, Glycine max
  unsure (1)..(257): unsure at all n locations; Clone ID: 701133595H2
gnaaaatcagcaacaaccgaacctatcatttttntcattattgttgttggagttggagttggagttggaccacaagaatagttttgagaatcattgttctagtgtcgatagatggatggggaattgcatccactcatgttgtagtttcttttctcttcgttctgaaatttcgtttctctctccaacgctacaatgtcggaagctaagacccaaattgannnnnncaaggaagtgggtcgtcgagcacaagctccgta

SEQ ID NO: 47310 - DNA, 258 bp, Glycine max
  Clone ID: 701133596H2
gttttggactttgatccctgcagaatattgtgtaatcagactagtcactaatctctttggttgacaataattgtcataataccagtgattgttgcatagaaaatttgcccatgtatttatacctcagcacaccatgaaattagaaggtaataaagtggctttttggcattcaaatattggtcttgagcctgaatctcaagcgtttgtgttcattgacgatgatcaagtttccgatggatacaaattacaaaaccagaa

SEQ ID NO: 47311 - DNA, 269 bp, Glycine max
  Clone ID: 701133601H2
gttcgcttgcagtcacacaagaggccaatcctattcatagctcgagatgggtgaagaagtgaaggtagttgttccagaatcagtgttgaagaagcgcaagagggaggaggaatgggcgttggccaagaagcaagaactcgatgctgccaagaagaagagagccgagagccgcaaactcatctacaacagagctaagcagtacgctaaggagtacgatcaccaggagaaggaattgattcggttgaaacgcgaggccaagctgaaaggtg

SEQ ID NO: 47312 - DNA, 268 bp, Glycine max
  Clone ID: 701133602H2
ctgggggtaagagcaaaaagaccaaaagaacagcaccaaaatccaatgacatctacctcaaattacttgtacaagctttatcggttccttgttcgaaggactggcagcaatttcaatgctgttatactcaagcgcttgttcatgagcaaggttaacaagcctccaatttctttgtcaaggttaattaagtatacaaaggggaaggaggataaaattgctgtaatagtggggactgtaactgatgatatcagagtatatgaagttccag

SEQ ID NO: 47313 - DNA, 263 bp, Glycine max
  Clone ID: 701133603H2
actccctcctcttgtctaattgaggaaattaaaatggcagcctcttcattgaaccacaaattccataaccatgctcgttctaatagcttgccctctaagccacaccctctcatcctacaatgcaatgaacgcttatctagactaggggcctatgataccatctcttcttcattgctaaggcaaaatcttactaaccttctagatttgcatgggtgcattgaaaagttggttcaactacccttaactcaacaagcattgttcag

SEQ ID NO: 47314 - DNA, 216 bp, Glycine max
  unsure (1)..(216): unsure at all n locations; Clone ID: 701133604H2
tttctctctcacttttcaagaatcgtaagctatgggaaagtcttacccaactgtgagtgctgattaccagaaggccgttgagaaggcgaagaagaagctcagaggcttcatcgctgagaagagatgcgctcctctaatgctcccnttggcatggcactctgctggaacctttgacaagggcacgnagaccggtggacccttcggaaccatcaagcg

SEQ ID NO: 47315 - DNA, 266 bp, Glycine max
  unsure (1)..(266): unsure at all n locations; Clone ID: 701133605H2
ctctgctctcagatctcatcaaccttaacctctccgataccaccgagaaggtgatcgcagagtacatatggatcggtggatcaggaatggacctgaggagcaaagcaaggactctcccaggaccagttagcgacccttcagagcttcccaagtggaactatgatggttccagcacaggtcaagctcctggtgaagacagtgaagtgattnnnncccccacaagccattttcagggatccattcagaaggggtaacaatatttggtt

SEQ ID NO: 47316 - DNA, 265 bp, Glycine max
  unsure (1)..(265): unsure at all n locations; Clone ID: 701133606H2
ataattttccgggaaaattcaagttccaatcggaaccggaaatgaatagggtttggtttctactattccttctgctgatctcgaaatgcgatcatgtgtggagctcttacgcgggttccgctagctccgtcatcaacccttccaaggtcaaacagatttncctggaagccaagagctttcgtttatgaaggtttcctcacggatttggaatgcgaccacttgatctctctagcgaaatcggagcttaagagatctgccgtagcgg

SEQ ID NO: 47317 - DNA, 261 bp, Glycine max
  unsure (1)..(261): unsure at all n locations; Clone ID: 701133607H2
gctttcgatccctgtaactgcgttcgactatttagggttttttcggagacaatggcggatgaatcggagcacacggcggcgcggctgccggcgaatcgctgctcgacaagatcgccgagaagattcacggccacgacgactctncctcttcctccgattccgattcggataaaaaggaatcttcgtcgattaaggagaaggttttccgctctttggaagggagaagccattccactccgtcctcggcggngggaaacctgt

SEQ ID NO: 47318 - DNA, 264 bp, Glycine max
  Clone ID: 701133608H2
acagaagacaaaggagccttgagtctcgagatcttgtcagatcggaacgcaaccgcaactgccaccgagattgctttgtgtgttatgggaagggaagttactggcatacaggttatggaaaagaagccaaatggtgccatagcggcttcaaatggcagtttaagtgatagaatgcgtgtttctcccaaaattgcagcaatggttcaagcaatggatcatgagataaaggaatctgctgaagctaattcgtttgagaaacatcac

SEQ ID NO: 47319 - DNA, 265 bp, Glycine max
  unsure (1)..(265): unsure at all n locations; Clone ID: 701133609H2
gaccccaatatacttagccatatctttacttcccaaaacttgctctacaatgagtttccttcgttcttttgcaagaaacaaggatatatcaaaagtaggacgcagaggtatccattgcatgcagaaactatgtgcagnnaaaatatctcctgattcactagagaaggcccaaaatcgtgtgatagatgctgcactcacacttgttcgagaaaatacaaggcttaagaaagaactcgtgcatagnttgggaggtgctgtggcaact

SEQ ID NO: 47320 - DNA, 265 bp, Glycine max
  unsure (1)..(265): unsure at all n locations; Clone ID: 701133610H2
gaattcgtaaaccctaatttcggnaagatcggcgatgactgcctccaaggatcgcgagancttcgtctacatcgccaaactcgccgagcaggccgagcgttacgaagagatggtggaatcaatgaagaacgttgcgaatctcgacgttgaactgacggtggaggagcggaatttgctttctgttgggtacaagaatgtgattggtgctcgcagacgttcctggaggatcctgtcttccattgagcagaaggaagaaacaaaaggg

SEQ ID NO: 47321 - DNA, 154 bp, Glycine max
  unsure (1)..(154): unsure at all n locations; Clone ID: 701133611H2
ccggattctgtangataagagcttatcaagagtagagttgccttgtgcaatctgtttctgtcttctgtctagtgcatcagatatagctggttaagattctctactcgggtgcatggcaatggtgatctcttctgttcatgccacactatttgcc

SEQ ID NO: 47322 - DNA, 265 bp, Glycine max
  unsure (1)..(265): unsure at all n locations; Clone ID: 701133612H2
gaaaatgaaggtccttgttttcttcgttgctacaattttngtagcatggcaatgccatgcgtaacgatatgttccctctcnngaatgaacactggctatggtgcccgtactccggaggtgaaatgcgcannttggaggcttgctgtggaagcacacaacatctttggctttgagaccattcctgaagagtgcgttgaagcaacaaaggaatacatccatggcgaacatatagatcagactccaaaacagttaaccaacagcttnt

SEQ ID NO: 47323 - DNA, 234 bp, Glycine max
  unsure (1)..(234): unsure at all n locations; Clone ID: 701133613H2
ggggtattccatactaacaaagcatatgncntgacagcctttgaatancatggaacanatccaaggtttaacaaggttttcaacaaggggatggctgatcactccacaatcacaatgaagaaaattcttgagacctacactggctttgagggtcttaaatctctggttgatgttggtggaggaactggagccgtagtcaacatgattgtctcaaagtatcccactatcaagggc

SEQ ID NO: 47324 - DNA, 268 bp, Glycine max
  unsure (1)..(268): unsure at all n locations; Clone ID: 701133614H2
gcaatcaataatgtctcttccaactcatccaattccncttcttcnttgcatcatcccttttccacaantncaatccgctaaatatccgaaaaccaaaangcnatcatcatattnctagagtgacatgcagtgacaaccaaaanccaaacacatctggngaacttctactcccacataggaggnacattctacttggnctaggagggctttncggtgctgctgctactcttaanaacatcccttttgccaatgctgccccaatactngg

SEQ ID NO: 47325 - DNA, 265 bp, Glycine max
  unsure (1)..(265): unsure at all n locations; Clone ID: 701133615H2
cacaaacgcacactgaattcaaaaacatcgaaaganagaggcatggccgagcaaaccttcatcatgatcaagccagatggcgttcaaagaggccttattggcgagattattagcagatttgagaggaagggtttttacttgaaagggttgaaactcgttactgtggaccgtccttttgctgagaagcactatgctgatttgtctgcaaagcctttctttagtggtttggtggattacattgtctctggccctgttgttgccatga

SEQ ID NO: 47326 - DNA, 246 bp, Glycine max
  Clone ID: 701133617H2
aaactgtaatggtggattgcatggtatagggtcttcaattggaaagagaataaatggccgatttgttgtcatatctcttgaagatataagaccctttgttggaggttttgtagccaatgatccacaaaagaaattggctctcccaaagccaagattacctaatggggagtgcccacctgggtttcttgattatgcggtgaacatgatccatttggattcaaaatatttatcttttcttactgacag

SEQ ID NO: 47327 - DNA, 266 bp, Glycine max
  unsure (1)..(266): unsure at all n locations; Clone ID: 701133619H2
cgtaaatatataccatttttatgtagatgacttatgatatgcgtttataataatgcaccaagctaggttgcaattgtaaataagactaatgcaatttattggcaccttgaagagacttttcaaagtcctccagntgacaaatgaaaccctgattgggacctgctgctggtcgtatactcttcacatgtttcagagcttcaaaaaaactcattcctcgagtcttcatcagatatgccacnactatagtcacactccttgatcttcca

SEQ ID NO: 47328 - DNA, 264 bp, Glycine max
  Clone ID: 701133620H2
ggcgttctatatattattgaattgacaatgaggcctgctcttgctttgcttcctcttctatttgctttcttgttagctgccactacggaatcaagaaaagatccaggggaatattggaaaatgatcatgaaagatcaggaaatgccagaaggacttcaaggtcttgtttcatttcaatctgaaaataaccctaagactcaagagcagcttggtaaaggttccaaaaaccattgtgaagagtctctagttacaaatacacaagtt

SEQ ID NO: 47329 - DNA, 131 bp, Glycine max
  unsure (1)..(131): unsure at all n locations; Clone ID: 701133621H2
aacccaccntcatcttcatcgccggttcagtgcttctcgccatttccgaaccgctgcttcaaccattcctccttgctgaactggnttctctccgtaaaccctcctcgaaccgctcctccacncnaaatngg

SEQ ID NO: 47330 - DNA, 263 bp, Glycine max
  unsure (1)..(263): unsure at all n locations; Clone ID: 701133622H2
taatagtgataatggtgatagtgacaaagagagcttaagactcntggaagcaaaactacaatttgttgactttncntgatctttttaaaaccatgtaatcaagtctgaactgtttttaaattgacgatgtgtcgcactcggtaaattatttccattaacatttgaaagtcttattggannnnnnnnnnnnnnnnnnnnnnnnnttgtttatttttatcatctttgtttgtcttttgggtcctgtgattggatagataaagtta

SEQ ID NO: 47331 - DNA, 235 bp, Glycine max
  unsure (1)..(235): unsure at all n locations; Clone ID: 701133623H2
ggnagaatcaaaaccaaagggccaaggagggacgattactgtgagaaactcaagatcaagaataggccaaagtttgtaggagtgagacaaagggcttcagggaaatgggcagcagagatcaaanacacatcatagaagattncgctttggcttggaactnatcaaactgctgnggaagctgctcgagcttatgatgaagctgcatgcctccntcgaggttcaaacactcgcacca

SEQ ID NO: 47332 - DNA, 263 bp, Glycine max
  unsure (1)..(263): unsure at all n locations; Clone ID: 701133624H2
atcctttaacaattcaggattggttcttaaagagctttttgatccaggagctactgcaggagcaatgttgggacagtgtcaatcttttgaccagcgttcatctgattatcgtttcagtggttcaatattttcaattgaggaagacacggatcttgggaaccagtttatgtacttgcctacagatcccaacttccagcaagtgactggaattacacctccaacatgttctttgccatatnttcctagggatgtggagatgagac

SEQ ID NO: 47333 - DNA, 264 bp, Glycine max
  unsure (1)..(264): unsure at all n locations; Clone ID: 701133625H2
atccttacccccaattattnatggtgcacattcagccatcactntggagacaaagaatgtatttattgaatgtactgcaactgatctgacaaaagcgaaagttgttttaaatacaatggtaacagccttctcagaatattgtgaaaacaaatttgtcattganccagttgaagttatttcttctgatggcaagtcaaacatataccctgatttatctgtctacaatatggaagtttctctatcttacattactggattgattgg

SEQ ID NO: 47334 - DNA, 262 bp, Glycine max
  unsure (1)..(262): unsure at all n locations; Clone ID: 701133626H2
ctcaatcannccctcgattgctctctcgggtatattggaaattaanggagtggatattaagcacaagantgagatcaagagcgatcaacatggtatcttggtgtcggcaaacagcattggtgtttaccacgaccacttctacatttaccatcttgnccttgacattgatggtgttgccaactcttttgagaagacaagtttgaagactgtaagantgacagatggaagttcgaagaggaaaagctattggacaactgaggtt

SEQ ID NO: 47335 - DNA, 265 bp, Glycine max
  unsure (1)..(265): unsure at all n locations; Clone ID: 701133627H2
gaattcgtaaaccctaatttcggaaagatcggcgatgactgcctccaagganncgcgagancttcgtctacatcgccaaactcgccgagcaggccgagcgttacgacagagatnctggaatcaatgaagaacgttgcgaatctcgacgttgaactgacggtggaggagcggaatttgctttctgttgggtacaagaatgtgattggtgctcgcagacgttcctggaggatcctgtcttccattgagcagaaggaagaaacaaaag

SEQ ID NO: 47336 - DNA, 263 bp, Glycine max
  unsure (1)..(263): unsure at all n locations; Clone ID: 701133629H2
gcgatctagaacttgccnaacggtgttggaatttgtgatctggtgaatcatgaatgctaggagagatggtcgtaacaacagagttgctctttttgatggtattgaggagggtggcatcagagcatcgtctctttactcctcaacttcttcccatgaaattgatgaacatgataatgaacaagcattggatggattgcaagatagagttaatctgctgaaaagattgtcaggtgatataaatgaggaagtggatagtcataacc

SEQ ID NO: 47337 - DNA, 170 bp, Glycine max
  unsure (1)..(170): unsure at all n locations; Clone ID: 701133630H2
cgagaatggggatcgaagccggggagcggaggttnngcgtcggcgcagaacgaagccatagaccggcgagagcgtctccggcgattggctctggagaccatagacctggcgaaggatccctatttcatgcgcaaccacctcggaagctacgaatgcaaactctgtctcac

SEQ ID NO: 47338 - DNA, 268 bp, Glycine max
  unsure (1)..(268): unsure at all n locations; Clone ID: 701133631H2
gtacaatgatcctgtggatggttccatctcatcanatcagggaatccgatatttgtttgaggatggatcacgattgattttccgcctatctggaactggatcagaaggtgcaacaattcgactatacattgagcantatgagaaggatccatcaaagattgggagactttcaaatgaagcccttgctcctcttgtggaagttgcattgaaactttcgaagatggaagaattcactggtcgatccgctccaacagtcattacatgaaca

SEQ ID NO: 47339 - DNA, 268 bp, Glycine max
  Clone ID: 701133632H2
gggtctcctcagatctcagcattgtggaccttgatgtcccatttggctttgtttttgctgtgggagccactatgaattgctatgctaatctaaccgttttagctgttgttacttggcaagtcttgtttgtctccataccaatgatttattttgcaatcagcctgcagagatattactttgcctctgcaaaagaactgatgcggctgaatggcaccacaaaatcctttgttgctaaccatcttgctgaatctgttgctggagctgtgac

SEQ ID NO: 47340 - DNA, 254 bp, Glycine max
  unsure (1)..(254): unsure at all n locations; Clone ID: 701133633H2
cctggtgaagaagccanggattgtgataattggagcaggaatggcaggtctcacagctgccaacnagctctacactgccactgcctcaaaggacttgtntgagctgtgtgtcgtggagggtggaacaaggattggtggcagaatcaacacctcagagtttggtggtgaccgcattgagatggganctacactgatccatggaattggtggcagccctattcnntannttgcncacngatctantcangctantc

SEQ ID NO: 47341 - DNA, 263 bp, Glycine max
  Clone ID: 701133634H2
gcgaagtcgtaggagggtttcaaaagatggagaacatgcagagcttctggcaattgggcgatgaactccgtggacactcaaaagcatcggaggatcacaaatggttaatggttgcttcgaaattggcggaacagacaagattgaagggggagcgtgtgaacaaccttgatctttcaaagggccccattgaaacaaggtcaagggataaatttgggttccaggaagagaacaaatttgattctcttaacttaagcatgttgaac

SEQ ID NO: 47342 - DNA, 244 bp, Glycine max
  unsure (1)..(244): unsure at all n locations; Clone ID: 701133635H2
gagaactcccatgcagcaacancnacnagcaaaatctcacactttcaaaagcttcaaaacacccaaagatgcaaattcctctttgacatgcttgcttttggtganttttgggattgtgcttctcatcgtgatcatagttctgctgcttagtcagaggttatctcanttacattatggagcanatgcatatatactgggcagcagatagcatctcccttgctgatggtgtcacttgattggtgtt

SEQ ID NO: 47343 - DNA, 263 bp, Glycine max
  unsure (1)..(263): unsure at all n locations; Clone ID: 701133636H2
caaaccctctctactctttcttcttctcttcgctagggttttagcttcttcctcttcacttcgtnacttgctggcctctacaatgagcaacgacaaggacaccttcaacgtcgctgatctcacttccgctctcaacgaggacactagagcagaccttgtcaatgctctcaagagcaagatananagtttggctggacagcattctgatattctagagnctctgnngcccaatgtcaggangcgtgtggaggtcntagagagat

SEQ ID NO: 47344 - DNA, 261 bp, Glycine max
  unsure (1)..(261): unsure at all n locations; Clone ID: 701133637H2
gcgttctatatattattgaattgacaatgaggcctgctcttgctttgcttcctcttctatttgctttacttgttagctgccactacggnatcaagaaaagatccangggaatattggaaaatgatcatgnaagatcaggnnatgccaganggacttcaaggtcttgtttcatttcaatctgaaaataaccctaagactcaagagcagcttggtaaaggttccaaaaaccatgtgaagagtctctagttacaaatacacang

SEQ ID NO: 47345 - DNA, 146 bp, Glycine max
  unsure (1)..(146): unsure at all n locations; Clone ID: 701133638H2
ctttagcaaccatctaagaagttcagtcccttaattatctctcaccttganttagnaaagcattcnaagctttgaacccaatttcactgtttgcacctcaaacatcttagaagtcccaattgagtctcaattccacacaacnnacg

SEQ ID NO: 47346 - DNA, 242 bp, Glycine max
  unsure (1)..(242): unsure at all n locations; Clone ID: 701133640H2
aagatggccgacgatccaatgcccacgcgctggtctttccaggacttcaaattgtgttatgatgctaagtttggtagaaagaaagtcgcggagaacggagatgatgctgccggtaaagcggtcagcaatggaaatggaaattcagtgacagtngccattgtgtccaatggcaacaaaagggcatcggaaatggctgtttatgagcagtttcgaannntngggcagaatcagattcacacaaa

SEQ ID NO: 47347 - DNA, 263 bp, Glycine max
  unsure (1)..(263): unsure at all n locations; Clone ID: 701133641H2
gaaaagccttcgaggtcccaaaagagtcataatttgcctcaaagccatgtcttgctggtctgcagaanatgccacaaaggcttatctcaacacattgaaaatgggtcaaaaggccaaagaacccgcggttgcagagttcatatcagcactagccgctggcaacactgcacaactaatggttgtggcatgtgctggtgcagcagactcaaccacactagcattggtcactgctgcacaccaaactggtggtcttctggatcaaa

SEQ ID NO: 47348 - DNA, 198 bp, Glycine max
  unsure (1)..(198): unsure at all n locations; Clone ID: 701133642H2
tagaatggancctgtaggagccttccctgatggagaatgggattgctttcgccgaatttttgcnagtgatgaggagcatgagcatgatttattcacacctcaatttccacttctgtttgatgnngatgatggattgaacattgtgacacaacacacattttgtgctgctcctgaagccggtgaaaatgcgtgtatgtt

SEQ ID NO: 47349 - DNA, 260 bp, Glycine max
  unsure (1)..(260): unsure at all n locations; Clone ID: 701133643H2
ttctcattccccatctcctcaccttattcagccactgctaatttctagggttccgaaatggacgctggcggaaagatcaagaagggcgccggaggaagaaagggcggcggccctaagaagaagccggtttcaaggtccgtcaaggccggtctccaantccccgtcggaagaattggccgttatttgaagaaaggaaggtacgcccagcgtgtcggtaccggtgctcccgtttacttggccgcagttctcgagnacctagc

SEQ ID NO: 47350 - DNA, 262 bp, Glycine max
  unsure (1)..(262): unsure at all n locations; Clone ID: 701133645H2
gtaacagcagagcanaacaccgataaatcgctatgactgctcagacccaagangagcttcttgcggccgaccttgagcaacaaaagatccatgatgatgagcctgtannnnnnnnnnnnnnnnnnnnnnnnnnnnnngacgacgatgaggatgacgacaatgttgaaggtgatgcatctggtaggtccaagcagaccagaagcgaaaagaagagtcgcaaggcaatgctcaaactttcaatgaaacctgtcacaggtgtcag

SEQ ID NO: 47351 - DNA, 262 bp, Glycine max
  unsure (1)..(262): unsure at all n locations; Clone ID: 701133646H2
agcgatccnaganaaactctgtaaacatgttggtttaccaggacctccttacaggtgatgagcntctctctgactccttccgttacaaggaaattgngaatggaatgctgtgggaagttgaggggaagtgggttgttaaaggagcagttgatgtagacattggtgcaaacccntctgctgagggtggaggagaagatgagggagttgatgatgcagctgtnaaggttgttgacattnnctaacacattcagacttcaggagc

SEQ ID NO: 47352 - DNA, 249 bp, Glycine max
  unsure (1)..(249): unsure at all n locations; Clone ID: 701133648H2
ganacgcactaaggcaacttgcacctgcatacgggcaaacaggaagtggaaaaacttaacacaatgaagccactgccacttaaagcatcaagggacatccttagattgatgcatcatacttacaggaaccagggatttcaattgtttgtgagtttctttgaaatatatggtggcaagctctttgatcttcttaatgatcgaaaaaaactttgcatgagggaggatggtaagcagcaagtttgcattgtg

SEQ ID NO: 47353 - DNA, 265 bp, Glycine max
  unsure (1)..(265): unsure at all n locations; Clone ID: 701133649H2
gcccattgaagaatgcattagagctgggtgttatgcagccaatgttatcatccaaaggcctggctgcacatacccaccgacgcctgattttcattgagtgattcctctttttctgttactgctatgaatttntttctttttatcattgagaaggattttaatagccacactctaactggtgtggggttttttaaccccccggctagggaaaacagcgtgaaaaagttgcagcaagagataaaacttgaataagttcatatatttg

SEQ ID NO: 47354 - DNA, 231 bp, Glycine max
  Clone ID: 701133650H2
tgcttaagtgatacctggattattccttacttctgttgatgtttctggtcgtcgcagcttaaggaatttgttcggaggtgtggttaccttgcagggagtgcaaagaagtcttccaaggagttgtactagtcgcctcaatccaattttgtgctattttcctcagcacttaattgctggtgtcaggacaccactgtttcttctcaatgcagcttatgatacttggcagatcaa

SEQ ID NO: 47355 - DNA, 259 bp, Glycine max
  unsure (1)..(259): unsure at all n locations; Clone ID: 701133651H2
agtgtccttcctttctggacaatgtttttggtgttgacccttcagaagtgcacctgcatgtgcggcgtattccggtggaggagattccagcttctgaaaccaaagctgcttcttggttaatcgacacattccagatcaaggaccaattgctttcggatttcaagattcaaggccatttccctaaccaactaaatgaaaatgaaatttctagattncagagcctactctcttttatggtgatagtttctttactgccatg

SEQ ID NO: 47356 - DNA, 258 bp, Glycine max
  unsure (1)..(258): unsure at all n locations; Clone ID: 701133652H2
caaccctacgattgtttatcatcatttgggagaaatttattcagctctcatcttcggcagctttctcttctgtgttttcttgtacatcaagggtcatttggcaccgtcttctacagattctggctcatctggaaacttaatcattgatttttactgggggatggaactttatccacgcattggaaaacattttgacataaanaangcncaaattnagattggaatgatgncatgggctgttcttgcactgacctactg

SEQ ID NO: 47357 - DNA, 261 bp, Glycine max
  unsure (1)..(261): unsure at all n locations; Clone ID: 701133656H2
cttcaaaccgctttttttctcgaaccgggcggcggcggcgcttcgcggcggcactcgattgagttgtagaatgcnagtgatcggattccgaaatggcttcgaacccttcgcttctccctgagatcggacccgatggtctcgctaaagaagctcccgtcatcggctacaccgagaagancatcgaagcagaacagttcaattgngaaatnccttcaaggaaactattctaaaattcgtgatgtggaacgtnacttgcaaatt

SEQ ID NO: 47358 - DNA, 257 bp, Glycine max
  unsure (1)..(257): unsure at all n locations; Clone ID: 701133657H2
gcgtanagaggttaaaacatatgtgccgtatgtaatcagggcaataacttcagctgtcaacgagttgattggtttaggggctcgcacactcatagttcctgggaatttaccattgggatgtagtataaattatttaacaatctatgaaaccatggataagaaccaatatgatcaatatgggtgtttgaagtggttaaatgagttcgctgaatattacaaccaaaagctccaagtgattagataggctcggggnttca

SEQ ID NO: 47359 - DNA, 260 bp, Glycine max
  Clone ID: 701133658H2
ggaatagtgctgcaatggcttcaagtcaggaggaggtgacccttttgggagctactggaagcccatttgtgtgcagggttcatattgccctcaagttgaagggagttcaatacaaatatgtcgaagaaaatttgaggaacaagagtgaactgcttctcaaatccaacccagttcacaagaaggttccagtgtttattcacaatgagaagcccatagcagagtctcttgtgattgttgaatacattgatgagacatggaag

SEQ ID NO: 47360 - DNA, 261 bp, Glycine max
  unsure (1)..(261): unsure at all n locations; Clone ID: 701133659H2
ctcganccntcttantcttaatgtgcatanntagatttngggatctgcntatcnnatgcttgctcanacttangtttttngctagcttgcagtaaccccncnacatatanatatctggcaagtttcatcttcatggaatgtatctagtaaagtaaagtaaaaaaatgtcagtganacccatcacaatgngcatancnagagaaaaacacttttnntttgtaaanctttctcttaacaatattnnataatgttaatcataag

SEQ ID NO: 47361 - DNA, 163 bp, Glycine max
  unsure (1)..(163): unsure at all n locations; Clone ID: 701133660H2
ctgaagagtgtgtggaagcagacagaagaaggncagaaggaatcggcggtgttcgacncnacgatcgcatctcaanattgggttcggatcantnntttgcttgttcgacaattttttntcgcttgcggttnttcggaggcattttcttagttganttgtatgg

SEQ ID NO: 47362 - DNA, 260 bp, Glycine max
  unsure (1)..(260): unsure at all n locations; Clone ID: 701133661H2
gtccatctcaaaaaaatgggtggtttagctagcaatcttcctctaattgttatggtnggtctncaaattcattatgcagcacttgctatattcacaagagccgctttgttagatggattgagtacgacggtctttgtagtgtacaggcaaggcatagncactttggctttggcgcctatgtttttctctcctaagcggagacanccagtgaaagattcttgggattcaggagcttctttttgatgtttgtgaccgctctt

SEQ ID NO: 47363 - DNA, 268 bp, Glycine max
  Clone ID: 701133664H2
tggaaatgtccgctgtcatttacaaggactgggttttcactgatcaagcattacctaatgatcttgtaaagagaggagttgctgttaaggacccatctgctccccatggagttcgtcttttgattgaggactatccttatgcttctgatgggctagagatatgggatgccatcaagtcctgggtgcaagaatatgtctcattctactacaagtcagatgaggaactccaaaaagaccctgaactccaagcttggtggaaagaacttgt

SEQ ID NO: 47364 - DNA, 258 bp, Glycine max
  Clone ID: 701133665H2
gtttaatgttaatgtcatgtattttgatcattttgcacgagggcttatcataagtaatagtacagtacttttttggattgtcattttattgttatgaaatatgactaattttgcttattttaagtcaaagaacctaataatatgaattgtaattggttgacctaataaaaagatagtgcacgaaaattaaacacttcaaatttatcatagaacatatatagttttttttgtgtgaccctagtatctaaaagttatttt

SEQ ID NO: 47365 - DNA, 235 bp, Glycine max
  unsure (1)..(235): unsure at all n locations; Clone ID: 701133666H2
gaaacgctgtcgttgcgccaatcgcggcgttgttgttactggtgctactcgcggcgantgtggtggtggaggctcaggagaactcggacgtgaagacgctggtgaagcacatgcacgggaagaagtactgcgacaaaggatgggaatgtaagggctggtcaatttactgttgtaacctcactattactgattatttccagacctaccagttctccaatctcttctcaaacggaac

SEQ ID NO: 47366 - DNA, 258 bp, Glycine max
  unsure (1)..(258): unsure at all n locations; Clone ID: 701133667H2
gacttcctcggttacttcctcttttcgcatcancaatttgaattctgtttttgttggtgagacaaataaattcagantttcaactgtnccctggngcncatgtnggtttcattagananactgtagaatgtaaggnatcacgaattgggangctaccaattcctgtnccatccaatgtnacagtcaaattggaaggacaggatatacaagtgaaaggtccttgggagaacttgcattaagttatcctcgagaagtgtt

SEQ ID NO: 47367 - DNA, 257 bp, Glycine max
  unsure (1)..(257): unsure at all n locations; Clone ID: 701133668H2
ctccgttctaattctcagcgatcacttattgnatcatcaagtcctctgtcaaaaactgnaaggnaacttaagataactgttgtagaagcaaaggatctcgctgcaaaagacaaatctgaaaaaattaacccatacattaaattgctatatggaaaggttgtcaagaaaacaaaggtnnnnnnnnnnnnnnnnnnnnnnnnnnnaaatcctgtctggaatcaatcatttgaatttgatgagaatgatggtgatgaata

SEQ ID NO: 47368 - DNA, 257 bp, Glycine max
  unsure (1)..(257): unsure at all n locations; Clone ID: 701133669H2
tggcacttcgttgcttggtgatgtccctttctgttctcttcactcttggtcttgcgagagaaagccatgccaganacgaagatttttggcatgctgtttggccaaacactcccattccaagttcnttgcgaganccttctaaagcctggncctgcaagtgttgaaatcgatgatcaccctatgcaaattgaagaaacacagtacccgaaaaccttcttctataaagaagaccttcatccaggcaaaacaatgaaagt

SEQ ID NO: 47369 - DNA, 245 bp, Glycine max
  unsure (1)..(245): unsure at all n locations; Clone ID: 701133670H2
ggaggggactgttttcactcctgcacttnaaggaattaagcttgtaaaatcagagcaaggagaaattttgacccagcctttcttggatgcttgcaagcatatactgcctgttatagacaagtttggagctgctatggcccttgcnaatctgacattggtggtaacatatcgagattggaatctaagtattcctccaatccaaccaaattcaactacctgtacagtttggtacaagtagaggttga

SEQ ID NO: 47370 - DNA, 236 bp, Glycine max
  unsure (1)..(236): unsure at all n locations; Clone ID: 701133673H2
atctatggctacccttattgctacnagcaaccactctccccaagaagatgctgaagctctcagaaaggcttttgaaggatggggaactgatgagaacactgtcatagtaattttgggtcatagaactgtgtatcagaggcagcaaatcagaagagtttatgaggaaatttaccaggaggatcttgtgaagcgcctagagtctgagatcaaaggagactttgagaaagccgtgtacc

SEQ ID NO: 47371 - DNA, 257 bp, Glycine max
  unsure (1)..(257): unsure at all n locations; Clone ID: 701133674H2
ctcgatcttttcactactttcaccaatatctccatntccccatcaaaggtggaacttaattgtgtgtcatcgactactgtgaaccatcttcattcgatttcggagcctaaattaggtcataaatcaaacccaaaaaacaccatgaaaggaaacaagaagccttatctagttgcgatcctcatagaagccatctatgctggcatgtttcttctctcaaaagctgcatttgaccatggcatgaacaatttcatctttgt

SEQ ID NO: 47372 - DNA, 255 bp, Glycine max
  unsure (1)..(255): unsure at all n locations; Clone ID: 701133675H2
gagatcccctttttctcctaagaaaagccatggctaagggtcccggtctctactctgacatcggcangaaagccagggatctgctgttcaaggactaccacagtgaccagaagttcaccatcaccacctactcacccactggagttgctataacagcatcaggaaccaggaaaagtgaactgtttgtggctgatgtcaacacccagttgaagaacaaaaacatcactactgatatcaaagttgatacagttctaa

SEQ ID NO: 47373 - DNA, 255 bp, Glycine max
  unsure (1)..(255): unsure at all n locations; Clone ID: 701133677H2
atggganggagtntcagtccatgctgganggactcgacgaagaagggngcgtggaagaaccagggcaccactctgagaagaaacgacgactaagcgtggatcaggtgaaggctttggagaagaacttcgaagtagagaacaaactcgaacctgancgaaagttgaagctggcacaagaattggnttgcaaccaagacaagttgcggtttggttncaaaaccgtcgtgccagatggaagacnaagcaattggaaag

SEQ ID NO: 47374 - DNA, 239 bp, Glycine max
  unsure (1)..(239): unsure at all n locations; Clone ID: 701133678H2
ctccactgtccttctacctcatcattccgttccgatctcatcatccgccncacgaagatgaacggtgcagggagacaggggctgagatctggtgcggcgggggtgcaccaccagcgccagtactccgataacttcctcgacagctcatccatnggcaacaggtgnccccagtcggctggccttcaacaccttcaatcctccaccacacaacanatagnngaaaanatanaacttgtacg

SEQ ID NO: 47375 - DNA, 261 bp, Glycine max
  unsure (1)..(261): unsure at all n locations; Clone ID: 701133679H2
cacttcatagtaagcactatagaaaaaacgacattcattcatctatggctacccttattgctcccagcaaccactctccccaagaagacgctgaggctctcagaaaggcttttgaaggatgggggactgatgagaaaactgtcatagtaatattgggtcatagaactgtttatcagaggcagcaaatcagaagagtctatgaggaaattttccaggnggatcttgtgaaacgcctagagtctgagatcaaaggagactttt

SEQ ID NO: 47376 - DNA, 250 bp, Glycine max
  Clone ID: 701133681H2
tccatgtcgtttttgtcgttgcgactaagagttgctgcttcttccgccactcagcactttcgctccctctgtgcttcaccaaccatggccgaaatcgaagctaccgttccagatccctctcaaatcgacgtcaaacttttcaaccgctggagcttcgacgacgttgaggttactgatatgtctctggctgattacattggagtgtccccgtcaaagcatgctacatatgttcctcacactgctggtaggt

SEQ ID NO: 47377 - DNA, 232 bp, Glycine max
  unsure (1)..(232): unsure at all n locations; Clone ID: 701133682H2
gatcatgatcatgatcatgtggatggtggtggatcacaaaacagtgccagcaacatcactgaaattgtgaccaccccagaaggggaaaacttagganaatggctgagtctaggcctcaaaggagacatcaacatgccagcagaagaacaaaactcatcatcaaggcctctccacagcaacaacaacaaggtattctcatgcaacttctgcatgagaaagttttacagttcac

SEQ ID NO: 47378 - DNA, 256 bp, Glycine max
  unsure (1)..(256): unsure at all n locations; Clone ID: 701133685H2
gaattttaatacttaggaagtttagttttctctcttggcttctccggttggagtttccggcgaccttgtcggagattttgttgtttatttttcacaccacttgtgaaanttctcaagaaaaagaaaaaggatgtttcttgttgattggttctatggaattttggcgacccttggcctgtggcaaaaggaggcgaagattttgttcctagggttagataattcncnnnnagaccactttgcttcacatgctcaaaga

SEQ ID NO: 47379 - DNA, 255 bp, Glycine max
  unsure (1)..(255): unsure at all n locations; Clone ID: 701133686H2
agatcatagtgatcattttttaatttctcagatttatccgacgtcgctgcagatccaccaaccgtactggctgccttcagcggtgatgaaacggcaccgtttttcggcttccttggcgccgcagctgccctcgtctnctcctgtatgggagctgcctatggcacagcgaagagtggcgtgggcgtggcttccatgggtgtaatgagacctgagctggtgatgaagtcgattgttcctgttgtcatggctggagtt

SEQ ID NO: 47380 - DNA, 243 bp, Glycine max
  unsure (1)..(243): unsure at all n locations; Clone ID: 701133688H2
tgcaaagcctctattttttcttgtgaatttgaaggacgatgagttccacanaggtcgcagccacaacgaagaagggtggaagagggaaacccaagaccacaaagtccgtttcccgttcctccaaagccggccttcagttccccgttcggccgntcgntnctactcaangccggtcnctatgcccagcgcgttggttcggttccccnttaactatcnncncnccccgatacttcccgntgaggt

SEQ ID NO: 47381 - DNA, 256 bp, Glycine max
  unsure (1)..(256): unsure at all n locations; Clone ID: 701133689H2
ctcacgcccttatggttttgtaaatcaccggaatcgcgtctattacagctacatgcttatgaatggcgtggcgcgacttggaaagaagagnatatatatnaattttactagagctttgtcgacaacaccatttagacatgtggcaggatcaaattttgcatccatctttactgtgcaatctgtttgtgcatcagcaagatgtgtgccggatttcatcaacctatcatctctgggagtggcnggttttggcagggag

SEQ ID NO: 47382 - DNA, 257 bp, Glycine max
  unsure (1)..(257): unsure at all n locations; Clone ID: 701133691H2
ctcagganngctggagcccgcgggcgagtncctatcggntanagccaatgattagaggcatcgggggcgcaacgcccttcgacctattctcaaactttaaataggtaggacggtgcggctgctctgttgagccgcgccatggantcgagagctccaagtgggccatttttggtaagcagaactggcgatgcgggatgaaccggaagctgggttacggtgcccaactgcgcgctaacctagaccccacaaaggtgttg

SEQ ID NO: 47383 - DNA, 258 bp, Glycine max
  Clone ID: 701133692H2
gggaagaacaaacattcaattcatggcggctgcaaagcttcaagctttatggaatcacccagctgggcctaaaaccattcacttctgggcacctacctttaagtggggcatcagcattgccaacattgctgatttctcaaaaccacctgagaaactttcctatcctcagcaaatagcggtcacagctactggaattatctggtctcgttacagcactgtaatcaccccaaaattggaacctgtttagtgtaaacattg

SEQ ID NO: 47384 - DNA, 152 bp, Glycine max
  unsure (1)..(152): unsure at all n locations; Clone ID: 701133693H2
gggaagaacaaacattcaattcatggcggctgcaaagcttccaagctttatggaatcacccagctgggcctaaaaccattcacttctgggcacctacctttaagtggggcatcagcattgccaacattgctgattnctcaaaaccacctgag

SEQ ID NO: 47385 - DNA, 254 bp, Glycine max
  unsure (1)..(254): unsure at all n locations; Clone ID: 701133694H2
ctgggttttcactgatcaagcattatctaatgatcttgtaaagngaggagttgctgttaaggacccatctgctccccatggagttcgtcttttgattgaggactatccttatgcttctgatgggctagagatatgggatgccatcaagtcctgggtgcaagaatatgtctcattctactacaagtcagatgaggaactccaaaaagaccctgaactccaagctggtggaaagaactgtagagtgggtcatggtg

SEQ ID NO: 47386 - DNA, 261 bp, Glycine max
  unsure (1)..(261): unsure at all n locations; Clone ID: 701133695H2
aaaccccttacggcttacgctgcttncttttttctncatttgcggttttgatttggatttggatnnggatttggactttggtcgtcaacacagcttttggtcnttcgcttcgtttacgaatcctcttcttgttgttcctgcaacgcactgcatnccgatcaatccatccatcttcacttgcttggtttcgatcggagggaaatggccgatcagttatccaaaggagaggaattcgagaagaaagctgagaagaagctcagc

SEQ ID NO: 47387 - DNA, 254 bp, Glycine max
  unsure (1)..(254): unsure at all n locations; Clone ID: 701133696H2
gtttttacangancnanncctccaaagngtctgantgcaaatgctctaatttgcaatcagacactttggaggcnagatcatgctaattctgatggtggtcagtttntacatagttggacctttttgaatgaatggttaaatgagnnngtgagagaacaaattaatttcttgacggcatagcctaaacagttgtttctggttctcactggacggaatgtatcttttagctagcaaaagtatatnncttaattacc

SEQ ID NO: 47388 - DNA, 257 bp, Glycine max
  Clone ID: 701133701H1
gcactataccagaatgtctcagggaagaggcagtgcatctttgcctattgtggtcactgtggtttcactactgtgccttttggaacgtgctaacgcagcaacttactccgttggaggacctgggggatggaccttcaacactaatgcttggcccaatggaaaaagattcagagctggtgatatcctaatcttcaactatgactcaacgacccacaatgtggttgctgtggacagaagtggatacaacagctgcaaga

SEQ ID NO: 47389 - DNA, 261 bp, Glycine max
  Clone ID: 701133704H1
cggggttacgctttgcgagtgagaattgataaacaaatcgttagggttttttggttgtgcgagtgagagtgagagagaacaatggaagacataacagagggagtgaacaacatcaacatctctgattcgtataagaaaaatcgcattcaggtctctaacaccaagaagcccctcttcttctacgttaatctggccaagagatatatgcaacagcatgatgaggtcgagctctcagctctaggaatggctattgccacagta

SEQ ID NO: 47390 - DNA, 260 bp, Glycine max
  unsure (1)..(260): unsure at all n locations; Clone ID: 701133705H1
gcagccttgctttgcttcgctgttgatccattctagagaganaaacactttttcaactctctcactctctctaagatggccgacgatccaatgcccacgcgctggtctttccaggacttcaaattgtnttatgatgctaagtttggtaggaagaaagtcgcggagaatggagatactgctactgataaagcggtcagcaatggaaattcagtgacagtgaccattgtgtccaatggcaacaaaagggcatcggaaatggc

SEQ ID NO: 47391 - DNA, 259 bp, Glycine max
  unsure (1)..(259): unsure at all n locations; Clone ID: 701133707H1
gtttctgtcggtgctcctttgtgccacttttcatgtctccttctctattatcgacggtttagttgccaacggcaactttgagttgggtccaaagccctccgccctaaaaggaacagtggtggtgggcgggagccnctcgatcccngaatgggagatctccggctttgtggagtacataaaatccggccaaaagcaaggggacatgttgctcgtcgtcccagagggtgcctacgcggtgcgcctagggaacgaggcctcc

SEQ ID NO: 47392 - DNA, 259 bp, Glycine max
  Clone ID: 701133708H1
ctatctagaagtggaaagctgaacagaattatatacgattcgcgcgaccctgacttgagcaagatagttatggatgatctccctggagggcctgaggcttttgaacttgcatccaagttttgctatggaattgcaattgatttaacatcaggcaacatctctggccttagatgcgctgccgagtaccttgaaatgacagaggacctagaagagggcaatctcatattcaagacagaagcctttcttagctatgtggttt

SEQ ID NO: 47393 - DNA, 255 bp, Glycine max
  unsure (1)..(255): unsure at all n locations; Clone ID: 701133710H1
gttgctcgcaactcatcaaatcaggttcggaggatgggacaacacgaatttgggattgcaaaagtggaaagngtacgcaagtnattgatccancaagaganttgaaattaaagggatctgctcatgggttggttgtgttgctttagatgcaagtgagagctggttggcttgcagtagtggacgtaatatatcacttggaaccttcctgcntcagaatgcgtatcaaagattccaactcgngcttgtgtacaagac

SEQ ID NO: 47394 - DNA, 266 bp, Glycine max
  unsure (1)..(266): unsure at all n locations; Clone ID: 701133716H1
cgaaaacgcaccgttttgttcctncttctcgttcctaagaaaactgaacaagtgaagcagggtttgattcaaagctccggtgcataaacagcaatggcagagaaaccccaaccggttcgggttctatactgcggggtgtgcagcttgccccccgaatactgcgaattcggatccgatttcgagaaatgcaaaccctggttgatccaaaacgtccctgacctataccctgatcttctcaaagaggcaaatgagaaggaagctgataa

SEQ ID NO: 47395 - DNA, 261 bp, Glycine max
  unsure (1)..(261): unsure at all n locations; Clone ID: 701133724H1
aatcatcgttatgccatatccccacgcaagcttcaatataataccaagttatctgacttttttgagattctggcaacatctgaggatagagatggaaagactttcgtttccacagcacgtggtaggnaatatcccgtgactgtcaacctatggcaaccagagaaaaatgcttttgaatgggctacatctttgaaagcccctcacacagaggatgcaattcgggttactcagtccacagcaaactttttcataagtgaagct

SEQ ID NO: 47396 - DNA, 259 bp, Glycine max
  unsure (1)..(259): unsure at all n locations; Clone ID: 701133725H1
cctancctcattattatcatagtagatattcattccccttatctttctctcttctctctccccgcccaaaccctaactccctaccctattccgctttctctcatccatcatgaaaggaggaaagtccaagaccgaatctaagagagccgatgccaaacttgctgtgaataagaagggcgccgccaccaagactaggaaacccgccggaaaggggaaggcagcgaaagatcctaacaagccaaagaggcctccaagtgct

SEQ ID NO: 47397 - DNA, 259 bp, Glycine max
  unsure (1)..(259): unsure at all n locations; Clone ID: 701133765H1
gtgaaactgcgaatggctcattaaatcagttatagtttntttgatggtatctactactcggataaccgtagtaattctagagctaatacgtgcaacaaaccccgacttctggaagggatgcatttattagataaaaggtcaacacaggctctgcctgttgctttgatgattcatgataactcgtcggatcgcacggcctttgtgccggcgacgcatcattcaaatttctgccctatcaactttcgatggtaggatagtg

SEQ ID NO: 47398 - DNA, 235 bp, Glycine max
  unsure (1)..(235): unsure at all n locations; Clone ID: 701133773H1
ctgccatccatcactcacaaaaaccccttacaaagtagtactacttggtttcaatcaaaacaaaaactcacactttggtggccacagcaacaataacaatggcagcctcactacaagctgcagctaccttcatgcaacccaccaaggtgggcatggccactcgcaacctcaaatctacacaatgcatttctnaggcttttggcttggaacccgctgcagctaaactcatttgctt

SEQ ID NO: 47399 - DNA, 245 bp, Glycine max
  unsure (1)..(245): unsure at all n locations; Clone ID: 701133789H1
tccaactttgcttacttcaactcttcctttaatagagttgttggtatgtatgtnttcattctgagaaatcgtacgtgcttcaacgtgttctcatttcgagtcttcattaaatgcttggggagctctacacgtttttttcttcataagaacaaagagagagagtacaatcgacacatctttaccaaaaagaagctactggttatgacacacaatattactttcctgaacattcctttttctgtact

SEQ ID NO: 47400 - DNA, 261 bp, Glycine max
  unsure (1)..(261): unsure at all n locations; Clone ID: 701133796H1
ttttgatggccagcaacaccttttgagtgacttgggctgtttctcgcagccccgtcctggcgccatttcagtgagtcgatctggtcggtctaagacactaaccccatcaaatctggatgaactattctctgccgagatttcttcatctccccggtattctgacccagcagtggcttctgtattttccccaagacacaaatcanctattatgaatcagtttcaacagcttcaaagttcgttatcacccataaacacaagtgt

SEQ ID NO: 47401 - DNA, 270 bp, Glycine max
  unsure (1)..(270): unsure at all n locations; Clone ID: 701133801H1
ttcccctgttttggctcccctgtttaaccaagaancttccaatggcaccccatgcatcttcttttgctctagtttcttctcatttttctctttgttgaaatgcacttccatggtgccactgctgactatggcggttggcagggtggtcatgctactttctatggtggtggtgatgcttctggaacaatgggaggtgcatgtggctatgggaatttgtacagtcagggatatggaaccaacatgcagctctaagcactgctttgttcaaaa

SEQ ID NO: 47402 - DNA, 267 bp, Glycine max
  unsure (1)..(267): unsure at all n locations; Clone ID: 701133802H1
tttacactcttttcttcttctcgttgttgcttcggtgttgaatcatggatcagaaagtcgatttcagtgctccgcattccatgggaaccactatcatcggcgttacttacaacggcggtgtcgttctcggagccgactctcgaaccagcactggagtgtatgttgccaaccgagcatcggacaaaatcacacagctcactgataatgnnnacgtgtgtcgctctggatcggctgctgattctcagattgtctctgactatgtgcgta

SEQ ID NO: 47403 - DNA, 243 bp, Glycine max
  unsure (1)..(243): unsure at all n locations; Clone ID: 701133804H1
gaaagaatcccaggcgaggagaaacatggaggggaaggagcaggatgtgtcgttnggagcgaacaagttccccgagagacagccgattnggacggcggcgcagagccaagacgacggcaaggactaccaggagccggcgccggcgccgctggttgacccgacggagtttacgtcatggtcgttttacagagcagggatagcagagtttgtggccatttnctgtttctctacatcaccgtctta

SEQ ID NO: 47404 - DNA, 208 bp, Glycine max
  Clone ID: 701133805H1
tgattgaagaagatgccgatcagaaacatcgccatcggaaggcctgaagaggctatccaccccgacacgttgaaggcggggttggctgagttcatctccaccttgatcttcgtgttcgccggttcaggttccggcatcgcctacaacaagctcaccgacaacggcgccgccactcccgccggcctcatctccgcttccatcgcccatg

SEQ ID NO: 47405 - DNA, 262 bp, Glycine max
  Clone ID: 701133806H1
acaatctgatccagtagagttcatgttcatggctacttaatacgctacatgcagatcttaagacttcaaagaagaatacaagcataatatatgagtgttttcagggtgaacttgaggttgtgaaagagattcctaacaaagtgatctccgataagaaagaaaacaatgctgagaaactttcagatggggtgaatgagcgatatgcatttgtcaaagaaacttcaaaaatgccatttctaatgttagggttggacttgccacc

SEQ ID NO: 47406 - DNA, 259 bp, Glycine max
  Clone ID: 701133808H1
caagtgctacactgacatgctgactcacggcaacaaattcaagtgcccatagaagaagcctaatatctagtaacttacctaagcttttttgttaatcaagtttgaatcatgagtaatgtggtttgagttgctagtgtatttaataaccgagagtgataatcataattgtacaagctatcgtgttaatcaaaatagtcaacactgtttgtgttgtctataggatccatttgtggtccatgaagaagtttatattcataat

SEQ ID NO: 47407 - DNA, 257 bp, Glycine max
  unsure (1)..(257): unsure at all n locations; Clone ID: 701133809H1
accctcattgaccttacagttatagaaatctggtcaatgcagatggtattataganaaaacattcttgtggggtaggtactctatggaaatgtccgctgtcatttacaaggactgggttttcactgatcaagcattacctaatgatcttgtaaagagaggagttgctgttaaggacccatctgctccccatggagttcgtcttttgattgaggactatccttatgcttctgatgggctagagatatgggatgccatc

SEQ ID NO: 47408 - DNA, 248 bp, Glycine max
  unsure (1)..(248): unsure at all n locations; Clone ID: 701133810H1
caaaacttgcctctttgcaacgctgcttctgacaaaaaacgttgtaccatccncaatgtcggacacagtggaacatacagatcaaagagctgaagctantccccaatccacagctacaccaaatnggactattcatgtgtcagacataagaacagttaaggttagcaacatatcattggttacttccaagaaggacattgaagaattcttttcattctcaggtgatattcgatatatcgagatgcaaa

SEQ ID NO: 47409 - DNA, 255 bp, Glycine max
  Clone ID: 701133812H1
gcttgtctcaaagattaagccatgcatgtgtaagtatgaactaattcagactgtgaaactgcgaatggctcattaaatcagttatagtttgtttgatggtatctactactcggataaccgtagtaattctagagctaatacgtgcaacaaaccccgacttctggaagggatgcatttattagataaaagggcaacacaggctctgcctgttgctttgatgattcatgataactccgtcggatcgcacggcctttg

SEQ ID NO: 47410 - DNA, 256 bp, Glycine max
  Clone ID: 701133815H1
cccaaacgaggtggaaaggctccggctcttgccgctaagaagaagcctgagaaggtttcgaatccgttgttcgagaagcgtccaaagcagttcggaatcggaggggcgttgcctccgaagagagacttgactcggttcgtgaagtggccaaagaatgttcaaattcagaggaagaagaggattctgaagcagaggttgaaggttcctccagctttgaaccagttcaccaaaactcttgacaaaaacctagcaacaa

SEQ ID NO: 47411 - DNA, 265 bp, Glycine max
  unsure (1)..(265): unsure at all n locations; Clone ID: 701133817H1
attggagcaggaatcagtggccttggtgcctgcaaataccttctagagtttggatttaacccaattgtctttgaagttgntgatggtgttggaggactatggagacataccatggactccaccaagctccaaaacaataaacaaatgttccagtttatggattttccatggccttcttctgtgaaagaagataatccaagtcacaagcaagtgctagattatgttaactccnatgctgaacatttttccctcatccnnacataga

SEQ ID NO: 47412 - DNA, 268 bp, Glycine max
  unsure (1)..(268): unsure at all n locations; Clone ID: 701133818H1
ctgtttccttcttcaccgcatcaatggncgtncggacggcgttctcctcggcatgtgcaaccctctcctcgacatctctgcngtncgtcgacgacgctttngtgcaaaaatacggtatcaagttgaacgatgcgattctcgctgaggataagcacaaacctatgtatgaagaattggctaacaatcctaatgtggagtacattgctggaggtgctactcagaattcaatcagggttgctcagtggatgcttcaagcaccaggtgccaa

SEQ ID NO: 47413 - DNA, 258 bp, Glycine max
  unsure (1)..(258): unsure at all n locations; Clone ID: 701133823H1
cgattttgtagtaagtgaggtgccaatatggtgaagatagctcttggtactttggatgactcttttagcgctgcctctcttaaggcttatttcgcagagttccacacaacacacnatanaatgttcgctggtgttggatcagccatcgcttacaacgagcttacaaaagattcagccttggatccaacggggctggtggnagtanctgtggcacatgcattgcactgtttgtangtgtctccgtcgccgccaacatct

SEQ ID NO: 47414 - DNA, 260 bp, Glycine max
  Clone ID: 701133824H1
ggtttctctgtctgcttcttcactttctctcgtttcaatcgaaaccaaaacaaaaacatgggcagaaaattcttcgtcggtggcaactggaaatgcaatgggaccactgaggaggtaaagaagattgttactactttgaatgaggctaaagtccctggagaagatgtcgtagaagttgttgtgagccctccttttgtgttccttcctgttgtaaaaagtttgctgcgccctgatttccatgtttcggcacaaaactgttg

SEQ ID NO: 47415 - DNA, 256 bp, Glycine max
  unsure (1)..(256): unsure at all n locations; Clone ID: 701133825H1
gctacctccatggngaagcttatgcattnatctncactcatactcttgnncttgcaancagttgtgtctgtaacaccactgcattttcaacatccantagannnaataacaaaacaagagataagtnttgtccaaaccatagtccaaaacaagtacccaancncaagtaacaggttgagnttccacaanatanaagacanaaaaantgaaaaagatgtnatnctcaaatgggaatncancaaancaantgntataa

SEQ ID NO: 47416 - DNA, 255 bp, Glycine max
  unsure (1)..(255): unsure at all n locations; Clone ID: 701133826H1
gttcatacttcatcctattattactttccctctttgcattccaaatggccactgttgnggttgcacagcaaacaccaacaactgtgacaganaatgaaacaacgactgaggtaaccaagattgaggaaactaccccagaacagccagccnccgaggttactgccccagaaacagtcaacgaagaagcaaaagaggnagcagcagttgagactaatgaggcaacagaagttacagaggaagggaaggctgagaaaa

SEQ ID NO: 47417 - DNA, 261 bp, Glycine max
  unsure (1)..(261): unsure at all n locations; Clone ID: 701133828H1
ccangtagtncatnggcttggctnaaatattcangccatgcatgtgtaagnatgaacnaattcanactgtgnaactgcgaatggcncattaaattcagttatagtgtgtntgatggtatctactaactncggatnnccgtagtaattctagagcnaatacgtgcaacaancnccgncttctggaagggatncatttattagatanaaggtcnacanaggctntgccgnttgctttgtatgantcatnataactcgtnggat

SEQ ID NO: 47418 - DNA, 89 bp, Glycine max
  unsure (1)..(89): unsure at all n locations; Clone ID: 701133830H1
ctggtctcatcgatctcaacaacgccaanccgaagacgatgaaatnccgtcgtctggctgcctcctccacacaacatacgngganagnc

SEQ ID NO: 47419 - DNA, 268 bp, Glycine max
  unsure (1)..(268): unsure at all n locations; Clone ID: 701133833H1
tgttactaagtatgatgattttnaactcaagtcaagcgttaccaagaacaatgattttgaaccgagaccaagtgctaccaaatatgatgattttgaactcaggtcaagcgttaccgagaatgatgattttgaaccgagaccaaatattagcaagtatgatgactttgaactcaggtcaagcgttaccgagaatgatgattttgaatcgagaccaagtgttaccaaatatgatgatttagaactcaaatcaagcattaccaaaaacgtg

SEQ ID NO: 47420 - DNA, 266 bp, Glycine max
  unsure (1)..(266): unsure at all n locations; Clone ID: 701133834H1
aaaaccagaagcgaaatcgcaatcgcaatccagcgaatatgaaggtcgtcgctgcatacttgctcgcagtgttgggagggaatccttccccttctgnccgatgacatcaaacacatcctcggcgcagttggagctgaggctgagaatgagttgattgagttgctcttgactgaagtcaagggaaaagacttcaatgagctaattgctagtggaagtgaaaagatgtctgcagtgtctggtggcggtgcagcggttgccgttgctgc

SEQ ID NO: 47421 - DNA, 253 bp, Glycine max
  unsure (1)..(253): unsure at all n locations; Clone ID: 701133841H1
ctcaaagcaancctacgctctgtatacattagcatgggataacaccacaggattctgatcctattgtgttggcctcgggatcggagtaatgattaacagggacagtcgggggcattcgtatttcatagtcagaggtgaaattcttggatttatgaaagacgaacaactgcgaaagatttgccaaggatgttttcattaatcaanannnaanaaagggcgggccgccctttttgtgtggttgtgntntggtntg

SEQ ID NO: 47422 - DNA, 268 bp, Glycine max
  Clone ID: 701133849H1
cgtgggggagctgagcgcggcggacctgaaggggaagaaggtcttcgtcagggccgacctcaacgtcccgctcgacgacaaccagaacatcaccgacgacaccagaattcgcgccgccattcccaccatcaaacacctaatccaaaacggcgccaaagttattctctccagccacttggggaggccgaagggtgtcactcccaaatacagcttggcacctcttgtgccccgggctttctgagctcattggtatccaggttgtcaaggt

SEQ ID NO: 47423 - DNA, 264 bp, Glycine max
  unsure (1)..(264): unsure at all n locations; Clone ID: 701133850H1
ccccccccccctccaatcgctgcatnggccatccattgtaggagcattctctgattaccaaacaatgagacccccgagaggcggtggacgcggcggtggattcagaggtggccgcgacggnggattcagaggtggccgcgacggtggcggtcgcggcanaggtggttttggtcgcggcggangtggttttggtcgcggaggaggtggttttggtcgcggcggcggatttcgcgacgaaggaccaccctcccgaatcgtaaagnt

SEQ ID NO: 47424 - DNA, 232 bp, Glycine max
  Clone ID: 701133860H1
ggaaaatacaaagctgattataattaccaacccttctttggtagatacaaaaacttcaaaatacaaggttgtaccactgaagcttcaacctcatgccagccaccatctccctcaccaccaggctatggcagcctaagccctcagcaactttctgcaatgcaatgggtccaaaacaactacttggtctatgactattgccatgatcctggaagagaccatacacttactccag

SEQ ID NO: 47425 - DNA, 253 bp, Glycine max
  unsure (1)..(253): unsure at all n locations; Clone ID: 701133864H1
cattcatacgtggtgttgttactgctgctcttttctcttttcttttctctttagttctctcttcccctnnnnnnnnnnnnnnnnnnnnnnnnngagcttgtttaagcttttcttccattaacatattatcatcaatgtgtggtattcttgctgttcttggttgttctgatgactctcgagccaaaagggtccgcgtgcttgagctctctcgcagattgaagcacgtggccctgactggagtgggtccatcaac

SEQ ID NO: 47426 - DNA, 264 bp, Glycine max
  Clone ID: 701133865H1
gtcctggcataatcaagcctggggaatgtaaaattggaatcatgcctggttatattcataagcctggtcgcataggaattgtctctcgttctggtaccttgacatatgaagcggttttccaaacgactgctgttggccttggacaatccacttgtgtgggtataggaggagatccctttaatggaacaaactttgttgactgccttcagaagttcctaacagatcctcaaacagaaggtatcattcttataggagagattggag

SEQ ID NO: 47427 - DNA, 97 bp, Glycine max
  unsure (1)..(97): unsure at all n locations; Clone ID: 701133866H1
gacagtgattcatnttttgcatgctattagagacatggcnaaaaatttattcaaataactgcaagtctcaagctacactgtccaacacaacatacgg

SEQ ID NO: 47428 - DNA, 95 bp, Glycine max
  unsure (1)..(95): unsure at all n locations; Clone ID: 701133871H1
agaagangttgagggttgcagctagaaggctcnccttnctactctgcctaccttcctcttccgtggtcggcccaaccaacgccgtcttnccggct

SEQ ID NO: 47429 - DNA, 254 bp, Glycine max
  Clone ID: 701133872H1
cacaaatagagttgttggtacatatggatatatggctccagagtatgcaatgaaaggtgttgtgtccatcaaaacagatgtgttcagctttggtgtgttgctactagagatacttagtagcaaaaagaataatagtcgctatcattcggatcacccactcaacctcataggatacgcgtggcagctctggaatgcaggcagagctctggagcttatagactcaacgttaaatggattgtgttctcagaatgaag

SEQ ID NO: 47430 - DNA, 252 bp, Glycine max
  Clone ID: 701133873H1
caacaacaaacaaactctttctggattcagtttttgatgtgaaaatggcagtgactcttacatcaacactctttctggctttgctatttgctgcttcagcttttgctgctcttcagcctagagtacctgaagcttacctccaaaatgggaactttgaggagcagccaaaccctaaatacctgaagaaaacaaagctctttggtaaatacgctttgcctaaatgggagatcaatggtctggttgagtatgtct

SEQ ID NO: 47431 - DNA, 249 bp, Glycine max
  unsure (1)..(249): unsure at all n locations; Clone ID: 701133874H1
aaaatcctcacccattttcttcgtagccaaacactctgaaattctcagttatgtcgtggcaancgtatgtggatgatcacctactgtgtgaaatcgaaggtnaccacctcactcacgccgctatcatcggccaagacggaagcgtttgggctcagagcaccaacttccctcagttcaaacctgaggaaataactgccatcaataatgactttaatgagcctggatcacttgctccaactggattgtata

SEQ ID NO: 47432 - DNA, 248 bp, Glycine max
  Clone ID: 701133875H1
cggagagatgccattgaactacagcaaatcaaagtcaaacctgacaccccttcttcttgttcattggatggtggtaagaaaccagaaaatacagattggtggtctgatcctgactcaaaagttcacattggagttggttgcgatttttgcgggatgtttccaataattggagatagatatagatgcattgactgtaaggagaagatgggctttgatctttgtggtgattgctacgcaagccgctccaa

SEQ ID NO: 47433 - DNA, 251 bp, Glycine max
  unsure (1)..(251): unsure at all n locations; Clone ID: 701133878H1
gcgacggggtattgtaagtggcagantggccttgctgccacgatccactgagattcagcccttgtcgctttgattcgtctgcaaaggattctacccgccgctcgatgggaattncgcctcgagccgaatcggtcgaggcgaaaacccccaactccaacctctgttcatcgtctaccgcgcttncttttcaaccagaactatgattnagctttttaaagtaaaggaaaagcagagagaacttgcagaaaatg

SEQ ID NO: 47434 - DNA, 248 bp, Glycine max
  unsure (1)..(248): unsure at all n locations; Clone ID: 701133879H1
cgatactgacgtgcaaatcgttcgtctganttggntataggggcgaaagactnatcgaaccgtctagtagctggttccctccgaagtttcccncaggatagctggagcccgcgggcgagttctatcgggnaaagccaatgattagaggcatcgggggcgcaacgccctcgacctattctcaaactttaaataggtaggacggtgcggctgctcngttgagccgcgccatggaatcnagagctccaagt

SEQ ID NO: 47435 - DNA, 251 bp, Glycine max
  unsure (1)..(251): unsure at all n locations; Clone ID: 701133880H1
gctctnttctcttttctttnctctttagttctctcttcccctttctttttctttttctncttcttctgagcttgtttaagcttttcttccataaacataanaacgnaangtgtggtatncnngctgttcttggttgtnctgatgactctcgagccaaaagggtncgcgtgcttgagctctctcgcagatngaagcaccgtggcnctgactggagtgggctacatcaacatggtgacnggtttttggcacat

SEQ ID NO: 47436 - DNA, 254 bp, Glycine max
  unsure (1)..(254): unsure at all n locations; Clone ID: 701133882H1
ctgaaactgcgatcattttgggacaagaggatctcacagnaggtcatcggaganngcactcggtgaggaatttaagggctatgtcttcaaaattaccggaggttgtgacaaacaaggatttccaatgaagcagggagtgctgactcctggttcgtgttagacttttgcttcacaggggaactccttgcttccgtggatatggaaggcgtaatggagagcgtangagaaantctgttcgtgggtgcattgtcanc

SEQ ID NO: 47437 - DNA, 255 bp, Glycine max
  unsure (1)..(255): unsure at all n locations; Clone ID: 701133885H1
aaaaaccaagggtgcatgcatatgacatgtactcctccttgtaaatntcnanttttgctggctatgccttggtgcatggncagaccatggtgaaaggactggtggattttatgcttgcaatcgttatgaagcagctaaacaananggagtgtatgatgaaactgaaagaagaagagaaatggcaaagaattcattggagagatacncacattattatgagcggtgggccagcaaccaatcttcaaggcaaaaagc

SEQ ID NO: 47438 - DNA, 243 bp, Glycine max
  unsure (1)..(243): unsure at all n locations; Clone ID: 701133886H1
gagatatcagaatgtaggtttggtcctaactcancccangagctagtgcatggnatgaggattgcctcccacttatatattctattgtggccttatctctanccgatgtgggacttgagtttttctcaacacatgtcgatcacngttttatcagcnattctgctcatcatttaactnttatctttcttgtacatttatggtccnatgtncnaacattgaactgatttgtagccgcttnggcac

SEQ ID NO: 47439 - DNA, 252 bp, Glycine max
  Clone ID: 701133889H1
atgaagtcctccatccgcccggacatcgtcaacttcgtacactccaacatctccaagaacagccgacaaccctatgcagtcagccgccgcgctggccaccagacttccgccgagtcctggggaaccggtcgtgccgtctcccgtatcccccgtgttcccggcggcggaacccatcgcgccggccagggagccttcggaaacatgtgtcgtggaggacgcatgtttgccccgaccaagatctggcgccgctgg

SEQ ID NO: 47440 - DNA, 249 bp, Glycine max
  unsure (1)..(249): unsure at all n locations; Clone ID: 701133890H1
ggcccgtggcccagcccaanaggatcaagtttacccctcttctcaaaaatcctagaagatcttcactttactatgtgaatttggtggctattagagttggccggagaattgtggatattccaccggaggctctagcgttcaaccctaacaccggcgcaggcaccgtttttgattcgggtacggtattcacccggctggttgaaccggcttacaccgccgtccggaacgagttccggcgacgagttgccg

SEQ ID NO: 47441 - DNA, 250 bp, Glycine max
  unsure (1)..(250): unsure at all n locations; Clone ID: 701133891H1
ctcagaaatcaaaagcctacttcaagagatatcnagtcaagttcaagagaagaagagagggaaaaaccgattaccgtgccaggattcggttgattaatcaggacaagaacaaatataacactccgaaataccgatttgttgttcgctttagcaacaaggacattgttgcacaaataatatctgctagcattgctggcgatattgttcttgctgcagcatatgcacatgagctgccacgatatggtcttga

SEQ ID NO: 47442 - DNA, 248 bp, Glycine max
  unsure (1)..(248): unsure at all n locations; Clone ID: 701133892H1
aattaacatatatatagcaagcatggcagtcacactctacgaccttagctcttcctctgggttgaanaaacttgatgagtaccttctcccacgcagttacatcaccgggtaccaagctacaaaggatgatcttactgtttatgcagctttgccaactgctccatcagatgaatatggaaatgtttccaggtggtacaagcacattgatgctttgttgagaatctctggtgttactggcgagggatctg

SEQ ID NO: 47443 - DNA, 249 bp, Glycine max
  Clone ID: 701133893H1
aaagcgtataaagacaactgtgtcgcagagtaccctgtttgaacatttgataaacatatgggagtttaaccctggccctgttccaggaagttgcgatctttattttttggtggattttaagtttcagtctccactttacagacagattgcatcgatgttctttaaggaggtagcctctaggatggttggttcatttactgagcgttgccgcttggtatatggaccggaagtgcgggtccttgaaaactc

SEQ ID NO: 47444 - DNA, 251 bp, Glycine max
  unsure (1)..(251): unsure at all n locations; Clone ID: 701133894H1
ctatacccacattttgataattatttttctagttgataagccatggctactcgaggaaagcttgaggttgacgttgatctcaagtctaacgcagacaagtactggcaaacccttaggaactccactgaaatattccccaaggccttccccaatgattacaaaagcattgaggttcttgagggtgatggcaaatcaccnggttctatccgccacataagttatggtgaaggttcaccacttgtgaagtcatc

SEQ ID NO: 47445 - DNA, 239 bp, Glycine max
  unsure (1)..(239): unsure at all n locations; Clone ID: 701133895H1
tttttctccttctgtttgcttttgctttcaggttggagacaccaagtgttaaactatcaggcatcatcttaatcatttcagttggcatattattaacagttgcaaaagagacagagtttgacttctggggatttgtacttgttatgcttgctgctgttatgtctgggtttcgttggtgnatgactcagatccttttgcagaaagaagcctacgtctgaaaaatccacttgtcctgatga

SEQ ID NO: 47446 - DNA, 63 bp, Glycine max
  unsure (1)..(63): unsure at all n locations; Clone ID: 701133896H1
gaatttctcgagcgaacttcgcccagttactagggttccacaanaacancacgacgnggccgc

SEQ ID NO: 47447 - DNA, 283 bp, Glycine max
  unsure (1)..(283): unsure at all n locations; Clone ID: 701133906H2
cgaatnacttagccntgagaaacattattcccattgctatatncttatggctagcatgaaggttatatgggtggttgtgatcatgtgcatggccgtggtgggtgcaccgatgatggcgcaagccatgacatgcaatgatgtgacggtgaacatggcacagtgcctatcctacctgatgncagggaggaacaccttcaacactttgctgcagcggagtcaagaacatcttggctctgctgtcaccaccgttgacaaacaaactgtgtgcaactgtctcaaggcg

SEQ ID NO: 47448 - DNA, 281 bp, Glycine max
  unsure (1)..(281): unsure at all n locations; Clone ID: 701133907H2
tgcacctngcaatggtttcgctatcaacatggtttcgctagattgccnacaangtngaatntatgttctngctnagctggaagaactanaaaggaggtcaaattanagatagagaggtangtgatgttgtttggaaaaacttntttcaaggaaagntgacgtattgcantggaataaaggagaggagatggcacctatantgatggaaaagcagtaantcttgttnggaaattacnagttgtaganncaacgngtgtttttgtnaggagatgttgtggttc

SEQ ID NO: 47449 - DNA, 123 bp, Glycine max
  unsure (1)..(123): unsure at all n locations; Clone ID: 701133908H2
cngtcaccaacgtagattgcacacaaaaaacaatgngtttaggttttgttgtcggattcctcgggcttctcattctatttcatgccgcatattccaccatccaatacaggggtttgttgaaga

SEQ ID NO: 47450 - DNA, 284 bp, Glycine max
  unsure (1)..(284): unsure at all n locations; Clone ID: 701133909H2
gggaaccnccttncatanaatntntgnnaggaannntgnanatggncnntgntgatgtttgnntatntatttcacnngancncacanctttacaaaaaatggtggcctcaatctactattcccactttcaaaatcttatcagctgaangtttgcaaaaggcccggattggggaacaattatnactagtgagggtgaaggtttcatggcctctgtctctgagggaagctatagtgcactattatctgtttgagtatttcaagatgacttagttgttgntcttaca

SEQ ID NO: 47451 - DNA, 285 bp, Glycine max
  unsure (1)..(285): unsure at all n locations; Clone ID: 701133912H2
cttncnnnnncnngtcanntgncngggntcaatnnnnnctgnnntcgngattnatgcaancgctacanngtggtttaacctcttcgcaacacaactncnntcatnttcaaaaccnaactgatagagtgcatggaaccaagctgcatcaaggtgaagactggcatcacaacgagacagtcaagcaccgnacttataccatagatggtaaggttacaacatgtctggagagtattgaatccattgatgaacagagcaaaacaatcacctacaagctcttcagtggtg

SEQ ID NO: 47452 - DNA, 279 bp, Glycine max
  unsure (1)..(279): unsure at all n locations; Clone ID: 701133924H2
gctccagtagccggcactaaacaacatggcggacaaggcagtcaccatccgaaccaggaagtttatgactaacaggcttctctccagaaagcagttcgtcgttgatgtccttcatccagggagggctaatgtttccatggctgaatgaagnagaacctgggannaatgtntgactgaaaggcacnaacactgtatttgtcttcaagttccgaactcattttgncggtggcanttcccacggggntngggtttgancnatggattcagttgagaatgcca

SEQ ID NO: 47453 - DNA, 251 bp, Glycine max
  unsure (1)..(251): unsure at all n locations; Clone ID: 701133936H2
gacagttgangttggaagagcacattttgagactgaaacaacaaggtttactantntggangcacctggtcacanaagctatgtncccnaacatgattagtggtgcatctcaagctgatattggagtgttggttatttctgtncggangggagagtntgaaactgcnatacnananangtggacaaactcgtgaacatgtccagcttgcaaaaacgctgggtgtgtctaagcanctgttgtcgtcaataaa

SEQ ID NO: 47454 - DNA, 283 bp, Glycine max
  unsure (1)..(283): unsure at all n locations; Clone ID: 701133949H2
gtggatatatatctgagnnagggtgaagtnnnaaaatggtgaacatanctcttggtactttcgatgactcttttggtgttgcctctcttaaggctatttggcagagttccatgcaactctgattggctgttcgctggtgttggttcagccatcgcttacaacgagcttacaaaagatgcagccttggatccaaangggntggtngcaataactgtggcccatgcattgcatgtttgtaggtgtctccgtcgcagccaacatctcgggtggccattgaacccag

SEQ ID NO: 47455 - DNA, 262 bp, Glycine max
  unsure (1)..(262): unsure at all n locations; Clone ID: 701133981H2
tgnagnaagggntgctgcacctggagtttttgaaattgaggtaagtggagggggcatctccattaattcacatcacactatttccaaagaaaaaatgtgancagatttggagaggtcgacttctagaattcntcaacttgatggaccaattccatatgatncacgatgtgctctctactccaaatatatacaattatggagagtgtncagtgaagactanatcnttnntatacacnagctcccngtgaagcacaanaagccc

SEQ ID NO: 47456 - DNA, 285 bp, Glycine max
  unsure (1)..(285): unsure at all n locations; Clone ID: 701133984H2
cngggttangctnngtngagtgangaattnananacaaatcgctaggggctgttnggttgtgcgagttagagtcgagagagaacaatggaagacataacagagggagtgaataacatcaacatctctgattcgtataagaaaaatcgcattcaggagtctaacaccaagaagcccctcttcttctacgaaaacccggccaacagacatatgcaacagcatgatgaggtcgagctctcagctctaggaaggctattgccacagtagtaactgttgctgaaatttga

SEQ ID NO: 47457 - DNA, 134 bp, Glycine max
  unsure (1)..(134): unsure at all n locations; Clone ID: 701133988H2
tggnagctctgcaactgggagcnaaattatgacagctgcagtccagctgattcaagcctgtttcactagagcttggtgggaaaagcccaatcattgtttttgaggatgttgacctngacaaggctgctgaatgg

SEQ ID NO: 47458 - DNA, 264 bp, Glycine max
  Clone ID: 701133989H2
cggaagggccccaagccgccgaagaaggggcagccggagaacgcggtttatgatttcgaggacaagattaacttcgcggtgttcccttcgctgcagggtgggccccacaaccaccagatcggtgctctcgccgtggcgctgaagcaggccgcgtcgcccgggtttaaggcctacgcgaacaggttaaggcgaacgccgttgcgcttggaaaatacttgatggggaaagggtacagccttgtcactggcggaacggagaaccatc

SEQ ID NO: 47459 - DNA, 52 bp, Glycine max
  unsure (1)..(52): unsure at all n locations; Clone ID: 701133990H2
atcttcttcaacctttcagagtgagaaaacacattcagaaaccacgtttntc

SEQ ID NO: 47460 - DNA, 212 bp, Glycine max
  Clone ID: 701133991H2
atgttgggtgttataaggcacaagagtattcgccctgccttctccgcaatcagacacttgtcttctgcagctaaagagattactgtcagggaggctctgaactccgcactcgatgaggaaatgtcagctgatcctaaagtgttcttgatgggtgaagaggttggggaatatcagggtgcatacaagatatccaaggggctgctcgacaagta

SEQ ID NO: 47461 - DNA, 263 bp, Glycine max
  Clone ID: 701133992H2
agatgatccacgttcttttcctctttgctcttgtctcgttcacttcccatgcttctgtcaatgatttctgtgtagcagacctaaaaggtccagatagcccttcaggctatcagtgcaagccacctaacacagtcacagtggatgactttgtgttctctggctttgtcgctggaaacaccacaaacactttcaatgctgcattaacctccgcatttgttactgattttccaggtgtgaatggtctggtgtatctgtggcaggtt

SEQ ID NO: 47462 - DNA, 262 bp, Glycine max
  unsure (1)..(262): unsure at all n locations; Clone ID: 701133993H2
aaaagatgcaaactcgtgaagagttggttgangcttccgctatcctcatatggattgcttcagcccttcatgctgctgttaactttggacagtatccatatggaggtttaatcctaaacaggccaactattagcaggagattcatgcctgaaaaggggtctcctgaatatgatgcgttggctaagaaccctgagaaggagtttttgaagactattatggcaagaggagacccccttgaccttacagttatagaatcctgtcc

SEQ ID NO: 47463 - DNA, 264 bp, Glycine max
  unsure (1)..(264): unsure at all n locations; Clone ID: 701133994H2
gntcagtctagcgctgacgggcatgacatgatgggattggtccaattgcttcctacagaatctgaaaggtcctgatggaaagagttcgtcaggagcttaaagattgagctcaagcagggttttaagtcaagaattgaagatgttagggaggaatattaaggaagcggagagctgggaaattaccaggtgacacaacatcggttttnaaaggcctggtggcagcaacatgctaagtggccctacccaactgaagatgacaaggca

SEQ ID NO: 47464 - DNA, 263 bp, Glycine max
  unsure (1)..(263): unsure at all n locations; Clone ID: 701133995H2
gcaaatcagaacaagagaagagaatggcaggagcagaggggtaaacagagaacagtaacgtgtacttgcgaantgtcggagcaggcggaacggtacgaatagatggtggagttcatgcagaaggtggtggtggggtggacgccggcgtcggagctcacggtggaggagcgcaacctcctctcgntggcctacaagaacgtgatcgggtctctgcgtgccgcgtggcgcatctgtcctccatcgaacaagaaggaggaagggcc

SEQ ID NO: 47465 - DNA, 261 bp, Glycine max
  unsure (1)..(261): unsure at all n locations; Clone ID: 701133996H2
ggccattttgctagctntttaataatgngcaantgagaagcatgangatgttgagaatgggatatttgcacgagcccttcattcaaccagaggatgcngctgctgctgtaaagaaaatggatcagataagagtgtgaaaaatggatccattggaatggtttgcttagcacacttgntgcgtttgtggttcttcacattggaacttgtgtgggctattcagcacccactcnagcggctatcagggcagatctaatctctctc

SEQ ID NO: 47466 - DNA, 268 bp, Glycine max
  unsure (1)..(268): unsure at all n locations; Clone ID: 701134001H1
gaggcccatcgcattgaggcaagtagaaaattgacccgcccaagtggagattcaagtcgggtaccgaancgtgcgactataaagggaatgaacgtggacaccccacgctttcttcacggcaacagaagaataatcaaatttctcagatctatccgacgtcgtcgcagatccaccaaccgttatggctgccttcagcggtgatgaaacggctccgtttttcggcttccttggagccgcagctgccctcgtcttctcctgtatgggagct

SEQ ID NO: 47467 - DNA, 265 bp, Glycine max
  unsure (1)..(265): unsure at all n locations; Clone ID: 701134008H1
gtcctctcgaagctttcatcgttcaacatattctcaccatctcantcatgggcctgctatcttgttttaggtctaccgtcctgagaaaatgttccaaaggaagctctggcatgtcaagattcctgtatacgaacaattttcaacgaaacttgatttcgtctggtggcaatgaatcgtattatgggtattttaaccggagatcatacacttcactttatatgggaactggaactgtgggtgggattacaagtgctagaatcagggt

SEQ ID NO: 47468 - DNA, 265 bp, Glycine max
  Clone ID: 701134009H1
gaggcccatcgcattgaggcaagtagaaaattgacccgcccaagtggagattcaagtcgggtaccgaaacgtgcgactataaagggaatgaacgtggacaccccacgctttcttcacggcaacagaagaataatcaaatttctcagatctatccgacgtcgtcgcagatccaccaaccgttatggctgccttcagcggtgatgaaacggctccgtttttcggcttccttggagccgcagctgccctcgtcttctcctgtatggga

SEQ ID NO: 47469 - DNA, 261 bp, Glycine max
  unsure (1)..(261): unsure at all n locations; Clone ID: 701134016H1
gtcctctcgaagctttcatcgttcaacatattctcaccatntcantcatgggcctgctatcttgttttaggtctaccgtcctgagaaaatcttccaaaggaagctctggcatgtcaagattcctgtatatgcaacaattttcaacgaaacttgatttcgtctggtggcaatgaatcgtattatgggtattttaaccggagatcatacacttcactttatatgggaactggaactgtgggtgggattacaagtgctagaatc

SEQ ID NO: 47470 - DNA, 176 bp, Glycine max
  unsure (1)..(176): unsure at all n locations; Clone ID: 701134082H1
tggatctcatttnctgctctttttgcaatacttttactactcatctactcctgagcttgcaagtgctgcccaacctactcttatncttcaactcggncgaaaacttttccaatgcggcagcgccgcngtcccngttcgtggaaataccccatcnaatggccgntcctagaggatat

SEQ ID NO: 47471 - DNA, 145 bp, Glycine max
  unsure (1)..(145): unsure at all n locations; Clone ID: 701134088H1
caaaccaaaagctgagttggtagtagtagctatggcgagcccagaagaagcaaagctcgaaactttcatgcagtggctacaggcaaatggggtggagctacgaggttgcaagntcaagtggtgtggttccaancgagggtttggt

SEQ ID NO: 47472 - DNA, 251 bp, Glycine max
  Clone ID: 701134089H1
aaagattttcgggtaccatagttggagtggaagatatttctcctcattgggtaaattcaaaatggcgatcactcaaggttcaatgggatgaacctgcagctgttcccagacctgatagggtctcaccatgggagatagaaccctttgttgcttctgcttctacaccctcagttcaagcctactatggtaaagactaaaaggccccggccacccagcgaaactccagatgttgacacaacatctgttgcttt

SEQ ID NO: 47473 - DNA, 81 bp, Glycine max
  unsure (1)..(81): unsure at all n locations; Clone ID: 701134095H1
ttgttttcttcctccttgtgttttgaccgttgcctttttttttctcaaacgtctttctctgttcacacacaacttctctnc

SEQ ID NO: 47474 - DNA, 253 bp, Glycine max
  unsure (1)..(253): unsure at all n locations; Clone ID: 701134096H1
gttttcccaaccctcttcccttgttcgaaactagcctaatcaaaaccgaaacaaacgattacaaaaacaagaaangaagaaaaataatcattcattgctcggtgagaagagagagaggaacggcccgatgaccgggaaggcgaacccaagaagcacacggcgaaggaaatcgccgcgaaggtggacgccgccaccactaaccgcggcggcgggaaggccggcctgaaggaccgatccgggttggagaagggcg

SEQ ID NO: 47475 - DNA, 259 bp, Glycine max
  Clone ID: 701134101H1
gaacaatggtgaaggctgtggccgttcttggcagcagtgagggtgtcactggaactattcacttcgttcaggagggaagtggtccaaccaccgtaactggatctcttgctggtcttaagcctggtctccatggtttccatgtccatgccttgggggacactaccaatggttgcctctcaactggatcacatttcaatcctaataacaaggagcatggtgcccctgaggatgagaatcgtcatgctggtgatcttgggaa

SEQ ID NO: 47476 - DNA, 227 bp, Glycine max
  unsure (1)..(227): unsure at all n locations; Clone ID: 701134102H1
cgagcgagcaaccgagttactcatggcgaaannggngcttacggaangtgaaggtgctcccgaactcgncnaatatgnaggaagctcgtcaccgagtcttccaattcttcagaacggcttgcagatcgttaccctccgtcatggaaatctacaacctctacgacgtcgtttcgtctccgaactccgntcctctgtctcctcccagatccgtaagaacatcnacgtca

SEQ ID NO: 47477 - DNA, 253 bp, Glycine max
  Clone ID: 701134104H1
tgcttatttcgaacactaatcgcgacgattcgatcatcgaagcaagaacattggatgatgccatcgctcagatgaccgtcgtggataacttgcccccagatcgccatccagagaggcgcctcaaggcctcattcaaggcgtttgaagaagctgagctgcccaagttgaaggaagagaaaccgggtcttactcacactcagtacaaggacatgatatggaagttatggaagaaatctcctgacaatcctcttaa

SEQ ID NO: 47478 - DNA, 243 bp, Glycine max
  Clone ID: 701134105H1
tgttcttctacgcggtgttcggcggtttgggagcggttgttgcagtgacggagctgaacaagagcaacaaggaccgaatcaacacctcttccgcattcaattccttccagaacaactacctcatcgtctattccctcatgatggctggagattggctacaaggtccatatgtctactacctttacagtacatatggatatgggaagggagacataggacaactcttcatgctggttttgggtc

SEQ ID NO: 47479 - DNA, 245 bp, Glycine max
  Clone ID: 701134106H1
gagatgcagttcatggggctctacggcgtctacagagaatcctacaagatcatattcgcatggagcaaggtcttcaacaagatcaccttaaccctaatcctccctctctccttcatctttctcatccacatcgaagtctccaacatcctcttcggaaaaatcctccacaacacccaacaaatgatggaaaccccacaagacacgccccaataccacaacctcaccaacatgctctcttccgaatg

SEQ ID NO: 47480 - DNA, 253 bp, Glycine max
  unsure (1)..(253): unsure at all n locations; Clone ID: 701134107H1
ctgaattttccctttcaaatctcttcctttgaagttttcgtagtnctctgcatcatggagatggaacgcgtcttcgagtttcctcacactcacatggatcggcgcccgagaaagagagcgagattgggctgggacatccctgaggtccccaagataagatacatagcaaaatgggtgaaggaacttttgggcaggtcttagaatgctgggatagagaaaggaaggaaatggttgccgtaaaaattgtccgtgg

SEQ ID NO: 47481 - DNA, 252 bp, Glycine max
  unsure (1)..(252): unsure at all n locations; Clone ID: 701134108H1
gggactatgattctgttcaactttgaagatattgcagacactatatccatcaaccgccttgatttccataacaaatgccacggcctttgcacaacagattctgtctctccttcacagactctataccagtagttatccggctcgacagatccaaacttcctcatgatcaaggcatccttcacatccataagcttcatgggcgtgaccctgaaatcctccacaagntgaagactcatcccatctttttgttgc

SEQ ID NO: 47482 - DNA, 251 bp, Glycine max
  Clone ID: 701134110H1
ccatgcatgtgtaagtatgaactaattcagactgtgaaactgcgaatggctcattaaatcagttatagtttgtttgatggtatctactactcggataaccgtagtaattctagagctaatacgtgcaacaaaccccgacttctggaagggatgcatttattagataaaaggtcaacacaggctctgcctgttgctttgatgattcatgataactcgtcggatcgcacggcctttgtgccggcgacgctcat

SEQ ID NO: 47483 - DNA, 252 bp, Glycine max
  Clone ID: 701134111H1
acacagttttgaagatgctaagaaacatggatgaaggagaaatcatgacaaatattgctttccctacagaacttaactgcttccgctgcatccagtgatcacaacaatcctcctccttctttgaagaggaaaagaaacctcccaggaaacccagatcctgaagcacaagtcatagccttatcaccaaagaccctgatggctacaaacaggttcttgtgtgaaattgtgggaagggtttccagagggatcaaa

SEQ ID NO: 47484 - DNA, 252 bp, Glycine max
  unsure (1)..(252): unsure at all n locations; Clone ID: 701134112H1
gcgattgttccagtggtggatttccagaggctttcagaggaagaggagcgcaagaagctgagaaaaacatgtgagaaaccagggtgtttcagaatcatcaaccactcaattccactaacactcatggcgcgacatgaagtcagtggttaaatacttgcatgaccttcccacggaaatcaaaatgcgcaacaaaccctccgtccctgagagtggctatagggcggcaatgccaacangtcctctatacgaggg

SEQ ID NO: 47485 - DNA, 223 bp, Glycine max
  unsure (1)..(223): unsure at all n locations; Clone ID: 701134113H1
tgattacttaaaggaccaagattcagccctcgcttgtaaaagagcgacgggacatgaagagngaatatgaagaattcaaagtacggatcaatgcccttgtagccaaagctcagaagatgccagaggaaggttggacaatgcaggatggaactccttggcctggaaataatcctagggatcatccgggaatgattcagacgtttttaggtcatagtggggggct

SEQ ID NO: 47486 - DNA, 253 bp, Glycine max
  Clone ID: 701134115H1
gtgcccacagacacgggaagttgtctccttctctttctcttaagccctaaaaccctatacccacattagttcaactcgccacttagcggaaacctctacaaacattgcctccaagatgaattttaacaacgtgaatgctccaaaggttcctggtggcggagtcgctgctttgcttaaagttggcattattggtgggcttgttgtatatggggctgcaaacagcttgtacaatgttgagggaggtcatcgagcc

SEQ ID NO: 47487 - DNA, 249 bp, Glycine max
  unsure (1)..(249): unsure at all n locations; Clone ID: 701134116H1
gggaagaagcaattgatgtcatcggcgccgtggagaggcgaggagagtgaagantccttcncagagggaaagctgaaaggccacgangcagggtgatggcacttccaccatgcacgtccctgcctccaagtccaagcatcatcaccatgacctccacgacgacctcggaatcgagattgatcctgaactacgctacagcttccagcgcaattttcagtttcttcagcgtgtttttagcattgacactat

SEQ ID NO: 47488 - DNA, 252 bp, Glycine max
  Clone ID: 701134118H1
tcctttctctgctctttgtcttctctgacacatttggggccttgttgagtgtgtttttgcaagagggtatggcgaaggacgttgaggttgctgagcgtggctccttctctgggaaggactaccaggaccctccaccagcaccactcattgatgctgaggagctcacaaagtggtcctttacagggctcttattgctgagttcattgccactttgctcttcctctacattactgtgctcacagttatagggta

SEQ ID NO: 47489 - DNA, 221 bp, Glycine max
  unsure (1)..(221): unsure at all n locations; Clone ID: 701134120H1
tnccaatggctgctattgttttcctccacattgcatcattggcctctctttttgttgcaacaagtgcaagaatccctggagtttacaccggtggcccctggcagagtgctcatgccacctttctacggtggcagtgatgcctctggaacaatgggtggtgcttgtgggtacggaaacctgtacagccaaggctacggagtgaacactgcggcgctgagcac

SEQ ID NO: 47490 - DNA, 253 bp, Glycine max
  Clone ID: 701134121H1
gtcttacccaactgtgagtgctgattaccagaaggccgttgagaaggcgaagaagaagctcagaggcttcatcgctgagaagagatgcgctcctctaatgctccgtttggcatggcactctgctggaacctttgacaagggcacgaagaccggtggacccttcggaaccatcaagcaccctgccgaactggctcacagcgctaacaacggtcttgacatcgctgttaggcttttggagccactcaaggcggag

SEQ ID NO: 47491 - DNA, 258 bp, Glycine max
  unsure (1)..(258): unsure at all n locations; Clone ID: 701134122H1
gttccctcagacatatctgtacacggctggcttcttctgtgaggcatcaatggagacaaaagctttgtccttcgctctgtctctcaatgacctcacnaacaaccgcntcacttccaatacgccacatgctgcnngccaaagtttccgtctttaccgtcagatgctcttcttcgggtagtggagagaggccttggaagaattcagatgctagacttgtgcttgaagatggttcaatttggagagcaaaatcgtttggtg

SEQ ID NO: 47492 - DNA, 251 bp, Glycine max
  unsure (1)..(251): unsure at all n locations; Clone ID: 701134123H1
aaggcgaangtgtgangtgcgcagtgtcaccccccacatggcgtgaagggcggcgcacggtgtcgttgtctcttgttctctcccacttgcttctcattcctaaccgtgatactgccctagcaagtcctttcgataagtatgttaagagaaaaaagcttgatcctctggaggtttatataccagctgtcatacttacagagtttcagatcaaggacttnnnnttcccattagaggatgaggaaccccaattt

SEQ ID NO: 47493 - DNA, 245 bp, Glycine max
  Clone ID: 701134124H1
cctggaattgacctgacagtaactgtgcttaccacaggattttggcctagttacaagtcttttgatctcaaccttccttcagagaggaaaagcctaaaatttcaaagttactacagtttttgactgaagaaggacttgaagttgttagtttcttttcaacagaagtcaatggcagattgctccacagtgtgcagtgtgaggtgaaccattccaacagtgtagatccatctgagctgagaaagaaa

SEQ ID NO: 47494 - DNA, 253 bp, Glycine max
  Clone ID: 701134125H1
ctcatatatcatggctacctccatggtgaagcttatgcttttctctgctctcatactcttgtccttgcaagcagttgtgtctgtaacaccactgcattttcaacatccactagaccctttaaccaaacaagagataagtcttgtccaaaccatagtccaaaacaagtacccaagctcaagtaacaggttgagcttccactacattggactctccgaacctgaaaaggatgccatcctcaaatgggatccatca

SEQ ID NO: 47495 - DNA, 242 bp, Glycine max
  unsure (1)..(242): unsure at all n locations; Clone ID: 701134126H1
aaatattattattcaatagaaaagaaagatgagtccaacatgggtttttgtgttaggtgttgcagcaatgttggtggttgtgagtnnacaatcatcagtgaagcctttggtgaagacagtgaaggggaagaaggtgtgtgacaaagggtgggagtgcaaaggttggtctgcatattgctgcaatgagactatctccgactacttccacacaacatacgntnnngnactcnnacaanngngnt

SEQ ID NO: 47496 - DNA, 250 bp, Glycine max
  unsure (1)..(250): unsure at all n locations; Clone ID: 701134128H1
cagatctcaattgcatcgctgtccatggctaccatcgttagcatcaaggcccgccagatccttcgacagtcgtggcaatccaactgtcgaggtggatttgacttgctccgatggtacttttgccagagctgctgttccaagtggtgcatccactgggatttatgaggcccttgaattgagagatggaggatctgactaccttgganagggtntatcaaaggctgtngacaatgtgaacaccgtcattggc

SEQ ID NO: 47497 - DNA, 96 bp, Glycine max
  unsure (1)..(96): unsure at all n locations; Clone ID: 701134129H1
cggnactctggcagtagagtatgttgtgttgtgtgactaaccaaaccaaaccaaaaatccctatcttagtacaagtattttagcntccacaacaac

SEQ ID NO: 47498 - DNA, 251 bp, Glycine max
  unsure (1)..(251): unsure at all n locations; Clone ID: 701134130H1
accttcttcctctctctatatactgaacaaaaacaaaangagagttcagaanctttagatctcacctatttaactacctcgtaacattctcttctgtgtcctaatcggaactcgcaaagattttgttatagtgatctgatgccatcttagggtttttgaattgcgatgggtctgggaaacgatgacgatgacggagacacgctcaagtccttcggttcagtgtgttgttcgatttgcctcgaggctgttac

SEQ ID NO: 47499 - DNA, 257 bp, Glycine max
  Clone ID: 701134132H1
gcatgatgccaagtgactcctccttcggtgtagcccacgacgccttcaacaccttcttcagcgaaaccggatccggcaagcacgtccctcgcgccgtcttcgtcgatctcgagcccaccgtcatcgacgaagtccgttgtggcacttaccgtcaactcttccaccccgaacaactcatctccggcaaggaagatgccgccaacaactttgccagaggccactacaccgttggcaaagagatcgtagatctgtgcttg

SEQ ID NO: 47500 - DNA, 258 bp, Glycine max
  unsure (1)..(258): unsure at all n locations; Clone ID: 701134133H1
gaaagtgcnaaagccaccgtcttctcttctcagagcttggctttgcttatcgattctctctcctctcatactttctcattcaaggtttgtaaaagatggccgatgntgaggatattcaaccccntgtttgtgacaatggaactggaatggtcaaggctggatttgctggtgatgatgctcccagggctgtctttcccagtattnttggccgacctcgacacactggtgttatggttgggatgggtcaaaaggatgcct

SEQ ID NO: 47501 - DNA, 254 bp, Glycine max
  unsure (1)..(254): unsure at all n locations; Clone ID: 701134134H1
cttatgtattatgtctgtgatggttttcgtgcactctggtgtttncntgttaaacaaacatccttagaataaagtggtcatgtcttgcctttcagcaagttcaagtgttttggacttgtgatgggtgtgttaagctcatggttgcttctttttttnnttttnaatgttnggaaattggncgcttcngnataaagttcggntaatccngaattatgaancccngcttanaanattaaatnctatacnggaaaaaa

SEQ ID NO: 47502 - DNA, 252 bp, Glycine max
  Clone ID: 701134135H1
gtcaaattggcctgaacagccagttaatgtaattattaagtggctgaaaaaaacagagcccttcttttgctgttgctgattttggttgtggggaagcactcattgctaaaagtgtgaagaatgaagtcttctctctagatcttgtctccaatgatccgaatgtaattgcttgcaacatggcaaatactccccttgactcctcatccgttgacgtcgccgtcttctgtctttcgttgatgggaaccaactacc

SEQ ID NO: 47503 - DNA, 253 bp, Glycine max
  unsure (1)..(253): unsure at all n locations; Clone ID: 701134136H1
gttgnntatgaggtgctggnggctttggtgacccttttggttttctcatttgcttgtgccactgncttcatcatcaggaccaacaaaactccaccaccgtgtggagcaattcaggaggaatcngcttgctaatggccttggtagaactcctccaatggggtggancagttggaatcatttcagctgtcaaattaacgaaaaaatgatcagagaaactgctgatgcccttgtttctactggtctgtccaagctt

SEQ ID NO: 47504 - DNA, 252 bp, Glycine max
  Clone ID: 701134137H1
gcagattcaagaattagttgaagccattgttttgcccatgacccacaaggagcggttccaaaagttaggagttcgtcctcccaagggagtgctgttgtatggacctccagggactgggaaaacattgatggctcgtgcctgtgcagcacagacaaatgccacttttctgaaattggctggccctcaactggtccagatgttcattggagatggagcaaaacttgttcgtgacgcctttcaactagcaaaaga

SEQ ID NO: 47505 - DNA, 252 bp, Glycine max
  unsure (1)..(252): unsure at all n locations; Clone ID: 701134138H1
cacagccaagggaacgggcttggcggaatcagcggggaaagaagaccctgttgagcttnactctagtccgactttgtgaaatgacttgagaggngtangntaagtgggagctggnancancnnaagtgaaataccactacttttaacgttattttacttattccgtgaatcggaaacggggcactgcncctnctttttggaacccaaagtcggcttcggccgntcgatccgggcggngacattttcaggtgg

SEQ ID NO: 47506 - DNA, 244 bp, Glycine max
  unsure (1)..(244): unsure at all n locations; Clone ID: 701134139H1
gtcaggaggggctggacaggctgcacaaaaatcggcntgttgtggttgaggnacaaatgttacaaattggaggcaacattcttgtacaagaacaagaagaaagaagaaattacgtgtataatgatcatgatgctgactttgtgctnaanctcgtccatactntntanatntgtgngatnagtagngtctcngnctnnngtaacaanttacntnatatccnnnccnangtgcgattnnggtggtg

SEQ ID NO: 47507 - DNA, 250 bp, Glycine max
  unsure (1)..(250): unsure at all n locations; Clone ID: 701134140H1
gggtccacaaacaccaccacctgtagtagctgtagcagtggctctagttggattaagagtgattttttaaccttggaagaggcacaaaacgacaacgttgaagcggcgggtaaaaggttttcgtttatttcacaccttcttgtcggcagcaagaactcctgggctaagganactttaacttgccaagaagaacaacacagtccagtttcagttcttcaggttggagaagatgaattctcaccttttgatc

SEQ ID NO: 47508 - DNA, 254 bp, Glycine max
  unsure (1)..(254): unsure at all n locations; Clone ID: 701134141H1
cagaatgggaagtgctggaagaactgattatggtgcatacacctatgagaatcttgagaganagccttactggccatcagagaagcttaagatttccatcaccggtgctgggggttttatcgcatcacacatagctcggcgcctcaagacagaggggcattacgttattgcttcggattggaagaaaaatgagcncatgactgagaacntgttctgtgatgccnttccatcttgttgatctcagggtcanggnt

SEQ ID NO: 47509 - DNA, 250 bp, Glycine max
  unsure (1)..(250): unsure at all n locations; Clone ID: 701134143H1
ctagttcatatatttncngctgacaccgagaaggaaagcaggaaacaaacaaaaaggagcagatgggtagctcaggtttctcatggaaattggcggatcatccaaagcttccaaagggtaagactgtggctgttgtggtattggatggttggggagaggccacacccaatgagtacaactgcatccacaaggctgaaacaccctgcatggattcacttaaaaagggtgctcctgaacggtggagattggt

SEQ ID NO: 47510 - DNA, 252 bp, Glycine max
  unsure (1)..(252): unsure at all n locations; Clone ID: 701134144H1
cttttgcncgttaaatcgaatgatttgaattcgacacgggcacagtaanaaagggtttagttgtgttcgaaattcgaaattccaatcgcaaagcataagaaaaattaagannaaangccggtgaaacnaatccatcttcagatatgtggattggttagtcaacgatggagttggaaaccccgcacagtctcatccctctcctcattntccncaatnccatannctngcccttgggcancaaactgcttnnca

SEQ ID NO: 47511 - DNA, 252 bp, Glycine max
  unsure (1)..(252): unsure at all n locations; Clone ID: 701134145H1
ctcgagcntgnaaaaatgatttctgcgatttcgtgggtgtccaaaggggttnngaagtnggancttgtngtggctgaaactnctancgaagaggnnattcaagagataatagcnaaaccatgcaaccnnagtggagacagtgncaatgaagacgtaacacacnatnnacgttgtggcacaagncnttaaccgtagcagaggcattgggaaggncncnactggaacctnagaggtnatnanccttgcgtngaa

SEQ ID NO: 47512 - DNA, 251 bp, Glycine max
  unsure (1)..(251): unsure at all n locations; Clone ID: 701134147H1
aacccacgacctagccctccttctcagctctcttcatcattagaccaaccttatatctccttactncttgtttgtgcttaatgcaggccattgcagatagcggatatgattatattattattatggataaatatagttaaaaatgactatagtgtgttatttttaactatactttctcaattctcaccctttgttcatgatgcagggttggttctgacttgaattaggatctgattcaaagagaggaatgg

SEQ ID NO: 47513 - DNA, 245 bp, Glycine max
  unsure (1)..(245): unsure at all n locations; Clone ID: 701134148H1
ctttttttgtaccttctgatctaatggcagttccagtgattgatttttcaaacctcaatggtgaagaaagagccaaanactatggcacagattgctaatggntgtgaagagtggggattttttcagttgatcaaccatggcattcctgaggaactccttgagagggtgaagaaggttnctgctgagttctataagctggaaagagaggngaatttcaagaactccaaatcagtgaagctactaag

SEQ ID NO: 47514 - DNA, 234 bp, Glycine max
  unsure (1)..(234): unsure at all n locations; Clone ID: 701134149H1
atataatcactgtattcatananttctgtctgaagagaaganttatgatatattaaatataataagtggttttnttctncttcatttccacnnancatcagataacnnatgcnccataacaatacanccaagtcancataacgtacantagggaattntatagtacangaatngatcngaanctgngntgttcaagaacnntgtggttncatnccaannctgtggccncaagaa

SEQ ID NO: 47515 - DNA, 252 bp, Glycine max
  Clone ID: 701134150H1
gggaagatgataaaaagagatgaaggacgaattgagaagtggattctgaggagagcctttgatgatgaagagcatccttatctgccaaagcacattttatacaggcagaaagaacaattcagtgatggagttggctatagttggattgatggccttaaggcccatgctgcaaaacatgtgactgaaaaaatgatgctaatgctggtaacatttacccccacaacaccccaaaaaccaaggaagctattacta

SEQ ID NO: 47516 - DNA, 253 bp, Glycine max
  unsure (1)..(253): unsure at all n locations; Clone ID: 701134151H1
cttaagcttgctactgagtttccacactgcataccttangtcttccgaattcgaagttaatttgcaagatggctaaggaaaaggctcagatcaacattgtggtggttggtcatgtggaccctgaggaggcaaccaccattaacgagctgaagaagcctgttgtggagaaagaagctccagggcctgccatatgagggcatgcacgtacggcctccggaggggaaccagaaaattgtgnnnncaaaataatctg

SEQ ID NO: 47517 - DNA, 253 bp, Glycine max
  unsure (1)..(253): unsure at all n locations; Clone ID: 701134152H1
gtcttgcgcccaatttccatggaactgtaaagannnggatagttagaagattaaatcttaaagcagtaagtcatcatggntaaatcagnnnnnnnnnnnnnnnnnnnnnnnnnnnnnnnnnntgtgatgggagttgccgcaggggctagccaaatggcctattcttctcactacccgactgcttccatggtggcttctggcacgcccgctgtaactgctccttccccaactcaggctccagctgccttctcta

SEQ ID NO: 47518 - DNA, 252 bp, Glycine max
  Clone ID: 701134153H1
cacaacagcagctgcagcagcaatggctcccaaacgaggtggaaaggctccggctcttgccgctaagaagaagcctgagaaggtcacgaatccgttgttcgagaagcgtccgaagcagttcggaatcggaggggcgttgcctccgaagagagacttgactaggttcgtgaagtggccaaagaatgttcaaattcagaggaagaagaggattctgaagcagaggttgaaggttcccccagctttgaaccagtt

SEQ ID NO: 47519 - DNA, 250 bp, Glycine max
  Clone ID: 701134154H1
ccatgtcgtttttgtcgttcacatggaacctttcccctcttcggccttcaaagttctcatttgaatatttgctactaccaccaagatctgcaccgacgaccgctccgcccgggctcgcgccctgggttttgcagcgaccgccgcgccctcctactcatcggggcttggtccttgccccgacggccgggtataggtcgcgcgctttagcgccatccattttcggggctagttgattcggcaggtgagttgt

SEQ ID NO: 47520 - DNA, 252 bp, Glycine max
  Clone ID: 701134156H1
cttgtccaagtgggtcatggtgatttgaaagataagccatggtggcaaaagatgcaaacttgtgaagagttgattgaagcctcggccaccctcatatggatcgcttcagcccttcatgcagctgttaactttggacagtatccatatggaggtttaatcttgaacaggccaaccattagcaggagattcatgcctgagaaagggtctgctgagtatgctgctttggctaagaaccctgagaaggagtttttg

SEQ ID NO: 47521 - DNA, 251 bp, Glycine max
  unsure (1)..(251): unsure at all n locations; Clone ID: 701134157H1
cgaaggtggaaatgtcgaaaggcggttcgcttcaaaaggacgtgccatggagagcatcgtcttcttctgcgaancccatccccaaaattcaccacagtccccttcttcgcgtatcccaaacacctgtttccgattacggtatctccgtcatgaggcatccggaccctataggtggtggattgggtcatgaggccatagtggaaccagctggccctgattgtctcgtacctggccagaaaatgcccatccaa

SEQ ID NO: 47522 - DNA, 252 bp, Glycine max
  unsure (1)..(252): unsure at all n locations; Clone ID: 701134158H1
cnagtctcntaggatctgttcaatggccaaccaagggcatgacctcnctctcnatgggaanagtttggctcaagcgcagattacaaagagtganagacaccttgantcnatncctccnacnctngcnncnaaatnaccgtgtntnancanccaatagcntcacntttccagcggttcctngctttgtnatgcgaatcttggntcaccntcacttgggtagtgattcncangnccaagtggagtcctgcagta

SEQ ID NO: 47523 - DNA, 252 bp, Glycine max
  Clone ID: 701134159H1
ctccaacctttcactttcgtttctcagttttattcgaatccctctactcaatctcctttccaaatggccagcgttgaggttgcacagcaaacaccaacaacagttccagaaaatgaaacaaccgaggtaagcaagacccaggaaacaaccccagtcactgaggctcctgcaacagaacaaccagcagctgaggttcctgcaacagaacaaccagccgctgaggctcctgccccagaatcaaccaccgaagca

SEQ ID NO: 47524 - DNA, 251 bp, Glycine max
  unsure (1)..(251): unsure at all n locations; Clone ID: 701134160H1
gattccatgcacaagangcgggnccaccggcggcaagaagaaagcttggaggaagaagagaaagtannngcttgggangcagccagcaaacacaaagctatcaagcaacaagacggttaggaggattagggttcgcggtgggaacgtgaagtggcgcgctttgaggcttgatactgggaactactcttgggggagtgaggctgcaacccgcaagacaaggattcttgatgtggtgtacaatgcatccaaca

SEQ ID NO: 47525 - DNA, 249 bp, Glycine max
  unsure (1)..(249): unsure at all n locations; Clone ID: 701134161H1
gatgcttngcttganaggatggggtgcacttactctgtgtataggaagaaaaaatcaagctttcctgaagtggtggtctttgttccatcaacaagannntccngttcaatctgatctccaaagggtgcttaagggagtaattccaagggatcttgctgataaattggctgcactaaggaatcagatagtgttgattgcagaggatactggtgggtcagctgtaactgaattgcagcgagctttgaatga

SEQ ID NO: 47526 - DNA, 251 bp, Glycine max
  unsure (1)..(251): unsure at all n locations; Clone ID: 701134162H1
caaaaccctaactctctttcgcgctcgttctcnccgctcgctgcaaccatgaattgctccanntccggcgaagttccggaagatcccgtcgtntcccggaactccggtctcctcttcgagaagcgtttgattgagcgacacatctcggattatgggaagtgtccaattactggagaaccacttactatggatgacattgtaccaatcaagacaggcaagatagtgntacccagacctgttcaggcagctag

SEQ ID NO: 47527 - DNA, 252 bp, Glycine max
  unsure (1)..(252): unsure at all n locations; Clone ID: 701134163H1
gacacaagctatgtaggattcacagttgatggagctaagtggctagtggataacacggatatcaaanntgttggaattgattaccncatctgttgcttcttatgattacttgattccatctcaccttgtttttctaaaagacagggagatcattctcgtggaaggcttgaagcttgatgatgttccagcaggattatattcagtccattgcttacctcttaggttggctggtgctgagggatcaccaatacg

SEQ ID NO: 47528 - DNA, 253 bp, Glycine max
  unsure (1)..(253): unsure at all n locations; Clone ID: 701134165H1
gaaggctacaattgaactgacacataattggggtactgaaagcgatccagagttcaaagggtaccacaatggcaattctgaacctcgtggctttggacacancggtgtaactgttgatgacacatacaaggcatgtgaaagatttcagaatctgggagttgngtttgttaagaaaccagaagatgggaaaatgaaaggtatagcatttattaaagatcctgatggatactggattgaaatcttgatcggaaaa

SEQ ID NO: 47529 - DNA, 251 bp, Glycine max
  unsure (1)..(251): unsure at all n locations; Clone ID: 701134166H1
gcgaaggtggaaatgtcgaaaggcggttcgcttcaaaaggacgtgccatggagagcatcgtcttcttctgcgaagcccatcccnaaaattcaccanagtccccttcttcgngtatcccaaacacctgtttccgattacggtatctccgtcatgaggcatccggaccctataggtggtggattgggtcatgaggccatagtngnaccanctggccctgattgtntcgtacctggccagnaatgccnntccaa

SEQ ID NO: 47530 - DNA, 249 bp, Glycine max
  unsure (1)..(249): unsure at all n locations; Clone ID: 701134167H1
caaagttcaattctttctctgtcgtcgctctttcttcaacttcaagcttaattcctcatgtctttcagangcctcagccggccaaatgccacatcaggcatgggtgttgctgatcacagcaaaaacaccttcatggaattgaagcagaagaaggttcatcgttatgtgatctttaaggtcgatgagaagaaaagggaggttgtggttgagaagactggtggcncggctgagagctnnnccgatttgctg

SEQ ID NO: 47531 - DNA, 249 bp, Glycine max
  Clone ID: 701134169H1
aagggttgaagcaccttgcactgcaaaagaaaaaaacaagaagaaaaacacagcaatggagggtgggaacaacagcagcatcaacagcaaccctgaggagttggcggtggggtgcttgctttcgatcaggacaacgttgggcgacgaattcgaaggccaggtcgtgaccttcgatcgcccctccaacatcctcgtactccaggagccttccaaacctagccctcgtcgaaaccttaggttgctcaaagc

SEQ ID NO: 47532 - DNA, 204 bp, Glycine max
  unsure (1)..(204): unsure at all n locations; Clone ID: 701134170H1
ggcagccgaagaagagaacgttcaagaagttcagtttcaggggcgtggatctcgatgcgcttctggacatgtccaccgatgaactcgtgaagannttcagtgctcgcgcacgtagaaggttccagagaggcctcaccagaaagcccatggccttgatcaagaagcttcgcaaagcgaaaagagaagctccaccaggtgagangc

SEQ ID NO: 47533 - DNA, 250 bp, Glycine max
  unsure (1)..(250): unsure at all n locations; Clone ID: 701134171H1
ctggcaacagcattcaagggtctctctttttcttctccttcctcatcgttcttcgctggaagtggtagttattctctccgcgcgggtcccacctncggtggtgtcgctgccccggnnctgcccgctgaccatagagaacgcccacaagaagggggcgggcagcaccaagaacggccgcgactcgcagggcaagcgtctcggagtcaagatatacggcgaccaggtcgccaagcccggctccatcatcgtc

SEQ ID NO: 47534 - DNA, 251 bp, Glycine max
  unsure (1)..(251): unsure at all n locations; Clone ID: 701134172H1
tgtttttccctttcctctcctcaaaatttcttctgattcatttaatctttactcatcaatggctctgagactgaaccctatccccacccaaaccttctccctcccccaaatggccagtctcagatctcccaggttccgcatggcctccancctccgctccggttccaaagaggttgaaaatattaagaagccattcactcctcccagagaagtgcatgttcaagtaacccactctatgcctcctcagaaga

SEQ ID NO: 47535 - DNA, 254 bp, Glycine max
  unsure (1)..(254): unsure at all n locations; Clone ID: 701134173H1
ctggtagcaacagttacgtgacctacttggtcaccacgaagacgaacattccggaattcccgcgcctccggcgcnanttttcgcngtccggcggcggttccgtgaccgtggtgacgctctctgatcggctcgcagaggcgtaccgcgggtttttcatcccgccgcggccggacaagagcgtggtggagagccagcgtgatgcagaagcagnagttcgtggagcagaggagaatggcgctggagaagtacctgcg

SEQ ID NO: 47536 - DNA, 247 bp, Glycine max
  unsure (1)..(247): unsure at all n locations; Clone ID: 701134174H1
cttcactctagctttgcgtgtagggctccaacgctcggagcagctanttcgttgggtttgggaggccaatagggccaacccagttggaganaatgccactttttcacttggcactgatgggaaccttgtgttggcagatgctgatggcagaattgcatggcaaactaacactgccaacaagggtgttgtggccttcaggcttctttcaaatggtaacatggtcctgcntgatgcacaaggcgggttc

SEQ ID NO: 47537 - DNA, 245 bp, Glycine max
  Clone ID: 701134175H1
ttctatctgtgacgagcatcatggcctcaagagcagtgttattgttggctatgtgtgtgcttccggcgatggttgtggccattcgcccagcaaagaaccctttttgcgtgaagggtcgtgtctactgtgacccttgccgtgctggttttgagacctcagctaccacctacattgctggtgctgagattatgttgcaatgcaagagcagggttagcaacgaggttgtgtacacgaagaaggggtac

SEQ ID NO: 47538 - DNA, 246 bp, Glycine max
  unsure (1)..(246): unsure at all n locations; Clone ID: 701134176H1
aaaagaggaagatgtttccttgggagctaacaaattctcagagaggcaaccgattggaactgcggctcagagccaagacgatggaaaggactacacagagccacccccggctccacttttcgagccctccgaactcacttcttggtccttctaccgagccggaatagccgagtttgtagccacttttctctttctctacataaccatcttaaccgtcatgggtgtcaatnggtccagctccaagtg

SEQ ID NO: 47539 - DNA, 251 bp, Glycine max
  Clone ID: 701134177H1
gtttacacatctctccaacctttcactttcgtttctcagttttattcgaatccctctactcaatctcctttccaaatggccagcgttgaggttgcacagcaaacaccaacaacagttccagaaaatgaaacaaccgaggtaagcaagacccaggaaacaaccccagtcactgaggctcctgcaacagaacaaccagcagctgaggttcctgcaacagaacaaccagccgctgaggctcctgccccagaatt

SEQ ID NO: 47540 - DNA, 249 bp, Glycine max
  unsure (1)..(249): unsure at all n locations; Clone ID: 701134179H1
ctcaggtggaggattcagttcctggagaagagtatcaggaagctggattttaaccctggtgggatatgcaccattgttcaggttaatgacctcaggaattctcctggcccttctaagtgggagcttagacaggctaccaaacaggccctgcagctgcttcaggataactatcctgagtttgtagccaaacaggtgtttatcaatgtgccatggtggtacttggcagtgaacnggnngataagtcccttt

SEQ ID NO: 47541 - DNA, 253 bp, Glycine max
  unsure (1)..(253): unsure at all n locations; Clone ID: 701134180H1
cttagttgcttccaattaagatggttctgctagagaagctctgggactgatgttgtggctggccctcaacctgagcgtggcctngggcaagctcagaaaactcaccaccctcaaaactattgatgaaggagaaagtagcaagctgcagaagacgttgtcgatgccgtcgacaccaacaaccccgatgactccgacgactccaacgacacgggatcggcccgtaaagctgacaacgtttggaggagcgtcttcc

SEQ ID NO: 47542 - DNA, 249 bp, Glycine max
  unsure (1)..(249): unsure at all n locations; Clone ID: 701134183H1
gnagncnagggcntgtgttgtcanaatccnaganagangtnatggcgaacatagacattcgaagggatcttgangcagcagcagccttatgntgggngcgttccgaagacgaagatagtntgtactttnncnnccngcttctcgatcctaaaaatgaccgaggagcttctganggcgggatgaacgttgctcgtttcaatntctctcatggnacccacnactatcancagganaccctcaacaatctca

SEQ ID NO: 47543 - DNA, 215 bp, Glycine max
  unsure (1)..(215): unsure at all n locations; Clone ID: 701134184H1
gnactgcagccgtagaagganaaccgaccanngtgcacanctccttttacaggaactatggtaagaantttaagaagccccgccgtccgtacgagaaggagcgtctagacgcggagtgaagctggtgggggagtacgggctgcggtgcaagagggagctgtggagggtgcagtacgcgctcagccgcatccgcaacaacgcgcggaatctcttta

SEQ ID NO: 47544 - DNA, 248 bp, Glycine max
  Clone ID: 701134185H1
ctactactcacactcactgcagatctcaatccatggctaccattgttagcatcaaggcccgccagatctttgacagtcgtggcaatccaaccgtcgaggtggatttgacatgctccgatggtacttttgctagagctgctgttccaagtggtgcatccactgggatttatgaggcccttgaattgagagatggaggatctgactaccttggaaagggtgtatcaaaggctgttgacaatgtgaacacc

SEQ ID NO: 47545 - DNA, 247 bp, Glycine max
  unsure (1)..(247): unsure at all n locations; Clone ID: 701134186H1
cacgccaccaccgtcactgtttcaatcctcgaactgtgtcttcttcgctttctggtctttttatnaggttttgttcatcgatccatcgccaaacatgccttccagtcanttgcttctcnnggaanctattangatggtctccatccttgagcnatccaancctagtttnntctctgcaatgacaaagattgttggtaccctgggacctaaatctagatccgtcgaaaccattctggttgcctcaagg

SEQ ID NO: 47546 - DNA, 248 bp, Glycine max
  unsure (1)..(248): unsure at all n locations; Clone ID: 701134188H1
gccccaatatctgggtgaggcctatcagtggactcacaatggtggttgaccttnaactcatgaagatcgttcagtatcacgacggtggcattataccagtaccaactgccgacaacactgaataccgcttttcacatcagaacccaccattcggtccaagacaacatagtctagcaacccatcaaccacagggtccaggcttccaaatcaacggacacnctattngttgggccaatggagttccatat

SEQ ID NO: 47547 - DNA, 249 bp, Glycine max
  unsure (1)..(249): unsure at all n locations; Clone ID: 701134189H1
gagagaagcaagtganacactncaatcacctagggctaaaatcgtctcgtcttcattcctttttttttccggtttagaganttgaaaagatttcattgataattgagcaaacacaatgagtgctccacctcatcatgatgangacgacgacaacgaagaagttttccttgatgagtctgacatcatccatgaagttgccatggataatgaagatcttcctgacgctgatgatgattctgaatcctcgaa

SEQ ID NO: 47548 - DNA, 249 bp, Glycine max
  unsure (1)..(249): unsure at all n locations; Clone ID: 701134190H1
cannagcataaagcgggttactgtctgttcaagctacncatctctctctctcttncttagtgcctccttnccagaagttannatggcccaagaaactttcctattcacatctgaatcagtgaancgaggggcaccctgacaagctctgtgaccagatctccgatgctgtgctcgatgcatgcttggagcaggangngacagcanggttgcctgtgaaacctgcaccaagancaacatggtgatgntttt

SEQ ID NO: 47549 - DNA, 247 bp, Glycine max
  Clone ID: 701134191H1
ctccgaaccctcgatcactctcacgcgctcctatattcgctcctccaccgtcgctctctcgaacaaccacaacaccatcttcatcacatggcaaacgcagcatctggtatggcagtccatgatgactgcaagttgaggtttttggagctgaaggcaaaaaggacacaccgtttcatagtttttaagattgaggagcagcagaagcaggtcattgtggagaagcttggtgagcctgcccagggctatg

SEQ ID NO: 47550 - DNA, 244 bp, Glycine max
  unsure (1)..(244): unsure at all n locations; Clone ID: 701134192H1
gananctgttgttctcagntccatccatcagtggtnggcgatgtcgttgttctcagancccagactgagggggtgaaggaaaatgaagtcgtcgaggcgtctgttgaggatcgggcttgtgtcggcgtggnactcgtcgaacattggggtgctgctcctgaacaagtacctccttagcaactatggcttcaagtaccctatcttccacacaanatangagngnnctcaggcccncnnnnngnta

SEQ ID NO: 47551 - DNA, 248 bp, Glycine max
  unsure (1)..(248): unsure at all n locations; Clone ID: 701134193H1
cacaagggatacaatacaataccaagaagctaccnagctacaagagactccactcatcaccacctcaagcaactaattaactagcatagggtgttttggattatagattgtacttggaagaagatggaaaacancactgtgacatatcaaactgatctcaacctgcnggcaacagagcttagactggggcttccaggaacagaagaaagtgaggagaaaacactgtcagcaggtgctagaattaacaa

SEQ ID NO: 47552 - DNA, 251 bp, Glycine max
  unsure (1)..(251): unsure at all n locations; Clone ID: 701134196H1
tcattggnggngntagtgcaaaatgctattaagtcatgggagatggagctctcacacaagacccgtttgcaggacttcaagacaataaaccctgagaagttcaagctctttgtgaatggcagggaaggattatctggagaggatactctaagcctgggaagttataatgctttgttgcaaagttctctgcctgaagacttgaagccttacaaagcagatgaagagncttttgaatcatctcatgaagcgtt

SEQ ID NO: 47553 - DNA, 276 bp, Glycine max
  unsure (1)..(276): unsure at all n locations; Clone ID: 701134201H1
ccggcccaagcagtctccgtcctttaccacagggagtatccgagttcctcatgggctccggcttcgacaatgtacttcgaccagctcgacgccgccgcggggggcgccggagcactgccccccacggcagcgtcgaaagcggcgatcgantcgatgccggtggttaagatcctcgcgagccacacctacgcggaatcgcactgcgcggtcnccatggagaatttcganatcaatgcgacgcacgtgagatgccgtgcggtcagtgtaccattccga

SEQ ID NO: 47554 - DNA, 273 bp, Glycine max
  Clone ID: 701134202H1
tgttacggtgcaacctagcagcctccaaatccaatggcttcagagaagaaactttcgaacccaatgagggagataaaagtgcagaagctcgtcctcaatatctctgttggcgagagtggagatcgtctcaccagagccgccaaggtgttggaacaacttagtggccaaaccccagtgttttccaaagcaaggtacactgttcgttcctttgggattagaagaaatgagaagattgcatgctatgtcactgtcagaggtgacaaggcaatgcaa

SEQ ID NO: 47555 - DNA, 269 bp, Glycine max
  unsure (1)..(269): unsure at all n locations; Clone ID: 701134203H1
gggcactgtccaccatgagtttaccttcactgttcaggatggaatagatgccattgaagatgttatctaccatnttganacntnngatgtgactacaattagagcaagcncaccnatgtttctcatgtctcggaagattaaatcacttggtgtcaantgggttntctcaggagaaggtcctgatgagntctttggngggnatntgnacttccacaaggcacncancaaggnggngttcnacngagnngcntgccgcaagntcggngcat

SEQ ID NO: 47556 - DNA, 269 bp, Glycine max
  Clone ID: 701134204H1
agattatcctaagtctttgggaatagtgctgcaatggcttcaagtcaggaggaggtgacccttttgggagctactggaagcccatttgtgtgcagggttcatattgccctcaagttgaagggagttcaatacaaatatgtcgaagaaaatttgaggaacaagagtgaactgcttctcaaatccaacccagttcacaagaaggttccagtgtttattcacaatgagaagcccatagcagagtctcttgtgattgttgaatacattgatga

SEQ ID NO: 47557 - DNA, 268 bp, Glycine max
  unsure (1)..(268): unsure at all n locations; Clone ID: 701134205H1
ttccgatgccctgatgaaatgggatggaagccccagaaagtccccattgttccttcggatggtggaatttcgcgaacaagggagacttcacttcctgttgtggagatcaccaaagccttggcagagaagggatatgaagttatngtatcagttgatgcaggcaggtttgtgtgcaattacgtttactatcattcccttcgcttcaccgagcaaaacgggatcaaatcccttttcgtgcacgtgccgctcttcgtgacaataaatgaag

SEQ ID NO: 47558 - DNA, 268 bp, Glycine max
  unsure (1)..(268): unsure at all n locations; Clone ID: 701134207H1
gnaaattcgaagtgggcggccatgactatgaaggggtgtcttatgtggcctcacagccatttttcatccttgacatgttcaatctccgatccattgagatcgacatggacaccgaaaccgcgtgggtccaagccggtgcaacgcttggcgaagtttactatagaattgctgagaagagtaaaactcatggtttccctgcaggggtgtgtcccactgttggggtgggaggtcacattagtggtggtggatatggcaatctcatgagaaa

SEQ ID NO: 47559 - DNA, 272 bp, Glycine max
  unsure (1)..(272): unsure at all n locations; Clone ID: 701134208H1
ancctcttgtccctctctctcttcctttcttctctcaccttttcctctctcaatttcctttcccttttgaaattatgatataagagaacaaaaactcccccttaaacagataaggtatatataagccacccttcagagcaatttgtccatcttcttcaatttattagcagaagatgtggtgcattagattaccttagtctttgtcctagtgtcttccacaacaacttggtccntacgtttccaaatattcacataagagaagaacaatagtt

SEQ ID NO: 47560 - DNA, 270 bp, Glycine max
  unsure (1)..(270): unsure at all n locations; Clone ID: 701134209H1
ctctctctttgtcgcttggatcactgatctcatctcaattntcaganatgtcgacatctgataagccagaagtggtggaaaggggtagcaaggatgaaaaacacaaggaagatgatcaagaggaggggaagggtggattcattgagaaggtgaaggatttcattcatgacattggtgagaagattgaggaagctattgggtttgggaagccaactgctgacgttactgcgattcacattccatcgattaatcttcacaaggcagatcttg

SEQ ID NO: 47561 - DNA, 267 bp, Glycine max
  unsure (1)..(267): unsure at all n locations; Clone ID: 701134210H1
agctccttagtgctgctccttgcagctctaattctatcccctcaagttcttgcaaactatgagaatnccccagtgtacaagcctcccactgagaaaccaccannttataagcccccagttgaaaanccnccagtgtacaagcccccagttgaaaaaccaccagtgtacaagcccccagttgagaagccnccagtttacaagcccccagttgagaagccaccagtttacaagcccccagttganaaaccaccagtntacaagccacca

SEQ ID NO: 47562 - DNA, 88 bp, Glycine max
  unsure (1)..(88): unsure at all n locations; Clone ID: 701134211H1
gggcctcanccanaaatctccctnctaancttnttcttnttctgcgtccttnaccatcattgcgcatgcnattgttccncanaacgaa

SEQ ID NO: 47563 - DNA, 268 bp, Glycine max
  unsure (1)..(268): unsure at all n locations; Clone ID: 701134214H1
gggcttaagcgaagagacacanaggagtggntgaggcatcgccaactccctgaagatttgagaagtcgtgttagangatttgttccaatataaatggcttgctactcgtggagttgatgaggaaaccattctacgtgcnttacctgctgatcttcgccgtgatatacagnggcatttgtgcttagaccttgttagaagagttcccttcttctcacagatggatgatcagcttctggatgcaatatgtgagcggcggtatcgtctctga

SEQ ID NO: 47564 - DNA, 272 bp, Glycine max
  unsure (1)..(272): unsure at all n locations; Clone ID: 701134215H1
gnaggaccagaattggatctctcaaaaagaaggcacttaatgcatcctccaaattcaaacacactcttagaaagaagagtagcaggaggaaaagcgatggccgtgttagctccgtttcaattgaggncgttcgcgatttcgaggagctccaggctgtcgacgcctttcgccaatcctgatcatggacgaattgctccccgaagcctttgatgattaccatatgatgttaagatttttgaaagcnaggaagtttgatattgaaaaggcaaagc

SEQ ID NO: 47565 - DNA, 271 bp, Glycine max
  unsure (1)..(271): unsure at all n locations; Clone ID: 701134216H1
ccgaggttgatgtcgttggagttgggacgtccganggcaaatattggtcatggggatcagaaagantttgttccacaaaagttgccatcngtgcatcttggtgttgaagaaacgggaacagtgaattatgagatttctaatttaatccggtggaggaaaacttttggaaatgttgtgcttatcatgcattgcaatgggccagtggaacgaactgctcttgaatggaggttgcnttatgggaggatattcagatctgtagttatttgtccga

SEQ ID NO: 47566 - DNA, 269 bp, Glycine max
  unsure (1)..(269): unsure at all n locations; Clone ID: 701134220H1
cncatccccagttcccgattttgcttaaccttcaattccaatcgaattgaacgtcagaggtccttgcaatggcagggaattcttctgatgtactgtcgccgaagcaacctcccttggccatctcccttgcgtttctccaaatncctttcagtctaacatgagaattttgattacgggaggagctggattcattggttctcacctagtcgatagattgatggaaaatgnnaaaaatgaggtcatgttgctgataatacttcactggatca

SEQ ID NO: 47567 - DNA, 274 bp, Glycine max
  unsure (1)..(274): unsure at all n locations; Clone ID: 701134221H1
ctcnccctttcgtcaccatgnccaccgagactcctcactntcactctcantagtgttggtggtgctgttntnngccgccgtggacgcgcattttccggcgacnggcgagcnncgcaacgttccgcgaggcgccggncattccgnancgtccagagaatgccgcaancgcncgcgaanactnccgttcttccacatcgcgatgacgcttgangcgactncctccgaagctccgtngcccggagtgntctccgtgctgnagcacgcgtcgtgtncg

SEQ ID NO: 47568 - DNA, 268 bp, Glycine max
  Clone ID: 701134223H1
gcgggccgttcagaccagaactgaaaattcccgcggcctctggcaaccgttcaccgctcttctcggtgacgatcccagtgttgacgttaagaaaaacgttgtcgttaccatctcttcggacaaaggtctttgtggtggaatcaattccacgtctgtcaagataagcagggttttgaacaaattgaattctgggcctgataaagagacaaaatatgtcatattgggagagaaggctaaggctcaattgttgcgtgactcaaagaaacaa

SEQ ID NO: 47569 - DNA, 270 bp, Glycine max
  Clone ID: 701134224H1
ccaccacctccgcattcctcctccttcgcctcctcctgctgctccaccttcgccatcgccgctcacggcatcggcatcaactacggcacgctcggcgacaaccttccaccgcccgcggcggtgccgaacttcctgaagacgaagacgaccatcgaccgcgtgaagatctacgacgtgaacccggacatcctgcgggccttcgccggcagcggcatctccgtgacggtgaccgcccccaacggcgacatcgccgccttaaccaaaatcgac

SEQ ID NO: 47570 - DNA, 268 bp, Glycine max
  unsure (1)..(268): unsure at all n locations; Clone ID: 701134225H1
gnttctctcctctgtctttttctctctcttgctatccttttggctagtngcactgctgcaagtggcaactccaagaagcgcagtgccaagccaccatgtttcaacattcaacagaagcctttttccttccacttttctctttggtnnggttcttctgcttaccaggcagaaggagcagcaagtgtagatgggagaggaccaagcatatgggacacctacactagacagcatactgaaaagatttgggatcatagcaccggtgacatgg

SEQ ID NO: 47571 - DNA, 265 bp, Glycine max
  unsure (1)..(265): unsure at all n locations; Clone ID: 701134227H1
gccgttaatggtggtgttaggcatgactctagtaatttgcttggcaaatgggcaagctacacccccttgcgctaaacacctaagtccatgtcttgatgtcatgaactccactaanccacccgacacatgcagcaatccaatcanagaaacccncagtacatgtttctgccaacttgtatcaactccgggtatgcttgaaggtattggtaccactatcgctcaggctctcaaacttgccaacttatgcggtgtcaattcacactca

SEQ ID NO: 47572 - DNA, 269 bp, Glycine max
  unsure (1)..(269): unsure at all n locations; Clone ID: 701134228H1
gtaattcagactggcaacatcgtgaatgagcttgggtttcctcgactgttgatgcaccttgcctcaagtgaagattcagatgtcagagaagctgcccttcggggccttcttgagcttgcttgcaatactcaagatggcaaggatggcaatgaggaagacagtgagaagatgaagcaacttcttcaagaacgaataaacaatatcagtttaatgtcagctgnnnnnntancgtgtagtcagggaggagaggcaacntgtggactccctgt

SEQ ID NO: 47573 - DNA, 269 bp, Glycine max
  unsure (1)..(269): unsure at all n locations; Clone ID: 701134229H1
gcnttcctagaacgaaaaaaaaaagangagcaattttccctcaccanagaagaagaagcaaacaatggccgntcaacttaccgatgaacagatctccgagttcaaggaagccttcagcttgttcgacaagagacggcgatggtngcntcacaaccaaggagcttggaactgttatgcgttcattggggcaaaacccaactgaggcagagctccaggacatgctcaatgaatggatgnctgatgggaatggtaccntgacttccctgagt

SEQ ID NO: 47574 - DNA, 274 bp, Glycine max
  unsure (1)..(274): unsure at all n locations; Clone ID: 701134230H1
ggaagaaggnagaaaaagagaagaagtagtttggtgtgttaattgttncgagagagnnatggacgactacacgagggaaatgatggacctgaagacactggttactcgcactctcgagaaganangcgtccttgccangatccgtgccgaactcagagcgagtgtgttcgaggccatcgaagaggaagatcatgtgattgananggaacaagccctacctcctgtcattgcttggtagctgtcaacgatcgagctaaacagcttcacgcttctc

SEQ ID NO: 47575 - DNA, 192 bp, Glycine max
  unsure (1)..(192): unsure at all n locations; Clone ID: 701134231H1
tgnatggtttatcccggcatgatatataaacctttgggctttcatctcattcctttttttataggtacttgaactcttcatgtcttgtaagttagtgagacataggtggaatcaattttacccctttgtnnattcaatctactctgtgactttaaaaattgcaaaaaactagctttgactatacaaaatttg

SEQ ID NO: 47576 - DNA, 210 bp, Glycine max
  unsure (1)..(210): unsure at all n locations; Clone ID: 701134234H1
tttgtaggtgagatannagatgaggattatctttattgatcctcagtcctcacatttcctttttatttcttctccttaagttaccttgtggatttcattatttatgtntgagcangagcntnatggaactnctcaatgntaaaatancggtnttnnnngtnatgnttncacnngngngatnccangggccatcnacgaccgagcgtgtnc

SEQ ID NO: 47577 - DNA, 266 bp, Glycine max
  Clone ID: 701134235H1
gatacaattcctgccttgagaaaatcagccacaaccattgcagttcttcgtggattcaacgtattgataggagttgctctcatttcttcagacacactgtataaatgtattattgaaaggagaggacccgcaactaactttccctgcattgatgcacagatggtagatgctaattgaattccaactccaattccaataacattaaagagagttgaaaaagcctctcctttagcaaataggtcactgagatttccttctttggcaaa

SEQ ID NO: 47578 - DNA, 267 bp, Glycine max
  unsure (1)..(267): unsure at all n locations; Clone ID: 701134236H1
ccgaccccatcttcaaccctgcnctctccgcttccttcgccgccgtcccctgctcctccgccgtctgcgaccagctcgacgactccggctgccaccagggccgctgccgcnaccaggnctcctacggcgacggctcctacaccagaggcacgctcgctctcgaaacaatcacgctgggaaaaacagtgattcggaacaccgccatcggctgcgggaattgaaccagggcatgttcgtcggcgcggctgggcttttgggactcggagc

SEQ ID NO: 47579 - DNA, 140 bp, Glycine max
  unsure (1)..(140): unsure at all n locations; Clone ID: 701134237H1
gggtntntcatggagtggcagangaagnnacaattanctcccaaaancgaccancacctccacccccttgcttactantaccatacagaatcccnccctgcancaccaccgcagccgcaaggttactttctcccttcagg

SEQ ID NO: 47580 - DNA, 268 bp, Glycine max
  unsure (1)..(268): unsure at all n locations; Clone ID: 701134240H1
tctaccancaacaagtacncccccantactantnataatnttattattatnctcacgggtaaataaanaaatanaatggtgcgtgcatagtaataggctaatanggtagtagttncntcatgttgggtagttggngactccttaagcagcttcagagtctgagaagtgagaagcggnagaagaagcgangcgtntttgcccgtgtnttggntccgaggaggccaagggggcagcggatcgcgacccggtcctgctggtttcgggcatg

SEQ ID NO: 47581 - DNA, 265 bp, Glycine max
  Clone ID: 701134241H1
tggcgaacaatttagatcagactctaaaacagttaaccaacaagctttcttttatgctagtgaacgcgaagtccatcacaacgacatatttatattcggcatagataacaccgtactctctaatatcccatactatgaaaaacatggatatggggtggaggaatttaatgaaaccttatatgatgaatgggttaacaagggcgacgcaccggcattgccagagatcttaaaaattacaacaagctgttgtctcttggcttcaaga

SEQ ID NO: 47582 - DNA, 266 bp, Glycine max
  unsure (1)..(266): unsure at all n locations; Clone ID: 701134242H1
gaagggtttaacctttctggctgtgttaatatgcgtttcagcactgtcactgagtccttctgttgcgggggaagggcaaaataatggccttgttatgaacttctacaaggaatcatgccctcaggctgaagacatcatcacagaacaagtcaagcttctctacaagcgccacaagaacactgctttctcctngctcaggaacatcttccatgactgtgctgttcagagttgtgatgcttcactgttgctggactccacaagaagga

SEQ ID NO: 47583 - DNA, 265 bp, Glycine max
  Clone ID: 701134243H1
ctctctctctcttcgttcttttggagtgtgtgtgcacccattgatgacaagcaaccccattgcatggaagcctaagaggaggagaagacgaagaggacaagggtaactgaatcgccgcttctgcagcttcgttctttcgtttttgtttcatctttttagcttcagagggtaaataaaaaatggaggttttggtgggtcccgctttcaccatcgacgttccctcgtctccgccgcagcatgccggttccgatgatcggatctttct

SEQ ID NO: 47584 - DNA, 258 bp, Glycine max
  unsure (1)..(258): unsure at all n locations; Clone ID: 701134244H1
gcattaaagggtcaacggtgtgtacattgcaggctaattgtaggggatggttanngtacaataacaaaaggggaaagtatcagaagattctttgagaatgcggaagaggcagaagaagnagaggatgatggtttgatggatgcagatggaaatgagattgatggagaatgctcccgtccttcaaaagcatgcaaagagtcctgaacttgctcnnntaanncttctagatgctgctactgttatatttaaagaacaggt

SEQ ID NO: 47585 - DNA, 265 bp, Glycine max
  unsure (1)..(265): unsure at all n locations; Clone ID: 701134245H1
ggccttatgttatgtctaactctacctcgttcaagatcaaacattgattcttagttgcatagcccttgtcatatctctttttttaatcanaacttccattcaacacttatagntgaataaaatgtctgctgcaacttttgcagctcatattgctggggctggctttgtaggcttgaagtccaactcatcaaatctttgccccagtactggatccataggatggaaaaggaagattgtttcaaatggttctaaaacttactgcaga

SEQ ID NO: 47586 - DNA, 266 bp, Glycine max
  unsure (1)..(266): unsure at all n locations; Clone ID: 701134246H1
ggaagagcccctctcttggaggctgagcgtgctggangaggaaagagggatggtgcctcggaaggtcaagcctcataccttgagcatggtgatgcagtgccggcggcanatgtgggattcgtagggtgctttcacttgcaaaacctgaggctggaaagttggtgatcggtactgtggctctgtcgattgcagccacatcaagtatcttagttcaaaaatttggtgggaagataattgacattgtctctagggaaatgaaaactcca

SEQ ID NO: 47587 - DNA, 271 bp, Glycine max
  unsure (1)..(271): unsure at all n locations; Clone ID: 701134248H1
cnaggtttccactgaagcaggtaccagcttatgtgatagctcaggtcgttggagccacacttgctagtggaactcttagacttatattcaatggcaagaatgaccattttgcaggaacactcccttccggttctgatttgcagtcttttgtggtcgaattcataatcactttttatctcatgtttgtcatttctggtgttgccaccgataacagagcgattggtgagctggcagggcttgcagttgggtctacggtgctgctaaatgtgat

SEQ ID NO: 47588 - DNA, 274 bp, Glycine max
  unsure (1)..(274): unsure at all n locations; Clone ID: 701134249H1
cnncgagccgctcatccttgggcataatcatgggtattgaaacggatgattttgctggatgctgctcgcaagtgcatcttgccaaggaagtagnctatgaaggaacanggagttatagcgcacattttccatcccaatgtgcttantacaagtagttccattttttgaatggttctagcttcaaacacaaactttggttccccaacctgtaaatctacggattggaggcattggatctcctcccatttaggcggcaaacgacagcaanctanag

SEQ ID NO: 47589 - DNA, 266 bp, Glycine max
  Clone ID: 701134251H1
gactgcataccttaggtcttccgaattcgaagttaatttgcaagatggctaaggaaaaggctcagatcaacattgtggtggttggtcatgtggaccctgaggaggcaaccaccattaacgagctgaagaagcctgttgtggagaaagaagctccagggcatgccatatgagggcatgcacgtacggcctcggaggggaaccagaaaattatgttaacaaaataatctggaaccctaatgtatcagtgtcatcatcagtgtgtagtt

SEQ ID NO: 47590 - DNA, 266 bp, Glycine max
  unsure (1)..(266): unsure at all n locations; Clone ID: 701134252H1
gaaggagttatacaaacaactgcttgctacaanaaaaactaatgcttaaagccaaacccatacttgangaaactataatgagactatatcgngatttttctccaaactgcatgaaagtggcaaacttaggttgctctgtaggaccaaatgcacttctggtgatatcaaatattattgacattgtcaataccgcttgcactagcttggaatcgtgaaccaccaaattccaattttntctcaatgatttatttggaaacggattcaat

SEQ ID NO: 47591 - DNA, 266 bp, Glycine max
  unsure (1)..(266): unsure at all n locations; Clone ID: 701134255H1
ccgacttctggaagggatgcatttattagataaaangtcaacacaggctctgcctgtncnctttgatgattcatgataactcgtcggatcgcacggcctttgtgccggcgacgcatcattcaaatttctgccctatcaactttcgatggtaggatagtggcctaccatggtggtgacgggtgacggagaattagggttcgattccggagagggagccgagnnacggctaccacatccaaggaaggcagcaggcgcgcaaattaccc

SEQ ID NO: 47592 - DNA, 265 bp, Glycine max
  unsure (1)..(265): unsure at all n locations; Clone ID: 701134258H1
ctgntncnagttctcttccgctgtttgtattcttnccttgtnctgttgctgctgntcgtttcatctagttcttggcgctgtttgatttgttgctgaaaaacgtggtantatttttcttaaaattcttttgcacatgcgaatattcngagtctgtgatgaagatttatctgtgccggaggcgagtgatatgtntngctcgtcgatgacggcgcaattcctctaagaagttctgagctcaacattcaacctttgattggtatttgta

SEQ ID NO: 47593 - DNA, 269 bp, Glycine max
  unsure (1)..(269): unsure at all n locations; Clone ID: 701134259H1
gaggacgtaatgggatctctgttaagggaacacctgaatgtgactaaggaacnagttgangatcctaatatctctggaaaggggcaatganagtnccgaggatagtgcatgcccagaacctgaaaatggtgcactngcatctcattgtcctacngaatnacaatgcagaagttggaagtgaggttcagaagggtagcacttgtgancaagctgatggtanctctganacagggcagagggacgtgatgggnatctctgttaagggagat

SEQ ID NO: 47594 - DNA, 265 bp, Glycine max
  Clone ID: 701134260H1
acaaacgaggaatcctttattgctgccgatgaggtaggtgtggctggtgatagcaacaacaatttaatacctcaaaaatggttcactctctgctcctacttcttctcctcctcactctcactgcaacctctgctcaacatgacggcccttcgatcacagccaccatggagcaattctccggttacaaaatccacgaacctcactctttccaaccctcttcactctccgttgatgctcaggctcttcagaaccagattgatgagct

SEQ ID NO: 47595 - DNA, 240 bp, Glycine max
  unsure (1)..(240): unsure at all n locations; Clone ID: 701134263H1
aaattcattttcagtgntagaactcgacgccgacgatagccatgttcccaccactgccgatantagtgaccaagagggttaatgccgacgttgacattgtaccagtaaaaagcgagaaacaaaatcaaganaatccagtgactcctcgtgtgaatacaagttacctcttgtgtggattgacttggaaatgactggcttaaatattgaagtggacagaatattggagattgcttgtataat

SEQ ID NO: 47596 - DNA, 282 bp, Glycine max
  unsure (1)..(282): unsure at all n locations; Clone ID: 701134264H1
atcacatgntcctaacatacntcttgctcttcgatcatcacctctccacaatgccgccgaagttcganccctcccagatagtcgangtcttcgtccgcgttaccggcggcgaagtcggngnggcgagtccnannggatttgaagatgggtgatcttngtgtcngatcncangaagatcggtgtnagattcgttcaaagtaaaccgtgcaanggttggaagggcatccgaggaacagtaaagtgggagctggagagtgnctannngnaggngncggtntntgg

SEQ ID NO: 47597 - DNA, 219 bp, Glycine max
  unsure (1)..(219): unsure at all n locations; Clone ID: 701134265H1
aaaaattcnanatattatgcatcatttctcaccaaccacctaggntttctctccgacgttaggttttnntttctcgccgggattttgggggcagacttaatctccggcagctatggcctccaacttgcagatgagtcctcaggtggagcagatccacggtgaaatccgcgacaactttcgagnccctcgcaaatggcttccagagctggataagattaa

SEQ ID NO: 47598 - DNA, 263 bp, Glycine max
  unsure (1)..(263): unsure at all n locations; Clone ID: 701134267H1
antccacccatccaaaacttgcttcgncccatcgcttgatgcgaatcntgatccattctggcttcttctctcaacaaaagcatgacttggagagtgcgctagaagccaagtatgtgctaaccgangtcatcngnactattgcttaagaaccatccgatgagtgtgacacctttcttgcatgccatgcttgatccagttttgacaaatccatggaatcnatttnctacntggntcggnaaatggtganccnacaccatttgaac

SEQ ID NO: 47599 - DNA, 134 bp, Glycine max
  Clone ID: 701134269H1
gcagtgtcatctctcctttgacgacaagatgagcatcccaattccccatcggcagttattcatagacggagactggaaagtccccgtcctcaagaatcggattcccatcatcaacccttccacacaacatacga

SEQ ID NO: 47600 - DNA, 258 bp, Glycine max
  unsure (1)..(258): unsure at all n locations; Clone ID: 701134270H1
ttctctgtctaaggggtgccctgagatcacattgaacaatggtgaaggctgtggccgttcttggcagcagtgagggtgtcactggaactattcacttcgttcaggagngaagtggtccaaccaccgtaactggatctcttgctggtcttaagcctggtctccatggtttccatgtccatgccttgggggacactaccaatggttgcctctcaactggatcacatttcaatcctaataacaaggagcatggtgcccctg

SEQ ID NO: 47601 - DNA, 262 bp, Glycine max
  unsure (1)..(262): unsure at all n locations; Clone ID: 701134271H1
aaaagaggaagatgtttccttgggagctaacaaattctcagagaggnaaccgattggaantgcggctncagagacaagacgatgngaaaggactacacagagnccacccccggnnccacttttcgagccctccgaactcacttcttggtccttctaccgagccggaatagccgagtttgtagccacttttctctttctctacataaccatcttaaccgtcatgggtgtcaataggtccagctccangtgtgctactgttggc

SEQ ID NO: 47602 - DNA, 261 bp, Glycine max
  unsure (1)..(261): unsure at all n locations; Clone ID: 701134272H1
gatgaagtgtggttccaaaanaagaagagcaggatagtgtttagttggtcatctgtggatggcatattgcattccaaactcaccatcactccagggttggaagacaggtccatgttgtttattcggctggaacataggcaagaatagagttaatggcaaacctcagattaagtaccatgatattgatcttacattcccaacttctctggtcgacaaaacatttntgagagggaaggagctcaaatgctgctatagggctac

SEQ ID NO: 47603 - DNA, 259 bp, Glycine max
  unsure (1)..(259): unsure at all n locations; Clone ID: 701134274H1
gaaggctgtttcactggctattgctcgtgatggtgcaagtggtggggntgtccgaacagtcataataaactcagagggagtgaccaggaatttctaccctgancgaccaacttccattatggcacgaggaaatggagccccacaactccttgctagacattctnggtgccccagagccgatgagtatgtgatgtgaagaagttgccgtgtttcagaaagtttcctgatagattatatcttgtcttctctcttttatgaa

SEQ ID NO: 47604 - DNA, 259 bp, Glycine max
  unsure (1)..(259): unsure at all n locations; Clone ID: 701134275H1
caggcagtgatagcaaagagaagatcatttcataatcagactcacctaactccgccatggctgctgttccctctactttcgctctaaccaaatctgcattgtccataaacaagctggaccactctctggtcaagatcaaaccatanagcttctctctgaatctaaaccgtctagggaggatggaaacatctttaaccagaaggcctctaacaattcaagccacatatagtgatggtggaaggcccagcagtgctagtgt

SEQ ID NO: 47605 - DNA, 264 bp, Glycine max
  unsure (1)..(264): unsure at all n locations; Clone ID: 701134277H1
tgcctcacaccgccggcangtantcgntgaagcggttcaggaaggngcantgcnccattgttgagangctgacccaactgctgctccatgatgcacggtaganacnctggcaagaaactcttggctgttaggatcatcaaacatgctatggagattattcatttgttgactgaccagaaccccattncaggttattgttgaagctgtngtcaacagtggtccacgtgaagatgcaacnagaattggttcanctggagttgttag

SEQ ID NO: 47606 - DNA, 263 bp, Glycine max
  unsure (1)..(263): unsure at all n locations; Clone ID: 701134278H1
cncattcaaagaccttcaacccctgaaccattgtgccaagtaatgcttcgcgttggtgatttagagcgctcaattaagttttatgaaaaggctttgggtttgagggtggtaaagaagactgatagacctgaatacaagtatactatagctatgcttgggtatgcagaggaacatgagacaactgtgttggagctgacatataactatggtgtcactgcaatacaccaagggaaatgcttatgcacaggttgctattggtactg

SEQ ID NO: 47607 - DNA, 266 bp, Glycine max
  unsure (1)..(266): unsure at all n locations; Clone ID: 701134279H1
ggtacctgcccttggctgaggcctgatgggaagacccaagtgaccgttgagtattacaatgacaatggtgccagggttcctattcgtgtacacaccgtgctaatctccacccaacacgacgaccncngtcaccaatgacgaaattgctgctgacctcaaagagcatgtgatcaagcctgtgntcccagagaagtaccttgatgagaagaccattttccacttgaacccttcaggccgttttgtcattggtggccctcatggcgatg

SEQ ID NO: 47608 - DNA, 266 bp, Glycine max
  Clone ID: 701134280H1
ctcagtgttctaagcagtcagaaacaatggagaggaaaagacacagtcctatttctttcactatgttcacattgctacttggagtgcttgctcagaaccttgtcatccctgtaatatctaccactgccatcattgtggaccagaacttcaactctccagacccacatgcaggaacagatttatcaaattctctatgttcatactgctctccagatcatggctctgggagtggtgggcaggaagctcaccacaccactctcaacatg

SEQ ID NO: 47609 - DNA, 284 bp, Glycine max
  unsure (1)..(284): unsure at all n locations; Clone ID: 701134281H1
gnnacggtggnnacctanccannntcncanatnnnntgggcttcagatgaaganattttcgagcccaatnanntnagatcnacgtgccgncgctgnagtcccantatctcnctagggcgagatnngggagatcgtctcnccagagctcgccaaggcgttggaacaacttagtggccaaaccccantgttttccaaagccaaggtacantgttcgntctttgggattagaagaaatgagaagattgcatgctatgtcactgtcagaggtgacaggcaatggcaat

SEQ ID NO: 47610 - DNA, 260 bp, Glycine max
  unsure (1)..(260): unsure at all n locations; Clone ID: 701134283H1
gtgtccctaaatcaccatgccaacttcactttccaaattccatgcttcanttcaaanttaacaaaaattaaaacacaccnatcntcnnttttcaacactgattcttcannttcttggatctgactctgntctccacagttaccagagctacgntctttggtgctaagttcaagatccaatggcggttgctacangaggagntngaggtgnntntggtnntcgcagnttgnnntcgnttccggatntcantctgccagtnt

SEQ ID NO: 47611 - DNA, 262 bp, Glycine max
  Clone ID: 701134284H1
aaaaatgttctcactcttccatctcattatgtgttgacacgctggacaaggaatgctaaaaccagtacattgttagatgaacatgcatctgaattgccaagtacttcttgtgagtctgtaatagttcgttacaacaatttacgccaagaagcaatcaaatatgttgaagaaggtgcaaaatcaatccaagtctatcatgttgccatgagagctctgcaagaagctgctaagaaggtttgcgccattaaaaatcatagttctg

SEQ ID NO: 47612 - DNA, 260 bp, Glycine max
  unsure (1)..(260): unsure at all n locations; Clone ID: 701134285H1
gttttctgcgtcatctccgattccccgacnatggccacccaaatgagcaagaagagaaagttcgtagctgatggagtgttcttcgctgaactgaacgaggttctgacaagggagttanccgaggacggatactccggcgtggaagttagggttacgccgatgcgcaccgaaatcatcatcaaagccaccagaacccaagccgttctcggtgagaagggaaggagaatcagggaattacctcggtggttcagaagaggttc

SEQ ID NO: 47613 - DNA, 260 bp, Glycine max
  unsure (1)..(260): unsure at all n locations; Clone ID: 701134286H1
ttctatatattattgnattgacaatgaggcctgctcttgctttgcttcctcttctatttgcnttcttgttagctgccactacagaatcaagaaaagatacaggggaatattggaaaatgatcatgaaagatcaggaaatgccaganggacttcaaggtcttgtttcatttcaatctgaanataaccctaagactcaagagcagcttggtaaaggttccaaanaccattgtgaagagtctctagttacaaatacacaagtt

SEQ ID NO: 47614 - DNA, 242 bp, Glycine max
  unsure (1)..(242): unsure at all n locations; Clone ID: 701134287H1
agacaatcccatcttccatttccatcntcaatatttcttctcatccgagaagcttcgcgaacgaanacaaagaaccctagacagatccattccatagccatgtcaggngtnggccctctatctcaggatngggaacncgncgncntccgcaagaaggctccnaccgacgccgccaagaaggacgagaaagnngnnaacgcngnncngcgctcagncncggaaatnggagacccnacaaagtt

SEQ ID NO: 47615 - DNA, 240 bp, Glycine max
  unsure (1)..(240): unsure at all n locations; Clone ID: 701134289H1
cgttgcttggtgatgtccctttctgntctcttcactctnggtacttgcgagagaaagccatgcangagncgaagatttttggcatgctgtttggccaaacactcccattccaagttcattgcgagatcttctanagcctggccctgcaagtgttgaaatcgatgatcaccctatgcaaattgaagaaacacagtacccgaaaaccttcttctataaagaagaccttcatccaggcaaaac

SEQ ID NO: 47616 - DNA, 260 bp, Glycine max
  unsure (1)..(260): unsure at all n locations; Clone ID: 701134290H1
tacccgaagcagccatggggatcgatctcaaggccggatgtaagagcaaaaagaccaaaagaacagcacccaagtccaatgatatctatctcaagctcttggtcaagcttnatcgcttccttgttcggagaactggcagcnacttcantgctgttatacttangagattgttcatgagcaaggttnncaantccccattgtctttgncaagnntnattgagtatncgaaggnganggangannagattgcagtggtggtg

SEQ ID NO: 47617 - DNA, 145 bp, Glycine max
  unsure (1)..(145): unsure at all n locations; Clone ID: 701134291H1
ccctttgggaggaaacgccagaaaacccaaagttttgttcttcctctgctttgcaatctcnacacagaagatttntggataaantttgcaaatttggttcactgcagcactgttccgtcgcaantttcttccacagannatnnta

SEQ ID NO: 47618 - DNA, 262 bp, Glycine max
  Clone ID: 701134294H1
cgaatatcttgttgtttggagcgatccgagaaaaactctgtaaacatgttggtttaccaggacctccttacaggtgatgagcttctctctgactccttccgttacaaggaaattgagaatggaatgctgtgggaagttgaggggaagtgggttgttaaaggagcagttgatgtagacattggtgcaaacccttctgctgagggtggaggagaagatgagggagttgatgatgcagctgttaaggttgttgacattgttgaca

SEQ ID NO: 47619 - DNA, 264 bp, Glycine max
  Clone ID: 701134295H1
cagtgcacctgtggtggatgtagatgcacccgaagatgctagttggattgacagatatataggaatagttgagtttgctggaattgttgtttggattctgcatcagtctgaacccacatctcctaggagtccatccagtggagctgctaatacggctgcagttactggagtagcttatgaagcattaggccttgaatctgctgcgacaacttcaggcaattttttcgaggatctgacttcttctcagctatataagaataccaa

SEQ ID NO: 47620 - DNA, 270 bp, Glycine max
  unsure (1)..(270): unsure at all n locations; Clone ID: 701134301H1
cngtttcaaacccccttaatcttacgtcattggttcgcatcgagttgcattcaaagtaggactgccatagtcttctcctttttgtcgttctttcaacttttgtctagacagggtttgatgtcaatgcccttcaaaacacaagcaaaacccccatcttgataaatttcatgtaaagggaaagaaattgtcgaagttcacttgatatgctcttccttatgtgtcaattggtgggggttagtggacgngatganncgnnntnnggaagnntnt

SEQ ID NO: 47621 - DNA, 291 bp, Glycine max
  unsure (1)..(291): unsure at all n locations; Clone ID: 701134303H1
cgacgttctggctgcgtcccaagaatctctgangccgttgtcggttttctcnggccacggctacttccaacggatggcgacgacgaccacggagttcgatctcgattacgagttccccgatctcgattacgaccttcgctatctcagtctcgccggaatcgatgccctcaccgctttccaaaacctattaccggtcagtnnnnnnnnnnnnnnnnnnnnnnnnnnnnnnnnnnnnaattcacgttcgattggagccatctttgccacgncatcaaacatgttctatgactt

SEQ ID NO: 47622 - DNA, 272 bp, Glycine max
  unsure (1)..(272): unsure at all n locations; Clone ID: 701134304H1
ggcattcttcacttcaagatatcaacgatgtctataacgcaaagcctcactactccactctantcttcttcctctgctttcttagctccttcttccttcaattgcaggggacaggtttcgttgcctgtgaagagcgtgagcatttgcaaatgcgttgccacacccgaagctgagactgcctacaagacaggggtcaattcgcaatccaaatatggggaaacttcaagctggctatctctttcccgagattgctagaagaaggtctgcgcact

SEQ ID NO: 47623 - DNA, 287 bp, Glycine max
  unsure (1)..(287): unsure at all n locations; Clone ID: 701134305H1
cgtgaggngaatatgaagttgtttgttttctntgttgctgcagtagttttggtagcatggccatgccatggcgcaggctaccaaaggttccctctccgaatgaaaactggctatggtgagcgttcttcggaggtaaaatgcgcaagttttaggcttgctgtggaagcacacaacatccgagcctttacnaccattcctgaagagtgcgttgaaccaacaaaggactacattaatggcgaacaatttanatcagactctaaaacagttaaccaacaagctttctttat

SEQ ID NO: 47624 - DNA, 279 bp, Glycine max
  unsure (1)..(279): unsure at all n locations; Clone ID: 701134306H1
cgcaaattccctcaacactggagtcgctggaaaattcattctgggactcagangagctgaccaagcatgattcaaaatggttgcattgtatcccaagggtgtgnccctctgaattctaggtcacgcaaccatggcatacctagtacctctgcctttcgttgcgcttctctaatgcctcccaaggttgccgtctctaacatccggagcttttggggacataatctggaatgtaaacccttgttgccaagaggaatgacattgacaaacacgtttgctgta

SEQ ID NO: 47625 - DNA, 289 bp, Glycine max
  unsure (1)..(289): unsure at all n locations; Clone ID: 701134307H1
ataccctctatcatttcttccaagaaaagccttcgaggtcccaaaagagtcataatttgcctcanagccatgtcttgctggtctgcagaaaatgccacaaaggcttatctcaacacattgaaaatgggtccccacgccanagaacccgcggttgcagagttcatatcagcactagccgctggcaacactgcacaactaatggttgtggcatgtgctggtgcagcagactcaaccacactagcattggtcactgctgcacaccaaactggtggccatgttgtttgcattg

SEQ ID NO: 47626 - DNA, 284 bp, Glycine max
  unsure (1)..(284): unsure at all n locations; Clone ID: 701134308H1
atcgagccgcgctggtgttggatcagccatcgcttacaacgagcttacaaaagatgcagcattggatccaacggggntggtggcagtagctgtggcacatgcatttgcactgtttgtcnncntctccgtcgnggccaacatctcaggtggccatttgaacccagntgtcacttttggattggccattggaggcaacatcactctcatcactggtttcttatactggattgcccaattgttgggttctatagtcgcatgcctcctcctcaatttgatcaccgtaa

SEQ ID NO: 47627 - DNA, 288 bp, Glycine max
  Clone ID: 701134309H1
aaggcagtcaaatccagtgcacacacagcaactcccagagcgctgctatgctatgacagtgagacatcctctgatggttgttggcactgctgatagaaatcttattgtttacaacttgcaaaaccctcaggttgaattcaagagaattgtttcacccttgaagtatcaaacaaggtgccttgctgcattccctgaccaacaaggtttcttggttggatcaatagaaggaagagttggggtgcatcatttggacgatagtcagcatggtaaaaacttcacttttaaatg

SEQ ID NO: 47628 - DNA, 284 bp, Glycine max
  unsure (1)..(284): unsure at all n locations; Clone ID: 701134310H1
aagccctgcatggggatggtgttgttatcactatatttttccagacagcacttatggngcttttcttaaagttcttcttcgaggatatggataatatggagatatgaaatatcctgtgtttgggatatgcttttgaacatttcaaattctgttttgttgttttttagagttggtaatgttaatatttattttaagaataaaggacatgatcttggtgatctgttatgtgagtaagggaaatacttgtttttatatataggaaccctacgttatgtagtaccgcc

SEQ ID NO: 47629 - DNA, 60 bp, Glycine max
  unsure (1)..(60): unsure at all n locations; Clone ID: 701134311H1
gtctcgctaatncatttcacatatnntgcttcatttctnnanangccaccacaacatagg

SEQ ID NO: 47630 - DNA, 282 bp, Glycine max
  Clone ID: 701134312H1
ggtgatgtccctttctgttctcttcactcttggtcttgcgagagaaagccatgccagagacgaagatttttggcatgctgtttggccaaacactcccattccaagttcattgcgagatcttctaaagcctggccctgcaagtgttgaaatcgatgatcaccctatgcaaattgaagaaacacagtacccgaaaaccttcttctataaagaagaccttcatccaggcaaaacaatgaaagtacaattcagcaagcctccctttcaacaaccatggggtgttgg

SEQ ID NO: 47631 - DNA, 286 bp, Glycine max
  unsure (1)..(286): unsure at all n locations; Clone ID: 701134314H1
gaaaaaataagaanttctcttcttgtaattacgtttggctccaactaattcggatccatcatttaattncaccaccttcccctgtaacccaacacatattacatacatcggattcatngattctttccttctccagattccgattattattaattatcatattattgttattcaatattcatggcgtcgagttttgatcgatggganaaagatcctttctttaacgccgcggaagaagttcaggaatctgcagacaggatggaatctacgtatagaacatggattc

SEQ ID NO: 47632 - DNA, 284 bp, Glycine max
  Clone ID: 701134315H1
cttctattcactctgttacggtgcaacctagcagcctccaaatccaatggcttcagagaagaaactttcgaacccaatgagggagataaaagtgcagaagctcgtcctcaatatctctgttggcgagagtggagatcgtctcaccagagccgccaaggtgttggaacaacttagtggccaaaccccagtgttttccaaagcaaggtacactgttcgttcctttgggattagaagaaatgagaagattgcatgctatgtcactgtcagaggtgacaaggcaatgc

SEQ ID NO: 47633 - DNA, 286 bp, Glycine max
  Clone ID: 701134316H1
gtcgcctacaacaatatatatgcctttcatgctgctcagaagacacccgagagaaatgttgaaaatatgaaaggagtccaatgcaagcgagttgcaagaagtattaattctgttggtctttatgttccagggggaactgctgtattaccctcaacagctctgatgctttcagttcctgcacagattgctggatgtaaaactattgtccttgcaactcctccagctcaggatggtactatatgcaaggaggtagtgtattgtgcaaagaagggtggggtgactcaca

SEQ ID NO: 47634 - DNA, 288 bp, Glycine max
  unsure (1)..(288): unsure at all n locations; Clone ID: 701134317H1
gggcnaaagctacantcnannagaccnctgancacttcanatacanctaacgacacacncatcncgatncgagtgcancgcactcggatttcatccctgantcactcgccgccgtggccaaccacaaaccactgcaaatggactcttcctccgacgaggangacgtccacngtaacctcgtcgacaacaaccaccgcaagncgccgtcccctcnccctcngccncttnaacgtcgngatctctcntcncnctnacgttnccngatgatcatcacgagattaaaaatac

SEQ ID NO: 47635 - DNA, 186 bp, Glycine max
  unsure (1)..(186): unsure at all n locations; Clone ID: 701134318H1
gtnccatcanaaagacaatgcgngatgcatgaggaaatcttcaaataccaggtgagggaactacatagagtatacagtgttcaaaagatccttatggatgacctaagaaaggaaacaaaacaaaagaaattttggacccctatgaatggcatagacataagccattctcatttccttcnacancaa

SEQ ID NO: 47636 - DNA, 193 bp, Glycine max
  unsure (1)..(193): unsure at all n locations; Clone ID: 701134319H1
gtcnctctctntcttctttcttctctcancntttcctctctcaatttnctttcccnttgaattatgatgtaagagaacaaaaactcccccttaaagagataaggtatatataagccacccttcagagacacttngtccatcttctncaatttcttagcagaagatgtggtgcattagattaccttagtctttg

SEQ ID NO: 47637 - DNA, 289 bp, Glycine max
  unsure (1)..(289): unsure at all n locations; Clone ID: 701134320H1
gngttatgatatggaagaanaaagctgcaagancttatgatatggccgcactcaagtattggggaccctcctccccatataaatttccctttggaaaattatcaaaacgaacttgaggaaatgaagaacatgacgagacaagaatatgtagctcatttacgaaggaaaagcagcggattctcaagaggggcctccatgtacagaggagtaacaaggcaccaccaacacggaaggtggcaagctcgaattggaagagtggctggaaacaaagatctatatcttggaacct

SEQ ID NO: 47638 - DNA, 286 bp, Glycine max
  unsure (1)..(286): unsure at all n locations; Clone ID: 701134321H1
gggattcttctcgggaggagaatgtttacntggcgaaattggcggagcaggccgagcgttacgaggagatggttnagttcatggagaaggtagcaaagactgtngaggttgaggagttgacggtggaggagagaaatcttctctctgtggcttacaagaacgtgattggtgcgaggtgggcttcgtggaggatcatatcctccattgagcagaaggaggagagcaggggcaatgaggaccatgtggccattataaaggagtacaggggcaaaattgaggctgaact

SEQ ID NO: 47639 - DNA, 286 bp, Glycine max
  unsure (1)..(286): unsure at all n locations; Clone ID: 701134323H1
gcgaatgggctcattaaatcagttatagtttgtttgatggtatctactcggataaccgtagtaattctagagctaatacgtgcaacaaaccccgacttctggaagggatgcatttattanccccccccnccaacacaggctctncctnntgctttgatgattcatgataactcgtcggatcgcacggcctttgtgccggcgacgcatcattcaaatttctgccctatcaactttcgatggtaggatagtggctaccatggtggtgacgggtgacggagaattaggg

SEQ ID NO: 47640 - DNA, 119 bp, Glycine max
  unsure (1)..(119): unsure at all n locations; Clone ID: 701134324H1
gcaaatccaaggacaaaggtttctgtcaattaactttccntttctatcaaatgtnatncaaagctccctattgaaggagtcttccatgatgcatatgaacnctggaggccaggttggac

SEQ ID NO: 47641 - DNA, 177 bp, Glycine max
  unsure (1)..(177): unsure at all n locations; Clone ID: 701134325H1
gcaagtattcctccaatctcccgtcgatccaccaccaccatgtcgtgggtcctccgatccaccangtctaagctcnnctcttcntcttcctcttcttctctttctagaaccttcccctctctccctcgccctcagatcggagccatctctcccctccccgatcntttccacacaaca

SEQ ID NO: 47642 - DNA, 281 bp, Glycine max
  unsure (1)..(281): unsure at all n locations; Clone ID: 701134326H1
ctctcttatccatggcatcaacgtttctcaccctaccaactcccttcctacacaaaaccaatgccatcagtttctctaacaagagaccctcatttttgcagaggagctctctgaagattcatgcaattaccaaaaaatgggaacccacaaaggttgtgcctcaggctgatagagttcttattcgtttggagganctttcagataaaacagttggtggagttttgctgcctaaatcagctgttaaatttgagcgctatcttgtgggagaaatcctaactgtt

SEQ ID NO: 47643 - DNA, 279 bp, Glycine max
  Clone ID: 701134327H1
ctcgtttcaatcgaaaccaaaacaaaaacatgggcagaaaattcttcgtcggtggcaactggaaatgcaatgggaccactgaggaggtaaagaagattgttactactttgaatgaggctaaagtccctggagaagatgtcgtagaagttgttgtgagccctccttttgtgttccttcctgttgtaaaaagtttgctgcgccctgatttccatgtttcggcacaaaactgttgggttcgcaaaggtggtgcttataccggtgaggttagtgctgaaatgc

SEQ ID NO: 47644 - DNA, 285 bp, Glycine max
  unsure (1)..(285): unsure at all n locations; Clone ID: 701134332H1
ctttagtacagcggaagaacgaagcctcctcgttcttcttcttctgcgctttctctctccctctctagaaccgtaaccgtcgnnnnnnnnnnnnnnnnncctcaaccaganctaaagagtcaccttcttatttttctgaatctcgcggcgttgttctttctgctgctgcggctgtggttccggcggcgatgggacagcaatcgttgatctacagcttcgtcgctcgaggcaccgttatcctcgcggagtacaccgagttcaccggaaacttcaccggcgtggcgg

SEQ ID NO: 47645 - DNA, 293 bp, Glycine max
  Clone ID: 701134333H1
tctgcttggtcttcacgagaatgtaccattagctgttgctcatccccaattcctcccgttcaaatggccacccaagtcccaaactcccctccgtcgtcggaattcgatgctcctcctcccctttcaacgacaaaaccctcatttccatcacacctaacacttccccacctcaatcccaaccctctcgcttgtcgctttcacgcttcccagtttggagaacaggagagcaacaaatacgtggaagcctatgctgtaggacgaaatattcgtatgtctgctaataaagctcggag

SEQ ID NO: 47646 - DNA, 274 bp, Glycine max
  unsure (1)..(274): unsure at all n locations; Clone ID: 701134339H1
gttcctttcaacccatcttccaaacctgcttcatcatcttaagattattatatntattagcatataatattgttgtgccaatccctttgaaagtgtaagttaataagggttccccccnntattggtatgcnataactttgaactgtgtggcagtgtgggaattcattatagcattttgttcgttcttgtgtagaagtttaagtcatttgcaatatcatacgtcttgaaaaatttgtatctggtgtatatgtacgttatgggcgattttgttatt

SEQ ID NO: 47647 - DNA, 113 bp, Glycine max
  unsure (1)..(113): unsure at all n locations; Clone ID: 701134340H1
tctgcacttgcttcttcctatcaaatatctatncaataaaacagtaataaaattatgtgtgctttgttgttttgttttccttcttggaataattaagaccactccaattgtat

SEQ ID NO: 47648 - DNA, 284 bp, Glycine max
  unsure (1)..(284): unsure at all n locations; Clone ID: 701134341H1
gcaaaatccaaaaccaaaaccaaacacaacacagcattcgtcattcaccgccttgtctcgtcttcttctgtctccgaacacggaatctctctgaatcgcgggattaagagaggaatatgcaacagaggcttaagttgcnncaacaacaacaagccctcatgcagcaagctttgcttcaacagcagcagatgtaccaccctggcatgctcgccgctgctatgtctcagatggagcctgttccaagtggaaatttgcctcctggttttgatacgtctgcatgccgt

SEQ ID NO: 47649 - DNA, 277 bp, Glycine max
  Clone ID: 701134343H1
ggagaatatgaagttgtttgttttctttgttgctgcagtagttttggtagcatggccatgccatggcgcaggctaccaaaggttccctctccgaatgaaaactggctatggtgagcgttcttcggaggtaaaatgcgcaagttttaggcttgctgtggaagcacacaacatccgagcctttaaaaccattcctgaagagtgcgttgaaccaacaaaggactacattaatggcgaacaatttagatcagactctaaaacagttaaccaacaagctttc

SEQ ID NO: 47650 - DNA, 276 bp, Glycine max
  unsure (1)..(276): unsure at all n locations; Clone ID: 701134344H1
gctantttatcgtgaggagaatatgaagttgtttgtnttctttgttgctgcagtagttttggtagcatggccatgccatggcgcaggctaccaaaggttccctctccgaatgaaaactggctatggtgagcgttcttcggaggtaaaatgcgcaagttttaggctgctgtggaagcacacaacatccgagctnttaaaaccattcctgnagagtgcgttgaaccaacaaaggactacattaatggcgaacaatttagatcagactctaaaacagtt

SEQ ID NO: 47651 - DNA, 280 bp, Glycine max
  unsure (1)..(280): unsure at all n locations; Clone ID: 701134346H1
acagggtncatactactntnntgnnggcgnctgacaagggcttttggccgtgacattgttgacgcacattacaaagcctgtctttatgctcancatcaacatcagtggaattaatggagaagtgatgcccggtcagtgggaattccaagttggaccttcagttggaatctcagctggtgacgaggtgtgggcagctcgttacatcttggagaggatcactgagattgctggtgtggtggtttccttgatcccaagccaattcagggtgattggaatggtg

SEQ ID NO: 47652 - DNA, 281 bp, Glycine max
  unsure (1)..(281): unsure at all n locations; Clone ID: 701134347H1
tgaaggtctcccccttagcattttcaatcctttttttgtccttcaccatagaactcttcattggcattgcttcagcagcacaagaaccagtgcttgacacctcaggccagangctgagaacaggtgtcaagtactacattctaccagtcttcagaggcagaggtggaggcctaacagtttcaagcagtggcaacaacacatgccccctctttgtggtgcaagagaagcttgaagtctcaaagggcaccccagttcaccttcacaccctacatgccgaaagt

SEQ ID NO: 47653 - DNA, 262 bp, Glycine max
  unsure (1)..(262): unsure at all n locations; Clone ID: 701134348H1
attcattcttaatctttgtgaaaactaatgttcatcgaganttttaaggttgagtgtcctantgtgaagtacaccgagactgagattcagtccgngtacaactacgaaaccaccgaacttgttcacgagaacaggaatggcacctatcagtggattgtcaaacccaaatctgtcaaatacgaatttaaaaccaacatccatgttcctaaattaggggtaatgcttgtgggttggggtggaaacaacggctcaaccctcancg

SEQ ID NO: 47654 - DNA, 285 bp, Glycine max
  unsure (1)..(285): unsure at all n locations; Clone ID: 701134350H1
cttgaactgagatacgattttnttttcagcgtttaggcgaattcncccgagagttgcggctgggaatggacggtgacggcgaggagttgactgcgcaggagaccgctttgtatgaccgtcaaattagggtttggggagctgatgctcaaagaagattaagcaaatctcatgtcttagtctatggaatgncaggaactgtagctgngttttgcaagaatattgttctggcggagtaggtagtctgactttagtagatgaccgggttgccactgaggaagtgctttc

SEQ ID NO: 47655 - DNA, 276 bp, Glycine max
  unsure (1)..(276): unsure at all n locations; Clone ID: 701134351H1
gtcgctgcaaaacccagggcgcgagcccggggcggagcggtcgtcggtgcagatcttggtggtagtagcaaatattcaaatgagaactttgaaggccgaagaggggaaaggttccatgtgaacggcacttgcacatgggttagtcgatcctaagggacgggggaagcccgtctgatagcgctctgtgcgcgtactccgaaagggaatcgggntaaaattcctgaaccgggacgtggcggctgacggcaacgttagggagtccggagacgtcggcgg

SEQ ID NO: 47656 - DNA, 283 bp, Glycine max
  unsure (1)..(283): unsure at all n locations; Clone ID: 701134352H1
ggaacttgaccctgcnggcgtgaattccgaccctactcgtggcgncgaattgctatagcggtgacgaatatgaaggttttcgttaagactctcaaaggcactcacttcgaaatcgaagtgacgccgcaagacacggtttctgaagtgaaaaaaaatatagaaactgttcagggtgcagatgtctatcctgntgcacagcaaatgctaattcatcaagggaaagttcttagggatgctactaccttggaggagantaaagtagccgaaaatactttcttgtant

SEQ ID NO: 47657 - DNA, 282 bp, Glycine max
  unsure (1)..(282): unsure at all n locations; Clone ID: 701134353H1
ttcactcttggtcttgcgagagaaagccatgccaganacgaagatttttggcatgctgtttggccaaacactcccattccaagttcattnngagatcttctaaagccnggccctgcaagtgttgaaatcgatgatcaccctatgcaaattgaagaaacacagtacccgaaaaccttcttctataaagaagaccttcatccaggcaaaacaatgaaagtacaattcagcaagcctccctttcaacaaccatggggtgttggtacatggttaaaggaaattaaa

SEQ ID NO: 47658 - DNA, 115 bp, Glycine max
  unsure (1)..(115): unsure at all n locations; Clone ID: 701134356H1
ancaaattttaaaaggacttgcctatatctcaccagttcagctagatacctcccgggaccagatgatatgctagttttggacattgcatatncaatctataaacaatttgaagaa

SEQ ID NO: 47659 - DNA, 276 bp, Glycine max
  unsure (1)..(276): unsure at all n locations; Clone ID: 701134358H1
gggcgtctgtgtatgaatgtgtttgtgaganaatggaagctgcgatgggactgatgcggaggattcctccgaaacacacagaaacagctctgtcagcgcttctgagccttatgcctgacaactcctccgatctcctctctcaagtcgatcagcccctccaggttctgtgcgatgtggaatgcggcaaggagttcattttgtgcgaatacaatagagatgccgactcttacagatcaccttggtccaataaataccatccaccattagaagatgggt

SEQ ID NO: 47660 - DNA, 277 bp, Glycine max
  unsure (1)..(277): unsure at all n locations; Clone ID: 701134361H1
tcagaaaccctaatcagtgtttgggatttcagatanagaaatttnaacagatgaagggtctcttcaagtctaagcctcgcactcctgcagatgtagtgcgccagaccagagatcttctgctctttgttgatcgcagccccgaaacccgcgaaagcaaacgtgaggngaagatgtccgagctatttaaaaatatcagggagctaaagtcaatcctgtatggaaatagtgaatctgaaccagtctcagaagcttgtgcgcagttgactcaggagttctt

SEQ ID NO: 47661 - DNA, 279 bp, Glycine max
  Clone ID: 701134363H1
gcaaggtcctcgtcaacattgagcaacagagtcctgatattgctcaaggtgtgcacggccaccttcacaaagaggcctgaggagattggtgctggtgaccaaggtcatatgttcggctatgccactgacgagactcccgagctcatgcccttgagccatgtccttgccacgaagctcggtgccaagctcaccgaggttcggaagaacgggacatgcccttggctgagacctgatggcaagacccaagtcatgttgagtatacaatgacaagggtgccat

SEQ ID NO: 47662 - DNA, 222 bp, Glycine max
  Clone ID: 701134364H1
tcttagctccttcttccttcaattgcaggggacaggtttcgttgcctgtgaagagcgtgagcatttgcaaatgcgttgccacacccgaagctgagactgcctacaagacaggggtcaatcgcaatccaaatatggggaaacttcaagctggctatctctttcccgagattgctagaagaaggtctgcgcacttgctgaagtaccctgatgctaaagtaataa

SEQ ID NO: 47663 - DNA, 286 bp, Glycine max
  Clone ID: 701134365H1
ggggcgaaagctacaatctagaacagttctgaagtctcgacacatttcagtagataacattgtttggtttgccatcagtgaacctctacagagaatggttgtttgagcatgttacatacaattgaaagggcatctagccgagtcggtgcataacctaatcatcattttcaacagtaccatctttgaggtgaaaatgtttttctctcttctggaactctgtcaaacctttcccacttcccgtcacaccaaccttccctgaggatcatcaggagatttaaaaatactc

SEQ ID NO: 47664 - DNA, 284 bp, Glycine max
  Clone ID: 701134366H1
ctcgtgcctctagggttatcatatctccatttccatttcctctctctcagtttccaagaatcttaagctatgggaaagtcttacccaaccgtgagcgctgattaccagaaggccgttgagaaggcgaagaagaagctcagaggcttcatcgctgagaagagatgcgctcctctaatgctccgtttgacatggcactctgctggaacttacgacgtgagctcgaagaccggtggtcccttcggaaccataaagcacccctccgaactcgctcaggcgctaacaac

SEQ ID NO: 47665 - DNA, 276 bp, Glycine max
  unsure (1)..(276): unsure at all n locations; Clone ID: 701134367H1
ttcaaagcctttcctatgcctctcccttcgcttactgttgcaccttcctcctaaatgattactcccgctcggcgtgcatcgccgccgattgagctnnnnnnnnnnnnnnnnnnnnnnnntaaaactcaccgtagcgcaccacagccaaacgcgatctcaacgatgaccagcttctgaaattccaacttcgcccttcatcttcgtatacttttttatttccggtgaggtgagttccatgcctagtcccaagagcagccgcagcggccagatcgagag

SEQ ID NO: 47666 - DNA, 283 bp, Glycine max
  unsure (1)..(283): unsure at all n locations; Clone ID: 701134368H1
gagggtcgccacgtttagcaacaaccaaaccctctctactctttcttcttctcttcgctagggttttagcttcttcctcttcacttcgttcttctggcctctacaatgagcaacgacaaggacaccttcaacgtcgctgatctcacttccgctctcaacgaggacnatagagcagaccttgtcaatgctctcaagagcaagatacagagtttggctggacagcattctgatattctagagtctctgtcgcccaatgtcaggaagcgtgtggaggttcttagag

SEQ ID NO: 47667 - DNA, 282 bp, Glycine max
  unsure (1)..(282): unsure at all n locations; Clone ID: 701134369H1
tttcacctcttgttttccccaatccttttcgcctttgtctgcgaanngcgtcgttcgatcaggcacctcccggcgatgtcaaatccggtgacaaaatcttcaggaccaagtgcgctcagtgccacaccgtcgaaatnaggtgccggtcacaagcaaggacccaatctgaatggtttgtttggaaggcaatctggcacaactcccggatattcctactcttcagctaacaagaacatggctgtgacttgggaagaaaagacactatacgattacttgcttaac

SEQ ID NO: 47668 - DNA, 258 bp, Glycine max
  unsure (1)..(258): unsure at all n locations; Clone ID: 701134371H1
atcctctatatatagttctctggantttaaggtctcatccanttaagcacaaatgggtagcaagagttacttcaaggctttgattatttgccttacccncnccnattggatcanctcaagctcaattgcagnttggtttctatgccaaaagttgtccaaaggctgagcaaataattcngaagtangttgttgagcatatccacaagctccatcactagcagctgctctcataagattgcattccatgattgttttgtc

SEQ ID NO: 47669 - DNA, 276 bp, Glycine max
  Clone ID: 701134374H1
agatattgcacgtgcaaggtgggcaatgcgggaaccaaatcggttccaagttctgggaagtgatatgcgacgaacacggcatcgaccccaccggaaagtacaccggcgacgaggctccgatctccaactggagaggatcaacgtctactacaatgaggcctccggcggaaggtacgttccccgggccgtcctcatggatctggagcccggcaccatggacagcatcagatccggcccatacggcaagatcttcaggcccgacaacttcgtctttgg

SEQ ID NO: 47670 - DNA, 266 bp, Glycine max
  unsure (1)..(266): unsure at all n locations; Clone ID: 701134375H1
caaaaacatcgaaagagagaggcatggccgagcaaaccttcatcatgatcaagncagatggcgttcaaagaggccttattggcgagattattagcagatttgagaggaagggtttttacttgaaagggttgaaactcgttactgtggaccgtccttttgctgagaagcactatgctgatttgtctgcaaagcctttctttagtggtttggtggattacattgtctctggccctgttgttgccatgatctgggagggtaagaatgtt

SEQ ID NO: 47671 - DNA, 272 bp, Glycine max
  unsure (1)..(272): unsure at all n locations; Clone ID: 701134376H1
caaattgccttctcttcntgttcctctccctcancctactntctctctcncctccntcgcattacaacttccaaacccaaaccttgcccctccactcnctcccccacccacccgcaatctnatggcccgaatccgaatccgaacccgacccagaagaagaagctctctcacttcacctccaccacatagacgctcnctcctccaacaaaaccntnntngcagctcttccagctcaggctcnaatgcgacgccaagagagttgaaggtgtagt

SEQ ID NO: 47672 - DNA, 274 bp, Glycine max
  unsure (1)..(274): unsure at all n locations; Clone ID: 701134377H1
tttcctatgccattggtgtccctgagcccttgncagtgtttgtggacacttatggaactgggaagattcctgacaaggagattcttcaaattgtgaaggagaatttcgacttcagacctggaatgatcaccattaacttggaccttaagaggggtggccataggttcctcaagacagctgcttatggacactttggaagggatgaccctgacttcacctgggaagttgtgaagccactcaagtctgagaagcctcaagcntaagattgttgtga

SEQ ID NO: 47673 - DNA, 280 bp, Glycine max
  unsure (1)..(280): unsure at all n locations; Clone ID: 701134378H1
gagaacagcnacnacatgnatggnnggnnagttccgatcgatntngganggnctcnncgaggaagggtgtgncgaagaancggggnntcanatctgagaagacngcgtcgactaagtgtggnacaagtganngctttggagaagaactttgaggttgaaancaagcttgaacctgagaggnaggtcaagcttgcccaagancttgggttgcagcctagcacaagtagccgtttggttccanaaccgccgagccncatggaaaaccagacantggagagag

SEQ ID NO: 47674 - DNA, 280 bp, Glycine max
  unsure (1)..(280): unsure at all n locations; Clone ID: 701134379H1
ggcgtgggcgagggatatctatcttnattttcgtcgtcgttcatttttttattttttttttctgttttnccattcgcttcttctctncagaaaagctcgccaatcgatcttgctctcttctacgcttttcgaattcnntccattccattatggacgnagattagattcacgttcacattcacttctcttcgtttgcttcaaccactctgctctgctactgctctactctgagatccgatcgcattttcattcagaaaggaaacncgtgtgactgatttat

SEQ ID NO: 47675 - DNA, 281 bp, Glycine max
  unsure (1)..(281): unsure at all n locations; Clone ID: 701134380H1
cccagccctctctctttcttgggcatggccaatctactgggctgtccaaggttgcatccttaactggagtttgggtcattgcccatgagtgtggccaccatgcattcagtgactaccagttgcttgatgatattgttggccttgtcctccactccggtctcctagtcccatacttttcatggaaatacagccatcgncgtcaccactccaacactggttctcttgagcgggatgaagtatttgtgccaaagcagaagtcctgtatcaagtggtatctaaat

SEQ ID NO: 47676 - DNA, 273 bp, Glycine max
  unsure (1)..(273): unsure at all n locations; Clone ID: 701134381H1
ctgaatttctcgagcgaacttcgcccagttctagggttccccactgccatgtaccnggccgaattaacctccgaacaggttctgaggagggacatcccatgggagacctacatgtccaccaagctcatctcagggacgagccttcagctcttaaggcgctacgatcaccgaccagaaagtcacagagcacagttgctcgatgatgatggtccctcttatgttcgcgtgtttgttcgtgttttgcgtgactttcnaggnaanaacgnggngtnt

SEQ ID NO: 47677 - DNA, 282 bp, Glycine max
  Clone ID: 701134382H1
aaaaaacaaggttttagccatggcatcgaagcggatcttgaaggaactcaaggatctccaaaaggatcctcctacctcatgcagcgccggtcctgttgctgaagacatgtttcactggcaagcaacaattatgggtcctccagacagtccttatgctggaggtgttttcctagtcactattcatttccctccagattatccctttaagccacccaaggttgcattcaggacgaaggtatttcacccaaatataaatagcaatggaagcattgccttgacata

SEQ ID NO: 47678 - DNA, 279 bp, Glycine max
  unsure (1)..(279): unsure at all n locations; Clone ID: 701134383H1
gcgcaacgccctcgacctattctcaaactttaaataggtaggacggtgcggctgctctgttgagccgcgccanngaatcgagagctccaagtgggccatttttggtaagcagaactggcgatgcgggatgaaccggaagctgggttacggtgcccaactgcgcgctaacctagaccccacaaagggtgttggtcgattaagacagcaggacggtggtcatggaagtcgaaatccgctaaggagtgtgtaacaactcacctgccgaatcaatagccccga

SEQ ID NO: 47679 - DNA, 280 bp, Glycine max
  unsure (1)..(280): unsure at all n locations; Clone ID: 701134384H1
cagaatccaatttgtgacactaaatctaagttactatgactgcgcagacccaagaggagcttcttgcgcaacacctcgaacagcaaaagatccatgatgatgaacctgtcgtcgagnnnnnnnnnnnnnnnnnnnnnnnnnnnnnnnnnnnnnnnnnnnnnnnngaccatgacgaaggactagaaggtgatgcatctggtaggtcgaagcagaccagaagtgaaaagaagagtcgcaaggcaatgcttaaacttggaatgaaacctgtcacaggtgtcag

SEQ ID NO: 47680 - DNA, 78 bp, Glycine max
  unsure (1)..(78): unsure at all n locations; Clone ID: 701134385H1
agtcnnaccacggcttcttaaatttttanaaccanatnacttcccccanctcacccggccaccatngcganncatgtt

SEQ ID NO: 47681 - DNA, 198 bp, Glycine max
  unsure (1)..(198): unsure at all n locations; Clone ID: 701134386H1
cccaagatgtcgagcgccgatcccgagcaccgagaagacncnnnngcacccgccgtcggcgacgacgaggacaccggagcacacgtcgctcccatcgtcaagctcgaggaggttgctgtcaccaccggcgaggaggacgaagatgcaatcctagatctcaaatcgaagctttaccggttcgacaaggatgggaaccag

SEQ ID NO: 47682 - DNA, 279 bp, Glycine max
  unsure (1)..(279): unsure at all n locations; Clone ID: 701134387H1
gnggtntggagactagngaatcttgggngacacttggatttgagtgaatcagtgaacaaggntgngccagttgggtcaatcaagttgaaggtagnttcagaggtttctnnagcacccnccactgggtngtgctgtnnttgctcttgaatctaccattatttngcatggttctntctacttcctctttcacctcccaatacccacaacttagtatttngactatactcacttttgtttgtagggatgcnatatccccaaaatttggnaaanggcaaaaga

SEQ ID NO: 47683 - DNA, 277 bp, Glycine max
  unsure (1)..(277): unsure at all n locations; Clone ID: 701134389H1
ttcaaattctcagtgaaaccaattcagctgagtccaaatcccaaatcngaatcaaaatccgaagtgagatttgcgatggagaggcttcagcgaatgtttgcaggtgnaggtggagcgctagggcagnctcccccagattcnccaantnctcgattgccnccngagcaggtctacatgtcctcactgggtctnctcaagatggttaagcacngaagggctngggttncanngaccncccgggcccnatgcttggngnnttcntggacncncccccccc

SEQ ID NO: 47684 - DNA, 273 bp, Glycine max
  Clone ID: 701134390H1
cctttctcccacaaactccgattcttcttgtaaacagcggtgccaggtgttaatctagaagttgatataggatgggggcaatgatgtcgaggttctggttcatgttattccctgcaaaagagtataagattgttgttgttggattggataacgctggaaaaaccactaccctttataaattgcatctgggtgaggttgtaacaaccaatcctactgttggtagcaacgtcgaagagctcgtctacaagaatatacgatttgaggtctgggatc

SEQ ID NO: 47685 - DNA, 275 bp, Glycine max
  unsure (1)..(275): unsure at all n locations; Clone ID: 701134392H1
ctcaccctcctcttcacacattttctgtgcgctctaacaaacattctncgttcacactttcagattgtgtgaagatgggggcgggtggccgaactgatgttcctcctgccaacaggaagtcagaggttgaccctttgaagcgggtgccatntgaaaaacctccatttagtctcagccaaatcaagaaggtcattccacctcactgtttccagcgttctgttttccgctcattctcctatgttgtttacgacctcaccatagccttctgcctctat

SEQ ID NO: 47686 - DNA, 277 bp, Glycine max
  Clone ID: 701134393H1
gtccaaagcttctacccttcttcatacccttcttcatactcttctccctcaaaactaatcatcacacccttttaaaaaaattcaacagctttacttcatgcagacaacgttaacaacaccaaacccgcaggaacattcacaaaagaatactacatcaacatcatcttaagcagcagcaacaacaacctcggaagcaattccaatccctcacaacctccaacatcacccaaaacaccaaacaacaaaagcatgaaaattctaataatagcctccgctg

SEQ ID NO: 47687 - DNA, 271 bp, Glycine max
  unsure (1)..(271): unsure at all n locations; Clone ID: 701134394H1
aaatcactggtattaaactttctaatttttcttctttcccgttatcactgatggnttttcctgtgattattgtgtcagattatgataanatgttttttcgaatgtattttgtnttttggcatcagtttgtggaaaaattagggcctgattgcatactaaatagtttgataattattctctccagtctctagtctctagtactgcttgtcttttgtaatgtttctgtgttttggaggtttatgtggagtgnnggcagaggatgaaaggcgta

SEQ ID NO: 47688 - DNA, 278 bp, Glycine max
  Clone ID: 701134395H1
caacgatgatgagtcttcagagtcatcatcaccatctttggcaccaaagttggttcctttctttaacagatcagtcatcagaaccccaagggagttgggacttaacttcccaaccaattggaccgaggccttaaccaaattgttccctactggaaacagcgacgggagatgcttgaagctactacctttccctccaagactcgaggatgaggttcgagccaggttcgtgctcacaggagcagatttggagaagttaaggaaaggtgtcttgtccaaat

SEQ ID NO: 47689 - DNA, 256 bp, Glycine max
  Clone ID: 701134396H1
gcatacctgatgtaatacacaagtatggccaacccatgccactctctcaactcattgcttcacttccaattcacccttctaaggctgcttcattttccgctgatgcaaattttgactcattccggtttcttctctcaacacaataatgccaccgaaaattatgagcaagaagaagtgagttatgtgctaactgatgcatctaaactactccttaaggaccatcactttagtatgattccttgccacaagtcatact

SEQ ID NO: 47690 - DNA, 267 bp, Glycine max
  unsure (1)..(267): unsure at all n locations; Clone ID: 701134401H1
gcctgtgctgtgctctgaggggccatagtttgggaccctttgaaccctaatctccacccaaacccattttcccgggaaattgccttggaaaagaaagagcgaagaggaaaatgcagaatcacagnnnnnnnnnnnnnnnnnnnnnnnnnnnnnnagctcttatgcagcaagctcttctccaacaacagtnnctctaccaccctggcctccttgctcctcctcagattgaaccatatccaagtggaaatttgcctcctggttttgatc

SEQ ID NO: 47691 - DNA, 308 bp, Glycine max
  unsure (1)..(308): unsure at all n locations; Clone ID: 701134402H1
aagatgtttcctttcgggcaaaagggtcaaaagataaaggggactatggtggttatgcagaagaatgtgttggatatcaacagcattcanccagtgttggagggatcgttgaaccaagggcttagggcttcataggcagtgncagtcgatggcacttaacttttgncaggccaaccaaaattctnccatnccagttngattnagtggctaaccaagggctggatgggtgnggaaaagcgacaaaaatttgggaaaagnagntaacaaaattntnnagcagnganaaggatnaancatttaacccaaac

SEQ ID NO: 47692 - DNA, 119 bp, Glycine max
  unsure (1)..(119): unsure at all n locations; Clone ID: 701134403H1
aacttccaattcacaaaaccgtcactatttaccaacccacttcacttcccccactccaacaacagtcgattccattccacaatgcattttccnncactttcccagcnaccaaacagcnc

SEQ ID NO: 47693 - DNA, 239 bp, Glycine max
  unsure (1)..(239): unsure at all n locations; Clone ID: 701134404H1
cttgtgcacacggtaagggcaaacgcagcaacgcaatgacgtgagtgagttggtttttacntttggttctcctgagctgtgtttattctctttctctgccctctcatcttcgagctccgatggcgagcctgtggcgcgcggcaaccggcatgacggacaacgccaccgattacgacggcgtcgagttctggtcgaaccccgagcggaccggctggctcaccaagcagggcgagtacatc

SEQ ID NO: 47694 - DNA, 258 bp, Glycine max
  unsure (1)..(258): unsure at all n locations; Clone ID: 701134405H1
cttcatttcactctttctcttctcacattgcttccttcctttcanttcttcaaatggaaaaaaaggtccttttttttgtctccattctcttattcattgctctgctatttcatggaggaaaggttttagctttcaagagccaagacggatcagaggaatggggatacgttcaagtcagacccaaagcgcacatgttttggtggcattataaaagtccatatagagtggaagatccttctaagccgtggccaattgttc

SEQ ID NO: 47695 - DNA, 257 bp, Glycine max
  unsure (1)..(257): unsure at all n locations; Clone ID: 701134406H1
gtcctgcttggggcaaatactactactttaattactggaaaaaaaccacctcaaccaacacaaacatcaaccttaaaatgattatccctggtcctagaggctaccctttcattgggagtatgagtctcatgacatccctcgcacaccaccgtattgctgcngcgggggaagcatgcaacgccaccaggctcatggctttttccatgggtgacacacgcgccatagtaacgtgcaaccccgatgtcgctaaagagatt

SEQ ID NO: 47696 - DNA, 256 bp, Glycine max
  Clone ID: 701134407H1
taacctttctggctgtgttaatatgcgtttcagcactgtcactgagtccttctgttgcgggggaagggcaaaataatggccttgttatgaacttctacaaggaatcatgccctcaggctgaagacatcatcacagaacaagtcaagcttctctacaagcgccacaagaacactgctttctcctggctcaggaacatcttccatgactgtgctgttcagagttgtgatgcttcactgttgctggactccacaagaag

SEQ ID NO: 47697 - DNA, 257 bp, Glycine max
  unsure (1)..(257): unsure at all n locations; Clone ID: 701134408H1
caaaattaaattgttttcattatcacttgaacatgtacaacaaaactacatactccttttttatgtatcagtatctttggggaaaccaattcaacgatgctataagctagtttatcgtgaggagaatatgaagttgtttgtnttctttgttgctgcagtagttttggtagcatggccatgccatggcgcaggctaccaaaggttccctctccgaatganaactggctatggtgagcgttcttcggaggtaaaatgcg

SEQ ID NO: 47698 - DNA, 256 bp, Glycine max
  unsure (1)..(256): unsure at all n locations; Clone ID: 701134412H1
ggcaatgcnnaaggnntcancgctgacnggntcgtcgngttcagangcaggnggccttcgnagacgtctatcnacacngtncgtgangatccaagacagcccaacatggncattattccggcncccaantccgnctcatccangggtgactatgtaaggncatgctgggcnnggatcctctccagnaagctcatctttgccacagatctcgaaatgaacgaccagaanactaagctccttggctccccnaacaggg

SEQ ID NO: 47699 - DNA, 251 bp, Glycine max
  Clone ID: 701134413H1
gcaagtttcctatgccattggtgtccctgagcccttgtcagtgtttgtggacacttatggaactgggaagattcctgacaaggagattctgcaaattgtgaaggagaatttcgacttcagacctggaatgatcaccattaacttggaccttaagaggggtggtcataggttcctcaagacagctgcttatggacactttggaagggatgatgcagacttcacctgggaagttgtgaagccactcaagtcag

SEQ ID NO: 47700 - DNA, 251 bp, Glycine max
  Clone ID: 701134414H1
tcccttttccccttttgtgctcgtagttgaccgtcgaataaaatctaatcccccaaataaataaagaagcgaaaccaaaccaaaccatcgagtgcgttgcacccccaccgtaagcacagctatgtcgttgcgcaggcgaaccttgctctcggtcattgttctcggcgatagggggttggaaagacctcgttgatgaatcaatacgtgcacaagaagtttagtcagcaatataaggctaccattggggctga

SEQ ID NO: 47701 - DNA, 255 bp, Glycine max
  unsure (1)..(255): unsure at all n locations; Clone ID: 701134415H1
gggccgcatcgagaaccnggcctccctncgaaaccgacatagccctcctcaagnnctcccacgtcttcaacgccgncggcnccacgggccgncccaacgtcgactggtgcgagtcccacaaagtcgagaccatccgaaccaacgtcgtcggaaccctcactctcgccgacgtctgccgcgaccnggcctcattctcatcaactacgccacnggttgcattttcgagtacgactccgatcaccccctcggatccgg

SEQ ID NO: 47702 - DNA, 255 bp, Glycine max
  unsure (1)..(255): unsure at all n locations; Clone ID: 701134416H1
aggtgancgngccaaaatggtgaagataactcttggtactttcgatgactcttttggtgttgcctctcttaaggctatttggcagagttccatgcaactctgatttnccgtgttcgctggtgttggttcagccatcgcttacaacgagcttacaaaagatgcagccttggatccaacggggctggtggcagtagctgtggcccatgcatttgcactgtttgtaggtgtctccgtcgcagccaacatctcgggtgg

SEQ ID NO: 47703 - DNA, 257 bp, Glycine max
  unsure (1)..(257): unsure at all n locations; Clone ID: 701134420H1
agctcgnaggtgaacagtgagtgagtgagttattcagaacccaggatttggcgaaagtgaagcgatgagcagtgataggnatattggggttgccttggacttttccaaaggaagcaaaatcgctctcaaatgggctattgacaatcttctccgcaacggtgacatncctctacatcgtccncatcaagccttccgncagaagtgaattccgaaatcttctctggtccaccactggttcacctctgattccgttgtcg

SEQ ID NO: 47704 - DNA, 256 bp, Glycine max
  unsure (1)..(256): unsure at all n locations; Clone ID: 701134424H1
cccctctcaaaagttgccattcataaaacaacacttgctcttgatgaacgtgcttatatcaaagccactccctagtgtccttggcttgaagggacaaaatacagaatgggttacactgcaatatagtaatccaaaacccacaatagatgattggnttggngtgttttctcctgcaaacttcaatgcttctacctgccctgcagaanacatatgggtcaatcccccatttctgtgttctgcgcctatcaagtatcaa

SEQ ID NO: 47705 - DNA, 236 bp, Glycine max
  unsure (1)..(236): unsure at all n locations; Clone ID: 701134425H1
aaagacagtcatggcgtcgtttcttcaatggtttctggatccgaagaagaactggttcgccgcttcagcacatgaaatccctctccagacggcttcgcaaatacgggctccgatatgacgatttgtacgatccttactacgatctagatgtgaaggaggcgctgantcggcttccgaaagangtggtggacgctcgctcacgcncgtcttaaacgcgccatcgatctttccatgaa

SEQ ID NO: 47706 - DNA, 252 bp, Glycine max
  unsure (1)..(252): unsure at all n locations; Clone ID: 701134429H1
gggatttcgtcancatgagtctcttcggncnttggnaacnctnanccaaannacatttcgtccaaaaaagagtgctccatctggangtaagggtgctcaacttcaaaaacacatcgatgccncgttgggtagtgggaacttgagggaggctgttaaactgcctcccggtgaagatattaatgaatggctagctgtaaacaccgtggacttctttaatcaagtgaatatcctgtttggtactctaagaaattc

SEQ ID NO: 47707 - DNA, 243 bp, Glycine max
  unsure (1)..(243): unsure at all n locations; Clone ID: 701134430H1
aattgacgcaattccacaaaagcggataagcncggtgtctggtttgaaagtgcnataaaaaaaataaaaaagtctggcatgatgggcatgttcccttttgagcaaagtttgtgacttgaagagagaagaaaaaggatgagcgcaggcactgatgacgagccagaaaggagaagaagattgaaagcgtcgaatagtggtgggttgaagagctttcagcgcgatctgatcgctggggcggtgatg

SEQ ID NO: 47708 - DNA, 254 bp, Glycine max
  unsure (1)..(254): unsure at all n locations; Clone ID: 701134431H1
gcggtaccnntgctctccaagaggatcgngaagaagcgcgtcaagaagtttatacgcncccagagtgatcgcaagatctccgtcaagccaagctggcgcagacccaagggtantgattctcgtgtcaggagaaagttcaaaggatgcactttgatgcccaacattggttatggctcagacaagaaaacccgccattatctaccaaatggtttcaagaaatttgtcncgcacaatgtgaaagacctggaacttct

SEQ ID NO: 47709 - DNA, 255 bp, Glycine max
  unsure (1)..(255): unsure at all n locations; Clone ID: 701134432H1
tgagcgtcgaaaaccccctcgccacaacagtctcggncctaaaacggattatccaaacccaattgggaatcccggttcacaaccaaaccctctccaccaaccagaacctcctcttggccaaatccctcgaagatctcctccgattcaccgacatgtccaacctcgatgcgtctctctcgtctcttaacctcggccacggctccatcgtcttcttggcctacgagggcgagcggcgcgtggcgggccccgccttca

SEQ ID NO: 47710 - DNA, 256 bp, Glycine max
  unsure (1)..(256): unsure at all n locations; Clone ID: 701134434H1
gcccggtttgtcggtttgagctgcccacagatgatccggactatgagcaggggaaggtcaatagggctgctcgtggtctgttggagcttgcggcagcacggatgcaattttgacttgtctgttgttgcttcaggttatacactcggtcttatgtatatagcagtttgctntgtctcatacaacnnnnnnnnnnnnnnngaacaaatcttttgtaagtagttttcgtgttgtggtggttttggaataagtttcatac

SEQ ID NO: 47711 - DNA, 233 bp, Glycine max
  Clone ID: 701134435H1
ggagactctcacagttgagcccatcaatgagtatgtccaaagctgtgacattgttgcattcaacaaaatctaagttttcatgttgaatttcagtcattttgaagcagccaattagtttgtttttctttctcatccacttccttctaacttattcatgtctagtttatgtttcagtgatggttttgttactagaattctgagaagtaaaaaatatatattttgaatatttatgt

SEQ ID NO: 47712 - DNA, 252 bp, Glycine max
  unsure (1)..(252): unsure at all n locations; Clone ID: 701134436H1
cgctcacataaaccctaccctcaatttccattcgcaatttttgttgctgctgagcacggaatcggagatgaaagtgaagatcttgcaatggcatgctattgcttctcggacttgggatgcacaggacgaaacgtgtgggatttgtaggatggcctttgatggntgttgtcctgactgtaaacttcctggagacgactgcccgctgatttggggtgtatgcaatcatgcgnttcatancactgtatcctgaaa

SEQ ID NO: 47713 - DNA, 257 bp, Glycine max
  unsure (1)..(257): unsure at all n locations; Clone ID: 701134439H1
gcagcctccaattcgtgccactcttcttcaaaatggccgttacctttctcnaatctccacacagaatcaggtctcnaagtccctacgaacgacttcctctctgggnaggtctacgtttctggggatcagttcacaaaggacgacatcnaagtgtatggtgctgttttggagaagccaggtggttcttttcccaatgctgccaagtggtacgaggtggttctcancncancttggtgngancntccccggnaatgcnc

SEQ ID NO: 47714 - DNA, 252 bp, Glycine max
  unsure (1)..(252): unsure at all n locations; Clone ID: 701134440H1
cagggtggctttgctgaaaccatgatcgttgagcaaaagtttgtggtgaagattccagagggtttggcgccagagcaagtngcaccattactgtgtgcgggtgtgacngtgtacagtccactggtacactttgggctgaaagagagtgggctaagaggtggaatattggggcttggaggagtgggacacatgggggtgaagatagcaaaggcactgggtcatcatgtgnacngtgataagcncttctgacaa

SEQ ID NO: 47715 - DNA, 249 bp, Glycine max
  unsure (1)..(249): unsure at all n locations; Clone ID: 701134441H1
ttaagcnaggnnttaatagcttaacncgggaccattcgctaatnaagaatgatctcggcagctacaagagtccaaatcttcgnnggtcgttgaccaatgaaacaganccatggtgacngatatgaactggttgcntatcgtaatgaaactcagggtagttttggagcatcaaagagtcaatctactggtccttggaatcaggattcaagagtaactaaggtggaaacatcaaatggggaatctagtgca

SEQ ID NO: 47716 - DNA, 248 bp, Glycine max
  unsure (1)..(248): unsure at all n locations; Clone ID: 701134443H1
cncaatccntaaaccctctttcttcgtttcagttcaatctctctctgtctattcccaattccgcaagtttcnctgcncaatcactgcatatacctattcatttggccacgaacttcacattggggtggtagcagtaactttctcgcaccatctgattcaaaatttgcatctttattagtttatttgcaactctattgatgaatctggttggaattttgaaatttaaacaagtttttttttatgtttcc

SEQ ID NO: 47717 - DNA, 247 bp, Glycine max
  unsure (1)..(247): unsure at all n locations; Clone ID: 701134445H1
gcccattgaagaatgcattagagctgggtgttatgcagccaatgttatcatccaaaggcctggctgcacatacccaccgacgcctgattttcattgagtgattcctctttttctgttactgctatgaatttntttctttttatcattgagaaggatttnnatagccacactctaactggtgtggggttttttaaccccccggctagggnaaacagcgtgaaaaagttgcagcaagagataaaacttg

SEQ ID NO: 47718 - DNA, 76 bp, Glycine max
  unsure (1)..(76): unsure at all n locations; Clone ID: 701134446H1
ctggantagcggtttagctgnangntccagtngaaatggntctctttgntaccattttggngttnttgggatttgg

SEQ ID NO: 47719 - DNA, 251 bp, Glycine max
  unsure (1)..(251): unsure at all n locations; Clone ID: 701134448H1
ccngaatccaatttgtgacactaaatctaagttactatgactgcgcagacccaagaggagcttcttgcgcaacacctcgaacagcaaaagatccatgatgatgaacctgtcgtcnnnnnnnnnnnnnnnnnnnnnnnnnnnnnnnnnnnnnnnnnnnnnnnnnnngaccatgacgaaggactagaaggtgatgcatctggtaggtcgaagcagaccagaagtgaaaagaagagtcgcaaggcaatgcttaa

SEQ ID NO: 47720 - DNA, 238 bp, Glycine max
  unsure (1)..(238): unsure at all n locations; Clone ID: 701134449H1
aaaaggacattcattcatctatgncnacccttattgctcccngcaaccactctccccaagacagatgctgaagctctcagaaaggcttttgaaggatggggaactgatgagaacactgtcatagtaattttgggtcatagaactgtgtatcagaggcagcaaatcagaagagtttatgaggaaatttaccaggaggatcttgtgaagcgcctagagtctgagatcaaaggagacttga

SEQ ID NO: 47721 - DNA, 255 bp, Glycine max
  unsure (1)..(255): unsure at all n locations; Clone ID: 701134450H1
gnaccatctcggatctgtgtccctcctttgagtgaaaaaggttcaatctttggtctctggggctgttggggttccgtcattnnnnnnnnnnnnnnnnnnnggtattattgttattataatcatgtacccgaggctcatacacccccacgatgggattgtgacgcaggatgagttgcagggtggtgctgcttccaacctctctcacgctcacaagggtgaccctgtctcgttttaacggctgatcccaagcctcgt

SEQ ID NO: 47722 - DNA, 254 bp, Glycine max
  unsure (1)..(254): unsure at all n locations; Clone ID: 701134451H1
gttgggactcagaaggccccacttcacccacggcttcgcggacttcgccccggatccgacccgagacgccgtcccgggtcgcgacccggccagcattgcccagaagaagcgccgcgancgnctcggncgaggaggaggnatccgctaanggcgcctccacnaccaatgccgtgaatgaggggggtggtgttacngntgggaaacgggtcaagacgngtnnnagtgggaaanntnaagngnanccagttcaggaa

SEQ ID NO: 47723 - DNA, 253 bp, Glycine max
  Clone ID: 701134452H1
ctacctctgcatcgtcccacgtggcagctgagttgagatatcaagcagaagaagcactctggttctgaggcgcaacctcgtcccaacaaccatggcggtccctgctacatcctcagcccctgtccttcgacccatccgcaccaatcactccttctcttcccctttccgctctctcccctctcccgccgccagaaaacccctaaccgtcttcgccatggcccccaaaaagaaggtgaacaagtacaatgataag

SEQ ID NO: 47724 - DNA, 255 bp, Glycine max
  unsure (1)..(255): unsure at all n locations; Clone ID: 701134453H1
taaaatanactctcagctgtnangganttcnctaagagaaatgntccaagcnngaccnagatnaccagaccagatatcacgcaggcangngctttgcttgattgaccattcatctccatcagntnaggtntggtttcgtgttaatgagcaactacnnattaatttacagaagtcgttacctgacagaccacctgaatcgccctcatctaacaatcatganggtgtgtcaatggnnctcaaacagatcacctccaa

SEQ ID NO: 47725 - DNA, 251 bp, Glycine max
  unsure (1)..(251): unsure at all n locations; Clone ID: 701134455H1
gcttcttctagatttaaggaagatgggtaaggnaaaggttcacatcagtattgtggtcattgggcatgtcgactctggtcaaatccactaccactggtcacctgatttacaagcttggangcattgacaagcgtgttattgagaggtttgagaaggaagctgctgagatgaacaagaggtctttcaagtatgcctgggtgctggacaaacttaaggctgagcgtgaaagaggnatcaccattgatattgct

SEQ ID NO: 47726 - DNA, 228 bp, Glycine max
  unsure (1)..(228): unsure at all n locations; Clone ID: 701134459H1
tgagttaagggcttggactgcctggaaacggaggcactgaagangtgctcaacaggaagaggggtttctctgagactgaaactggtccatgaagatgagtctgccaccactgtggatttgatgcttaatctttcttctaaggagnnnnnnnnnnnnnnnnnnnnnnnnntcagatccaactgataagcacaagacttgcctaaggagaagacccttctgccagcagat

SEQ ID NO: 47727 - DNA, 248 bp, Glycine max
  unsure (1)..(248): unsure at all n locations; Clone ID: 701134460H1
ggnttcttctngatttaaggaagatgggtaaggaaaaggttcacattcagtattgtggtcattggccatgtcgactctgggaaatccactaccactggtcacctgatttacaagcttggaggcattgacnagcgtgttattgagaggtttgagaaggaagctgctgagatgaacaagaggtctttccaagtatgcctgggtgctggacaaacttaaggctgagcgtgaaagaggaatcaccattgata

SEQ ID NO: 47728 - DNA, 244 bp, Glycine max
  unsure (1)..(244): unsure at all n locations; Clone ID: 701134461H1
tgaaagtgaggcttttatttgattctanaaatgagacgtgctcttgctttgcttcctcttctcttcctgtttgtancgattgnggaatcaagaaaagatggaggaaaatattggaaaatgancacgagagatcatcagatgccgaaaaaattnncgctctcctacaaccaaaactttgagatccaatctgaaaagattctcaaaaccaaggaacaaattcttgaaggttctaaacatgattgcg

SEQ ID NO: 47729 - DNA, 229 bp, Glycine max
  unsure (1)..(229): unsure at all n locations; Clone ID: 701134462H1
ggcagccatggtgaagtactccagacnacccgacaatcccaactaagtcctgcaaggccaganncgctgaccttagagtgcatttcaagaacactagggagactgcctttgccatcaggaagttgcccctggttaaagctaaaagatacctggaggatgntttggcccacaaacaggccatccctttccgacgcttctgtggtggtgttgggaggacagcccaggctaa

SEQ ID NO: 47730 - DNA, 240 bp, Glycine max
  Clone ID: 701134463H1
aggcaaggcacgtgtatatattcgcaggtggtcttctgattactgattctggtttgaagcccaaaattagtttagtggatatggggactgcatcatctattctaactcaatacgacatcgaggacgttcaggaacactgcaataatttattttcccagcaggaaattgtgtccttatatcaaaggttttgtcaacttgaccgcaacgccaagggatttatttccgcagatgagttcttgt

SEQ ID NO: 47731 - DNA, 247 bp, Glycine max
  Clone ID: 701134465H1
agaatatgaagttgtttgttttctttgttgctgcagtagttttggtagcatggccatgccatggcgcaggctaccaaaggttccctctccgaatgaaaactggctatggtgagcgttcttcggaggtaaaatgcgcaagttttaggcttgctgtggaagcacacaacatccgagcctttaaaaccattcctgaagagtgcgttgaaccaacaaaggactacattaatggcgaacaatttagatcaga

SEQ ID NO: 47732 - DNA, 246 bp, Glycine max
  unsure (1)..(246): unsure at all n locations; Clone ID: 701134467H1
ccttgtnatcatggacgtctcttattcatgcaatgaacaacaagcacccgaganccgttttctttgatttggaaactacagtgcccaaaaagggtggagagcgtttctgggttctggagtttggtgcaattgtggtcacaccccacaaactcaccgagattgaganctacaccacgctgataagacccaaagacctatctgtggtgtcagtgaaatccagcagaagtgatggaataactcgtaaag

SEQ ID NO: 47733 - DNA, 248 bp, Glycine max
  unsure (1)..(248): unsure at all n locations; Clone ID: 701134469H1
gaacactcaagtgactatgaaggctttgaagaatcatctggaacggtnnaaaaatcttccatttgtgaagcgaatttctgattttcatcttcttctcgtattagcaagggttttagacctgaatgctgatgttcctgcattgacggaatgnntgcagacacagacttctgttccagaaggttatcagatccttattgagtctatggcaagcactgcttgatgctgtatggcagttgttctggactcag

SEQ ID NO: 47734 - DNA, 148 bp, Glycine max
  unsure (1)..(148): unsure at all n locations; Clone ID: 701134470H1
gtcttcttccctctcaccctttcaactttcaagtaacaccacactcttcttttcttactcttactcttatgcntttcaccttcttcacttcactaccctntacccttttctgagacacaaacactctcttcctgttccacgcaacana

SEQ ID NO: 47735 - DNA, 248 bp, Glycine max
  unsure (1)..(248): unsure at all n locations; Clone ID: 701134471H1
cttcgtgcccttgctcgttctggaatgaaaattggccgcatagaancntgtgacccccattccttccgatagcacacgtagaaagagtggtagaaggggtagaaggctttaaggttctcgtggtattttaatttccatgtcaaacagaattgtggcattttgaaattttgcttaagttaatataagancttctattgtatttcttgaggttttgaacagaatttagttggtacattaggcatattgtc

SEQ ID NO: 47736 - DNA, 250 bp, Glycine max
  unsure (1)..(250): unsure at all n locations; Clone ID: 701134472H1
gncagaaccaactgctnggtaattatgaacttagcnagctaattngggttggagctggaaggaatgctggattgctgctcgtccatgggaaagccgtatccctagcttatccgtcaccccggagaaagctcaacataagcagccaagcccaagcaaagttcagaaggataagaacacatcaacaccaaaaactcccgtctcatttaaacctccttcagccaatgcaaaagggactcctccctcggccaac

SEQ ID NO: 47737 - DNA, 245 bp, Glycine max
  unsure (1)..(245): unsure at all n locations; Clone ID: 701134474H1
ggagtacataattccagaagagtcatcattggagcagcacctacangtcactgatactacgtttatccgactttgtcagatacttacttagcatcaaccccaaaagaaggcctactgcaagacaagcactgaggcatccatggctttcctatgtttactagttctttctctggtggagagttcagtaattctattggagttatcctcatcaatcgtgatctcnaaagcttattttccccatatag

SEQ ID NO: 47738 - DNA, 243 bp, Glycine max
  unsure (1)..(243): unsure at all n locations; Clone ID: 701134476H1
cnaatcccagaccctccgaactttaagaaatacggcgttcctttctactccgttgcgtggattccccaacacgttgtcaaatcgcgccaaatcgaaaccgccgatgagtcctcggactccgatcacagcacttcgccggcgaccgaggcggagaaggaacccgcgacggtcgccggtaactacctgctgttcgccggcggngcggagcaggccacagcggtatccccaatgctttggttattg

SEQ ID NO: 47739 - DNA, 244 bp, Glycine max
  Clone ID: 701134477H1
cttgaacttctctgtgttctgaaacagcaacaatggcaaaaaccatgactatgtggtttctgttggtcactctttccttcgtttatgctgctgccactgctaatactcaaatcaaagttactaacaaccctgcggacaagttggtagttgcgattaacgaaaacagaactgctcacaaggtgtccagccttaacggacaacccggggcttgcgtgtattgctctacaatacattaaggcatacc

SEQ ID NO: 47740 - DNA, 245 bp, Glycine max
  unsure (1)..(245): unsure at all n locations; Clone ID: 701134479H1
agaagacttttagtgaattcttagaaccacttgcacatactcacttcanncnccgagggtgaggttgagttcagaagtattctgnacgttccgggaatgggaccncttaacaatgaagaagtagtgaaccctaaaacaaagaacatacgcttgtatgttaagcgtgtattcatttcagatgattttgatggggagctgtttccacncaacatacgacttgaananngngnggttgattcanatga

SEQ ID NO: 47741 - DNA, 246 bp, Glycine max
  unsure (1)..(246): unsure at all n locations; Clone ID: 701134480H1
aganataaaagatactctttggtttcttttcaattggctgtatgtgatgtctccatatattatatgcctcctactgcaggttaaatgttacntacatcaactgctatcaggacttgagcactgtcatagtcgaaacgtacttcaccgtgatattaaaggatcaaaccttcttattgacaatgaaggaatacttaaaattgctgacttcggacttgcatctttctttgatccaaatcgccggcaacc

SEQ ID NO: 47742 - DNA, 253 bp, Glycine max
  Clone ID: 701134481H1
gtttatcgtgaggagaatatgaagttgtttgttttctttgttgctgcagtagttttggtagcatggccatgccatggcgcaggctaccaaaggttccctctccgaatgaaaactggctatggtgagcgttcttcggaggtaaaatgcgcaagttttaggcttgctgtggaagcacacaacatccgagcctttaaaaccattcctgaagagtgcgttgaaccaacaaaggactacattaatggcgaacaattta

SEQ ID NO: 47743 - DNA, 209 bp, Glycine max
  unsure (1)..(209): unsure at all n locations; Clone ID: 701134482H1
gagaatgttgagtctctcagttgcttcaccttcttcttcaaccatttcctttctcccaaagccattcaatggcattcagctccgtcgcactgccacatgctccatcccacccacgaagcgcagtacatttgtgccggtggtggtgatgtctaagaggacngaggaattgaaggaaattagacaaatgactacggaacgaattaacgaag

SEQ ID NO: 47744 - DNA, 231 bp, Glycine max
  unsure (1)..(231): unsure at all n locations; Clone ID: 701134483H1
cttttatatcctctatatatagtncntctggcaattaaggacctcatccaaataagcacaaancnggtagccagagttacttcaaggctttgattatttgccttatagcactaattggatcaactcaagctcaattgcagcttggtttctatgccaaaagttgtccaaaggctgagcaaataattctnnagtacgttgttgagcatatccacaacgctccatcactagcag

SEQ ID NO: 47745 - DNA, 248 bp, Glycine max
  Clone ID: 701134484H1
cttcgttgcttggtgatgtccctttctgttctcttcactcttggtcttgcgagagaaagccatgccagagacgaagatttttggcatgctgtttggccaaacactcccattccaagttcattgcgagatcttctaaagcctggccctgcaagtgttgaaatcgatgatcaccctatgcaaattgaagaaacacagtacccgaaaaccttcttctataaagaagaccttcatccaggcaaaacaatgaa

SEQ ID NO: 47746 - DNA, 249 bp, Glycine max
  unsure (1)..(249): unsure at all n locations; Clone ID: 701134485H1
tnagagtgagtcaccgttccgtgttcccgccgagtcggtataaacgagtgagcgagtccacaactcaccgcgctgcatggaccctctagaagctttggtcgcccanttccaagggctttcgagcactcccggcgacctcactcgcctccacagtgttctgaagcaagccgatgactcgctccgatccgagtcaactcgcctcgctccgattctcacccagctcgacccctccattcattccctcgggtt

SEQ ID NO: 47747 - DNA, 244 bp, Glycine max
  unsure (1)..(244): unsure at all n locations; Clone ID: 701134486H1
tggtgttgttactgctgctcttttctcttttcttttctctttagttctctcttcccctnnnnnnnnnnnnnnnnnnnnnnnnngagcttgtttaagcttttcttccattaacatattatctcnatgtgtggnattcttgctgttcttggttgttctgatgactctcgagccaaaagggtccgcgtgcttgagctctctcgcagattgaagcaccgtggccctgactggagtgggctccatcaac

SEQ ID NO: 47748 - DNA, 249 bp, Glycine max
  unsure (1)..(249): unsure at all n locations; Clone ID: 701134487H1
cactaaggtgttaattgctcataaaaaaaatggagtctgtcaagttcattaacatgaatgccaaacactcctccatcttcttnttagccatgatctttgttctgatcttagcttcagcaaatgccanaatnccacgagcacgagtttgttgttgaagcaactccagtgaagaggctgtgcaaaacccacaacagcatcaccgtgaatgggcaatacgcgngcccaacgttggaantcaanaatggngcc

SEQ ID NO: 47749 - DNA, 245 bp, Glycine max
  Clone ID: 701134488H1
agataaccagttttctctttgattcatcaatggcaactgcgaggaccgtgaaggatgtttcgcctcacgatttcgtgaaggcttatgcttcccacctcaagcgttccggcaagatggagcttcctgagtggaccgatattgtaaaaacagcaaaatttaaggagttggctccatatgatcctgactggtactacattagggctgcctcaatggcaagaaagatctatttgagaggtggtctggtg

SEQ ID NO: 47750 - DNA, 242 bp, Glycine max
  unsure (1)..(242): unsure at all n locations; Clone ID: 701134489H1
cccaatccttggtgggtctagcatctatccctaccctcgcagggttagaacaggaagagaaaggaccaggacagatcccaacagtgagaaaccgggcgaggtttatgttccaagagatgaaaattttngtcacttgangtcatcggntttccttacatacggaatcaaatccttatctcacgatgtgatacctttgttcaaatctgcaatttttcaattaagggtcacatcgagtgagtttg

SEQ ID NO: 47751 - DNA, 241 bp, Glycine max
  unsure (1)..(241): unsure at all n locations; Clone ID: 701134490H1
cntggaaggggcctgctaaggagtgggaggaagtgctgctaagcttgggagttcctggcagtgaacctggaagtgatggagaagaaattgctccacaggcaaaggaaaatgtggcaacaccataataataagaacaaagatgtgagggaagcctctcctagtctgagtctcgtgaagttctcccagccccttgcttgttattaatattatgttttatatcctcttccaggttcactgccag

SEQ ID NO: 47752 - DNA, 242 bp, Glycine max
  unsure (1)..(242): unsure at all n locations; Clone ID: 701134491H1
cnattgcaatggttcctcaacctctgctgacccttttcctctttttctcccttctcctcnattgccaactcttctccttcccaacaccttcagatcgccaatgccgaacgcaggattgatttgacttctcacattattaaggtgtacttgacattgaaggttgaaaatttggggacatctcctgcttcagaagtacatattgccttttcgcccactgaagtagaacatctagcaatagtcaa

SEQ ID NO: 47753 - DNA, 241 bp, Glycine max
  Clone ID: 701134492H1
ctttctttcactgtcacagagccacatccatgggcttcccagccaacggcgcctctgcggcccagcccctaaacttcctcatctacggccgcacgggctggattggcggcctcctcggctccctctgccgggcccagggcatctccttccattacggctcgggccgcctcgagaaccgggcctccctcgaaaccgacatagccctcctcaagccctcccacgtcttcaacgccgccgggtc

SEQ ID NO: 47754 - DNA, 241 bp, Glycine max
  unsure (1)..(241): unsure at all n locations; Clone ID: 701134493H1
cttgtctgaagttatttcagcaatttttgctgaagttatgcaaggacaagcctgaattcactgaccatttgactcataaactaaagcaccaccctggtcagattgaagctnctgctattatggaacacattttggaaggaagctcttacgtgaaagctgctaagaagttgcatgagattgatccttacaaaagcctaaacaggaccgttatgctcttaggacttcaccacaatggctggtc

SEQ ID NO: 47755 - DNA, 246 bp, Glycine max
  unsure (1)..(246): unsure at all n locations; Clone ID: 701134494H1
ggagttcttctattctagtaacctctgcnaaccaacaaaacaagnctgaaaataaaatagagatgctgcctccttgctggcgatcgttcgggaagaaacagtaatgctactgacatgggaaagaaggggagttggttttctgcaatcaaaagagttttcacacaccactccaatggggaagcaggattcagataataacaaaggcacaaaagagaagaagaaaagtctaggaaaactaaagcatgg

SEQ ID NO: 47756 - DNA, 246 bp, Glycine max
  Clone ID: 701134495H1
cgagttgagagctacctcggttgaacatcatccgaatcgaataatcacttttacacatgacttatccttctattccgatttaagcccctaaacgaactatcgaagccacttcaaaaactactcttagattgcttcgatggtcgatcactacaacaagctggttaaactagcggcgagggctttctacgatgatctaacgagtaaaggagagaatcaacccaaatcgggaaggagtgataacagagg

SEQ ID NO: 47757 - DNA, 135 bp, Glycine max
  unsure (1)..(135): unsure at all n locations; Clone ID: 701134496H1
gtgtgactgcgtgaaagggttcgtgcgttttttcttccnccgaagcctttcatggagttcactgcactctctaacgctacccaacttgggagcttcaaccctcttagaaccaaccttcaaagttccacacaacat

SEQ ID NO: 47758 - DNA, 70 bp, Glycine max
  unsure (1)..(70): unsure at all n locations; Clone ID: 701134501H1
gcgctctctctccaaaaaaaaaaaaaancnngcnaatttacaaaattcttttaaaancctntnaanggaa

SEQ ID NO: 47759 - DNA, 274 bp, Glycine max
  unsure (1)..(274): unsure at all n locations; Clone ID: 701134502H1
ggaataccaagattaccaccacaaagcaatgggcggtatactttctgcgcttcttgancggcgacnnnnnnnnnnnnnnnnnnnnnnnnnagagttctacttctagagtctcctccttccactcgtcgccgcgctggcagcttacttcaacgagatcaaagataccgataagctcgttgtgatagatttctcggcgtcgtggtgcggtccttgcaaattcatagagccagcgattcacgccatggccgacaagttcaacgacgttgacttcgtc

SEQ ID NO: 47760 - DNA, 271 bp, Glycine max
  unsure (1)..(271): unsure at all n locations; Clone ID: 701134505H1
tttgtattgtacttcattgaacgtttcatggaggagncaccggaaagactgaaaatgaaagatttagatatgtttggaaggcgatggttcaaacctcaagaggcgtccaatttgagagtgaangtccggattctcttactgccctgcaactgattgtgttgagaccaccgaggattctgtgacttaacatggcagaattgcaattgtcatttccttgaacgaacaatctgttgatattcgtatggttggtgccagtttttttttttccttg

SEQ ID NO: 47761 - DNA, 270 bp, Glycine max
  unsure (1)..(270): unsure at all n locations; Clone ID: 701134506H1
atggcgagcgctcccactccacgcgaagagttcgtgtacatggcgaantggcggagcaggccgagcgctacgaggagatggtggagttcatggagaaggtctccgcctccgccgagagtcaggagctgaccgtggaggacgtaacctcctctccgtcgcctacaagaacgtgatcggcgctcgccgcgcctcctggcgcatcatctcctcaatcgagcagaaggaggagagccgcggcaacgaggaccacgtcgccgtcatccgcgacta

SEQ ID NO: 47762 - DNA, 271 bp, Glycine max
  Clone ID: 701134507H1
cactcactagccactactaccctctctcaaaaactccaaaaatcataatgccatatcatcgatatttatctccttagccatcagcatcccaagtgtccaaccttaaaatcttctatctctctcactaactcatactctgttgctctgtttcagtgtttctctcccctgctatctctaaattgaacgtgttttctgctacttttgcgcgtgtgcattcctcttcccttcaaagctagcactttacccaccaccacaacaaccccttttgctc

SEQ ID NO: 47763 - DNA, 271 bp, Glycine max
  unsure (1)..(271): unsure at all n locations; Clone ID: 701134508H1
gggagctaaggttacatggtcagagaacantgtcactgtttctggaccaccacgagatttttctggtcgaaaagtcttgcgaggcattgatgtcaatatgaacaagatgccagatgttgccatgacacttgctgttgttgactatttgctaatggtcccactgctataagagatgtggcaagttggagagttaaagagactgagaggatgatagcaatctgcacagaactcagaaagctaggagcaacagttgaagaaggtcctgattact

SEQ ID NO: 47764 - DNA, 271 bp, Glycine max
  Clone ID: 701134509H1
atttagccaaggatcctctggtatttgattggatgattggtatcaggaggaagattcatgagaatccagaactgggttatgaggaatttgagaccagtaagctgataagaactgaattggataaactgggcatctcatataatacccagttgcagtcactggtgttgttggcttcatagggactggactccctccttttgttgcattaagagctgacatggatgctcttcctctgcaggaaatggtggagtgggagcacaagagtaaagta

SEQ ID NO: 47765 - DNA, 273 bp, Glycine max
  unsure (1)..(273): unsure at all n locations; Clone ID: 701134510H1
gctgnagtatcctcaaattggatccagttctagagcccgaccaagcccngaaaccagtcataaaccccggacaatnaggagacagaatanancggccttcagggggtttctcaggnnctgtngaggcatttgcaaggaggatggctctggacttgtnctgnaaagtgagcattctangnataggtcttcagatgatgtgccatcttccanagacgtgcaagctnattcngagaggcctcgcagctctnctcgtaatggcagtnctncaaaaaa

SEQ ID NO: 47766 - DNA, 255 bp, Glycine max
  unsure (1)..(255): unsure at all n locations; Clone ID: 701134511H1
ggccgtgtcgcagcaaaaccaaacccacatattaacttgnctgctctaagtcatggctnnnatcttgcacgcaaccaaagcnanccaagaatgctttcaagactctgattgcggncgagtacatggcgtccaagtggaattggcccctaatttcgagatgggtgtctctaatagaactcctgaattccttaaaatgaatcccataggaaaggttcctgtcttggaaacgcccgatggtccagtctttgagagcaa

SEQ ID NO: 47767 - DNA, 274 bp, Glycine max
  unsure (1)..(274): unsure at all n locations; Clone ID: 701134512H1
gcgngcgtnaagttgcagttattgattccaattccaagtcctaattatntnacagancaaatccattttctctcgtaaaccaaacacacgcaaacccgcgcgaatcgaaaatggcggatccgatcccggcgccaccaagatcgccactgaactcttctcggatccgctggacgcccacncgctgtggttcaaaccggcgtcgtttctctcccccgacttcgactnccgaatcctanatttcggagctcgaaccttcgtcccttcgacacngtnt

SEQ ID NO: 47768 - DNA, 273 bp, Glycine max
  unsure (1)..(273): unsure at all n locations; Clone ID: 701134513H1
gaataagcaaggaagcttctgaagatgaaattcaaggagcaaggaacttcctgattcaaaaatatgcaggacacaagccaagtgtggatgctattgagtcagcacatgacaaaatanctcatgcanaagttctatgaacggaaaacccaaaaattgacattaagaannaaatgagggaagtcaatcaatccaaatttgtgcaggctgtcagaggcagatttcaaactccatctacaaaattcattataaaaacttcaatagcattcttggtat

SEQ ID NO: 47769 - DNA, 272 bp, Glycine max
  unsure (1)..(272): unsure at all n locations; Clone ID: 701134516H1
caaacccaaactgttaggtttcctttgtttggtgtgaagccatggctgattcttcttccaacctgaaatccgacgcgataatggagcagatgaagcaacacctcgccaccgacgctggcaaacaagtcaccaataaaattgactcgtttatcagtttcacattgctcntcaagaaacttggattcgacgaggtcgtctacaccgtttctctcaagaaaggagaggtcaccaaagggtcatatgaaggaggaaagccgatgctcctttttctt

SEQ ID NO: 47770 - DNA, 272 bp, Glycine max
  unsure (1)..(272): unsure at all n locations; Clone ID: 701134517H1
ggttgcggaagcattcgtctaatgatgttaagagattggtcaagttactcgtcaggaagtggaaggaaattgtagatgaatgggtgaagttgaaggccccgggagaaccgggtactgctgtcatggctgatgaggactcgctcagcagagaatcctacaaaatgggcatcgtcagattcctgattttgcatactcaccaaatccacactatgggagtttngggtcngagcgcaacaatattgaagcagaacgaaaaccaaaagcaattcctc

SEQ ID NO: 47771 - DNA, 80 bp, Glycine max
  unsure (1)..(80): unsure at all n locations; Clone ID: 701134518H1
aaaaaaccctctntttctctctcttccaaaacataatnnacaaanntntatntgcaaanaaatntgcaaaaagcatgaga

SEQ ID NO: 47772 - DNA, 269 bp, Glycine max
  unsure (1)..(269): unsure at all n locations; Clone ID: 701134520H1
gctgacatgacanaacaagcttcttcctaagcaatcctctttgctgctttgactcaccaatataaatatcaattgccgnntcctttgcttcacttcactccttctcttctcatattgcttcccctctttctcttcttcaatggagaaaaaggtccccttttttttctccattctcttattcattgctctgctatttcatggaggaaaggtgttagctttgaattgccaagacggatcagaggaatggggatacgttcaagtcagaccca

SEQ ID NO: 47773 - DNA, 241 bp, Glycine max
  unsure (1)..(241): unsure at all n locations; Clone ID: 701134522H1
ggagancacagtccacaagacngagnagnagncancgngacnggcgaatccagccagcgtgtgcggcttcgaattgagtccgagaacgcagttagacaggctttatattgaacttgagacttgaagggangctgttataattggtcagtnttcccatggcgtatcccttctcagatttcaagtactcagatggcctcactgtagtgggtatctgnntctgnacagctattgtcgatgaggc

SEQ ID NO: 47774 - DNA, 269 bp, Glycine max
  unsure (1)..(269): unsure at all n locations; Clone ID: 701134524H1
tggctntcnttggntacgncaagaactnnctnttntccatttnncgctgganttnctttcttcganctcttcanncncctttcgacnactctcntatcaccgcncgcnttcttaactagagccctctcngttgagtgacggttcgtgaatattcgcttganatttgactgcgaantggttttagagggtttctccaggtgtggtttgatntacagtttctgatgctgaagaaatanaaaagcttgaaggcttttgtcntctgtgtgaaa

SEQ ID NO: 47775 - DNA, 269 bp, Glycine max
  unsure (1)..(269): unsure at all n locations; Clone ID: 701134528H1
tgcctctcgtgaaggccgtggtgtacgnggtaatgcggatcgaacctgcgntgccgtaccagtacgcacgcgcgaggnagaaccttgtcgtttcgagccatncacgcgtcgtttgangtgaagaagggggagatgctgtcgggtaccagccgtttgcgacncnggatccgaggatcttcgaggatgctgaggtntttgttccgcggaggtttgttgggganggggagacnangctgaagcacgtgctgtggtcgaatgggagggagacg

SEQ ID NO: 47776 - DNA, 52 bp, Glycine max
  unsure (1)..(52): unsure at all n locations; Clone ID: 701134529H1
agtgagaaagganntganaggncatnaggaataagaagggngggaggagtgg

SEQ ID NO: 47777 - DNA, 77 bp, Glycine max
  unsure (1)..(77): unsure at all n locations; Clone ID: 701134530H1
cngacggccctttttttgttaaaggtttcncngtatgatatancgantgcttttggaagtatttncttttgttnana

SEQ ID NO: 47778 - DNA, 271 bp, Glycine max
  unsure (1)..(271): unsure at all n locations; Clone ID: 701134531H1
accccagagtatgntgagcatggtgaagaatcctcaaaaggcttatctgagaacaatcacacccaagtttgagacccttattgatctttcagtgatagagatattgtcaaggcatgcttctgatgagatataccntggaagagggagactccaaattggactactgataagaaggcantngaagctttcaaaaggtttggaagcaaactgactggaattgaagganaaatcaatgcaaggaacngtgatccaagtctgagaaaccggactg

SEQ ID NO: 47779 - DNA, 273 bp, Glycine max
  unsure (1)..(273): unsure at all n locations; Clone ID: 701134533H1
catagctccatcactgcagcattagggtttatcatctgcttcaatggggaagggaacagggagcttcggtaagaggaggaacaagacccacactctctgtgtgaggtgtggccgccgcagcttccacctccagaagagngctgcgccgcttgtgctttccccgctgcacgcacgcggaaatataactggagcgtcaaggcaatttcgcagaaagaccaccggaactggcaggatgagatacttgcgtaacgtgcctcgccgtttcaagagtgg

SEQ ID NO: 47780 - DNA, 268 bp, Glycine max
  unsure (1)..(268): unsure at all n locations; Clone ID: 701134541H1
gattagtattatttctgttactcttttccttataacgaccaaactccttgtgggggcataaacaataagcagagcagattttctagaggggtttatctttggaactacttcttcagctcaccagcataccaaagaggtctgcaattggagaaaagcatctgcttgtaagatttgcagtagacagaggaggattagttggaccagatggttccacacactatggtgcntctgatgtcacttttacggcctgcctccctaacatggtggt

SEQ ID NO: 47781 - DNA, 269 bp, Glycine max
  unsure (1)..(269): unsure at all n locations; Clone ID: 701134543H1
ttcaatctctaattgctcaatcccgttatgcagcgcgtaccaggccactgaatcgggtctcggggctccgattcttctcggtttccacggaagagtattccaagagaaactatgcaaacaacgttgctgagtacaacctgttttgggttctctcactgcacaaagaaggaatttctngctgagggatgtgtacgatgatatgatgcttgatggggtaaagcctacgcgtgacactttccattcccttgttgttggaaccatgaaaggag

SEQ ID NO: 47782 - DNA, 270 bp, Glycine max
  unsure (1)..(270): unsure at all n locations; Clone ID: 701134546H1
ctcncagcancngtgggtcatcatgtgactgtgataagannctnctganaanangaaacannngnnnnttaaacaccttggagntgatcaatatcncgttagctnnnatagcgactgccatgcaggaanntgctnattccttaantatctcattgacactgtgcctgttggtcaccctcttgagactatctctccttgcncaaacttgatgngcaagttgatcttgatgggggtcatcaanacacctgcttcaatttgttagccccntgg

SEQ ID NO: 47783 - DNA, 267 bp, Glycine max
  unsure (1)..(267): unsure at all n locations; Clone ID: 701134549H1
ctgtgtcgttacaggtcattcttaaggtgacaatttctctgcacgacatgtctgangaacgagctgtgcatcctgattgccggaatgctagtaacccttatcatgaatgcagtgattactgttttagagtaatagtgaagctaaaattaggtcacaacaacaggaatcagaagttggacaagctagtggnggnagcaactctaagcaagctatcccagatgaatcctatctcggtgaggaaatacacgacgacagacctgatcttgc

SEQ ID NO: 47784 - DNA, 255 bp, Glycine max
  unsure (1)..(255): unsure at all n locations; Clone ID: 701134550H1
ctgcaccactccctggtcagcttcccaancactcaggtgcatttgatgctgttacgcagacaatagcagctgaaggagcaaggggtttatacaaaggtatgggtgctccgcttgctacggtagcagcttcaatgctgtcctgtttacagtgaggggacaaatggaaacattagtgaggtccaatcctggttcccccctcacagtggatcagcagtttgtttgtggagctggagccggagttgctgtttccatctt

SEQ ID NO: 47785 - DNA, 266 bp, Glycine max
  unsure (1)..(266): unsure at all n locations; Clone ID: 701134555H1
aacgtcaccgactcagttgttgtcagcgagtgagtgagtcgtttctctgcagcaacaaggtttagccactccaaacagacganaaatgggtcgtggggtcantnctggtggtggtcagagttnccttaggttatcctttggcagtggggtgcctgccagcagtgcaaacagtcagcctgcaaatggtgctcgcactcaaaatgctagtgctccttcaccaccagtcgataagcaaagtccagcaccagcaccagcaccagcaccag

SEQ ID NO: 47786 - DNA, 270 bp, Glycine max
  unsure (1)..(270): unsure at all n locations; Clone ID: 701134556H1
aaaaaaatnganagnnaaatgatncctcggagaacaccatcgngggaatccgacggtcctcgtgccaccgtggccagcccacgaacgatccgacggctgagatgtactccgcgttcttaacaaacgacgtcaatgctgtgagtactctccgtaccatcttcaagaagcactaacggcgctgcancgttttctgccgtcaaacgaaacggacgcagacttcggactcctcggaggcggctcagcccgacgcggcggtggacgcgtacngtg

SEQ ID NO: 47787 - DNA, 269 bp, Glycine max
  unsure (1)..(269): unsure at all n locations; Clone ID: 701134559H1
gnnagtagncatatgnttgtctcaangntnnancgatgnatgtgtaagtatgaactaattcagnctgtgaaantgcgagtggcncantaaatcagttatagtttgtttgatggtatctactcggataancgnagtattctagagctaatacgtgcaacaaaccccgacttctggaanggatgcntttattagataanaggtcagnacaggnctctgcctgntgctttgatgattcatganaactacgtcggatcgcacggncnntgtgc

SEQ ID NO: 47788 - DNA, 266 bp, Glycine max
  unsure (1)..(266): unsure at all n locations; Clone ID: 701134562H1
attctctcttcctttttgggttctcctcaatccattccaagcttcaatctnntctctcttctgcnctctgcacctcccctcacacccttcctcattcgcaggaggtgaagatgtcgaccccggcaaggaagagntgatgagggattttaaaagattgcaacaagatcctcctgctggcatcagtngggctccccaagacaataatattatgctttggnatgctgttatctttggaccagatgacaccccttgggatggaggtacgt

SEQ ID NO: 47789 - DNA, 78 bp, Glycine max
  unsure (1)..(78): unsure at all n locations; Clone ID: 701134563H1
gggaggtncanaaaganaaaggaagaaggaatgagtgcaacagtganncnaactctaaacctanggacgtncttcnat

SEQ ID NO: 47790 - DNA, 104 bp, Glycine max
  unsure (1)..(104): unsure at all n locations; Clone ID: 701134569H1
gncactnctnttnattcnctctctctcacagnagggnaanangcaattcaaggaaataaaaatcgcagttcttcanagaangggcanacaagaaagcgcgacat

SEQ ID NO: 47791 - DNA, 265 bp, Glycine max
  unsure (1)..(265): unsure at all n locations; Clone ID: 701134570H1
gangancttcagtcggtttcacctgcaattccattctccagttggcttcncangcttttatgatgagctactactttatcttgaacaagaatggaaatggtgtatgattgctttccctgatgactataaaactttgtcccaaggctactaagngagactatgatggctataggttccagtttcatatctcgtntcaaccttgccattggagatgctgttccagaaacaaaagcanttcgctaaaggtttgttagatantttagct

SEQ ID NO: 47792 - DNA, 76 bp, Glycine max
  unsure (1)..(76): unsure at all n locations; Clone ID: 701134571H1
gntgcttcttcagncactccgcanntcgcagnctctgtgnnctcaacaaccatggntgaaatcgaaactancgttc

SEQ ID NO: 47793 - DNA, 177 bp, Glycine max
  unsure (1)..(177): unsure at all n locations; Clone ID: 701134573H1
gcattatgctcacaatgtcagaatttcanagacgttccatgaggaaactgggaatcacatttgcttccctttaccccggttgcattgccacaacaggcctgttcagagagcacattcccttgttcagaactctgttccctccattccagaagtacataaccanaggctatgtctcag

SEQ ID NO: 47794 - DNA, 264 bp, Glycine max
  Clone ID: 701134575H1
catctttgctcttgtctcgttcacttcccatgcttctgtcaatgatttctgtgtagcagacctaaaaggtccagatagcccttcaggctatcagtgcaagccacctaacacagtcacagtggatgactttgtgtctctggctttgtagctggaaacaccacaaacactttcaatgctgcattaacctccgcatttgttactgattttccaggtgtgaatggtctggtgtatctgtggcacggttagacatagccaaaggtggat

SEQ ID NO: 47795 - DNA, 157 bp, Glycine max
  unsure (1)..(157): unsure at all n locations; Clone ID: 701134580H1
agatgagcatagtgaaaaccngaaactctntctgnatnccntatcattgtcaaaacatgaattctcaattcgcnaanacnaacgatantaagcnccaactcccaaaacccttcntccctcgcaaaancccngcccccaatttccccagtnttcacct

SEQ ID NO: 47796 - DNA, 240 bp, Glycine max
  unsure (1)..(240): unsure at all n locations; Clone ID: 701134581H1
tgcttctatatattacttgctacntttcttgatcatgtcccttgctggtaaaatcagctctgaaattggtgttcaggcaaccgctgcaaagtggttcaacctcttcacacacaacttcatcacgttcaaaatcttactgatagaattcatggaaccgagctgcatcatggtgaagactggcatcacaatgagtcggtcaagcactggacttataccatagatggcaaggttacaacttgc

SEQ ID NO: 47797 - DNA, 260 bp, Glycine max
  unsure (1)..(260): unsure at all n locations; Clone ID: 701134582H1
gtggctgcgccgttattgacggtggttttgccactgnacttgaaaggcatggggcggacctcaatgacgaactctggagtgccaaatgccttattagctccccacatcttgtccgaagggttcacctagttacctcgatgcaggagcaaacataatattaacagcatcttatcaggccactattcaaggttttgaggccanagggttctctagagaagaaggtgaaactatgcttagaagaagtgtggagattgcacgtg

SEQ ID NO: 47798 - DNA, 259 bp, Glycine max
  unsure (1)..(259): unsure at all n locations; Clone ID: 701134583H1
anttttgaagtttaaaccttcaaacccttttgcctttagattctgattctgagtctctgctgctatatatggcgccacgcgtatttcttgtgttggggatgttgctgatggtgtgccttgttaaggttcgtctgatccaaagagagaagaagaaatactggaagaagaactacattttcccgataacgagccacttattgtgagagacgggaacagaaggctaatgcaagacatagattgtggtgggttgtgcaagacg

SEQ ID NO: 47799 - DNA, 111 bp, Glycine max
  unsure (1)..(111): unsure at all n locations; Clone ID: 701134584H1
gcncagnanaattaacacgtatatagcaagcatggcagtcacactctacgaccttngctctgcctctgggttgaagaagcttgatgagtaccttcttccacacaacatang

SEQ ID NO: 47800 - DNA, 85 bp, Glycine max
  unsure (1)..(85): unsure at all n locations; Clone ID: 701134587H1
gtggctgcnccnttattgcacggtggttttgcnactgancttnaaaggcatncnggtggacctacaatgatcgaagtcctngagt

SEQ ID NO: 47801 - DNA, 262 bp, Glycine max
  unsure (1)..(262): unsure at all n locations; Clone ID: 701134589H1
ctcattctccatacctcaacgaagaggttaaagncacggcaacactttgctgtccgccttgaccgagcagagcttcgtcttggccctcgattttgccctaaagtactctcagtcacaacagacaccgtcgtgtcgtcgtcgtcatcaatggcaccgaagcagaccaaggctgagaagaagatcgcttacgatgcgaantgtgcgacctaatggaggagtacggccagatcctcgttgtgaactccgataacgtgggatcgaa

SEQ ID NO: 47802 - DNA, 266 bp, Glycine max
  unsure (1)..(266): unsure at all n locations; Clone ID: 701134591H1
ccttcnccaccgcttcgtnanncnggngcttgcttcttttnctnttccttttcgcttcttactagtatncctttctncttgcatttcgtttncnncgccgttttcgtcactcagcatcagcagcaacagcaccagtgtctactatctgactacacatgtgctgtttacattgtcttcaattnggtgaagtctgactgaagagcaatgcagaaggataccagtaccantgccccatcaaccacaagcggtncggttaggcaccgaaa

SEQ ID NO: 47803 - DNA, 252 bp, Glycine max
  unsure (1)..(252): unsure at all n locations; Clone ID: 701134592H1
aaaacccttgaaggtgctactgaagttatatgttcacgcactccatcgcagctacaatatttaaaacagatctatcattctatgtttggtgtttatcttgagcatgatattcaaacaaacacagccccggngatcatcaaangctcttgcttgcatatataagcacacctcgtcatgagggccccgaggttaatagagaaattgctcagaangatgcaaagggtcttacaaagcaggggagaagaaactggg

SEQ ID NO: 47804 - DNA, 208 bp, Glycine max
  unsure (1)..(208): unsure at all n locations; Clone ID: 701134593H1
aacagtgtgatgaaaatgaaggtccttgttttcttcgttgctacaattttngtagcatcggcaatgccatgcgtaacgatatgttccctctccgaatgaacactggctatggtgcccgtactccggaggtgaatgcgcaagttggaggcttgcnntggaagcacacaacatctttggctttgagaccattcctgaagagtgcgttgaa

SEQ ID NO: 47805 - DNA, 257 bp, Glycine max
  unsure (1)..(257): unsure at all n locations; Clone ID: 701134594H1
ctanagtctaagtgcagtaccgttgggattcaaggaatcgcntggnccttcggtggcatgatcttcgccctcgtttactnncaccgctggcatctcagggggacacataaacccggnggtgacattgggcgtttttggcgaggaanttgtcgttgcccagggcgatttctacattgtaatgcaatgctgggtgctatttgtggcgctggcgtggtgaggggtttcgaggggaaaacaaaatacngtacttgaatggt

SEQ ID NO: 47806 - DNA, 254 bp, Glycine max
  unsure (1)..(254): unsure at all n locations; Clone ID: 701134595H1
tttganacgcacagcttcaatcaccgaccacaccacccatcaacgacatgcancctctttcccttctcaagactgcccaaggccaccctatgttncgtggaactgaaaaatggggagacatatacgggcatttggttaattgcgacacatggatgaacatccatctgcgagaagtcatttgtacatctaaagacggagatagattttggaggatgcctgaatgctacatacgaggcaatacaatcaagtacctt

SEQ ID NO: 47807 - DNA, 262 bp, Glycine max
  unsure (1)..(262): unsure at all n locations; Clone ID: 701134596H1
gtccaatcgtgatgccaaacactcagaacttcaagatgatattagtgaattagagaggcaataaacanatgacagtgataangagaaccttcctgatgaactacatcattcatttggtgaattagntgaaaagtcaatttgncgaaaaagcaacttgcngctagactgagggatattgtggtattaagacgacagantgatgacctaccgtgccatcagaagtcatccagtacgaacgccggctctcagnactgtatgcaca

SEQ ID NO: 47808 - DNA, 259 bp, Glycine max
  Clone ID: 701134601H2
tgatctacctttgtggggatatgttggtgagttacatcctgataagaacagtgataatggcaagcatgtcatttacacacacaaaaacattattgttaaatacaacaatgatcagattattcatgttaatctcactcaggatatcccaaagcctttggaagtaggaaaacatttggacatgacatattctgtcaaatgggattctaccaatgtcactttcgggcgtcgctttgatgtctacctggaccatcctttcttt

SEQ ID NO: 47809 - DNA, 257 bp, Glycine max
  Clone ID: 701134602H2
gtaattctagagctaatacgtgcaacaaaccccgacttctggaagggatgcatttattagataaaaggtcaacacaggctctgcctgttgctttgatgattcatgataactcgtcggatcgcacggcctttgtgccggcgacgcatcattcaaatttctgccctatcaactttcgatggtaggatagtggcctaccatggtggtgacgggtgacggagaattagggttcgattccggagagggagcctgagaaacgg

SEQ ID NO: 47810 - DNA, 257 bp, Glycine max
  Clone ID: 701134603H2
tggtcattcatttgctagctccaataatgggttctagcagattgtcattcattttagcacttgtgcttgtaacattttcattcatcatgatcattgactcaagggttgcagaggcacgtaccctgccaaaatcagccttattgccttccaaagtttatatacctactgttcctcttcctactctgccattactgccaaaggaagagttgcctgttccagtccctccagtaactgtgcctgacctaccaattcctgaa

SEQ ID NO: 47811 - DNA, 152 bp, Glycine max
  Clone ID: 701134604H2
tctctctctcattcacacgaatcacactctccacagtgcgattcattcaccaatggatcgcaacggtgttctctctcttgcattcatctgcattgtagtcgccggcgtcggaggccagtctcccgccgcagcgccctcgaacactccggcaa

SEQ ID NO: 47812 - DNA, 262 bp, Glycine max
  Clone ID: 701134605H2
cgcatcttgggatatctggctaaaagattgaatattgtgttaatctttctagtagtcaaggggaacaatgaatgcactagcagccaccaacaggaactttaagttggcctctaggcttctgggattggattcaaagcttgagaaaagtttgctgattccattcagggaaatcaaggttgaatgtaccatacctaaagatgatggcacgttgcaatcttatgttgggttcagggttcaacatgataatgccagaggccccatg

SEQ ID NO: 47813 - DNA, 262 bp, Glycine max
  unsure (1)..(262): unsure at all n locations; Clone ID: 701134606H2
ctcctctcactcctactggatttcgatgggatagacaatggatggtggtgaattcccaacggaggatgtacactcaaagagttgaaccaaggcttgctttggttgangttgaattgccatctgaggcatttcttgaaaactgggaacctacacaagactcctacatggtggtgaatgcacctgggatgcaacctctcaaaatatgtttgagccaacaagggaaggaggtagcaaatgccgtctcagtatgggaatggactgg

SEQ ID NO: 47814 - DNA, 267 bp, Glycine max
  unsure (1)..(267): unsure at all n locations; Clone ID: 701134607H2
caccccgtaagcnaaaattagcttatacttatnttaaaattgtgtttcgaagaagctaaatgagagcttctaagtnaattttaactcttgagaagcagattatatcattttacctgagangtttgtccaaacagggttttattcaataagtgattagttaagctgtttacccaaacaggtatgctcatgctattnatatccatgtcagtactatgtatacccaaacagattatattcatttgtatattttgaaaggttttccttctt

SEQ ID NO: 47815 - DNA, 269 bp, Glycine max
  unsure (1)..(269): unsure at all n locations; Clone ID: 701134608H2
gctcagcaatccctcccattttttntccttcaatctgcttcaatggaaggtttggcttccctcaaggctccctttccggccaccccatttctctcttccagacccagaacctctattcttccatcccaagccagttttcgtaaaagaagctcctttttatccttttctgttcatgcccaggtggagtctgatgatggttcagctgtagtagccacatctggtgaatctgtgacagaggttctgaaaattaaggagtgggaggtgggaat

SEQ ID NO: 47816 - DNA, 266 bp, Glycine max
  unsure (1)..(266): unsure at all n locations; Clone ID: 701134609H2
gaaagtcgtgacaggcgaccagcttttgttctctgccgagcaccggtggttactgagattnttaacagccaccaactagagattgtaacattagctaatctatcctctttgacagtaatcactgaaagagatgctgttccatctggatatgctgatgctgttgtaaatgaaaacctttctgtttatttagagcttcaaggaactaattctgcagaagcagaggggaagatcaagaagatagatgagctgaaaaagcaaataganag

SEQ ID NO: 47817 - DNA, 264 bp, Glycine max
  Clone ID: 701134610H2
ggcaaagttaataaaattctttgagttgaacacaggggccaagattccttctgttgggttaggcacttggcaagctgagcctggtgttgtagccaaagctgtcaccacagccattctggttggatacaggcatattgattgtgctcaagcgtataacaatcaagcagagattggttctgctcttaagaagctttttgatgatggtgtggtgaagcgtgaggacttatggatcacctccaaactctggtgttcagatcatgcttc

SEQ ID NO: 47818 - DNA, 263 bp, Glycine max
  Clone ID: 701134612H2
cttttgtcttcgttccattatctagttctcaattctcttcaccctttgcctctgaaagaaatgggtagtcttgaagcggaaagaacaacagtaggattggcagcaagagacccttcagggattctctccccatacacctacaatctaagaaacacaggccctgatgatgtttacattaaagttcactactgtggaatttgccattctgatctccaccagattaaaaatgatcttggcatgtccaactatcccatggtcccagg

SEQ ID NO: 47819 - DNA, 262 bp, Glycine max
  unsure (1)..(262): unsure at all n locations; Clone ID: 701134613H2
cttctaatgccatcatccaatgcacctcttcttcttcgtttgantatgacgtgtttgtnagcttccgcngtgaagacacacgcaacagcttcaccgcttttctttttggagctctgaaaaaacaaggcatcgaggccttcaaagatgataaagacatcaggaaaggcgaatccatagcaccagagctaatacgagccattgaagggtctcatgttttcgttgttgtcttttcaaaggactatgcttcctcaacttggtggct

SEQ ID NO: 47820 - DNA, 261 bp, Glycine max
  Clone ID: 701134614H2
gctccctgagagagctcgtcgcggcggttgcagaagaagattgcaagatgaagttcaacatcgcgaatcccaccactggatgccagaagaagctcgagatcgacgacgatctgaaactgcgagcattttgggacaagaggatctcacaggaggtcatcggagatgcactcggtgaggaatttaagggctatgtcttcaaaattaccggaggttgtgacaaacaaggatttccaatgaagcagggagtgctgactcctggtt

SEQ ID NO: 47821 - DNA, 259 bp, Glycine max
  Clone ID: 701134615H2
gctcgccttgcttcgccacaacagcaactgcagcaatggctcccaaacgaggtggaaaggctccggctcttgccgctaagaagaagcctgagaaggtttcgaatccgttgttcgagaagcgtccaaagcagttcggaatcggaggggcgttgcctccgaagagagacttgactcggttcgtgaagtggccaaagaatgttcaaattcagaggaagaagaggattctgaagcagaggttgaaggttcctccagctttgaa

SEQ ID NO: 47822 - DNA, 256 bp, Glycine max
  unsure (1)..(256): unsure at all n locations; Clone ID: 701134616H2
gcttgatgatgtcactttccatcaatgtgtaaatttgacaaggttcaactcagagaagacagttagttttgtaccacctgatggtgaatttgaactaatgaagtatcgtataactgagggagttaatcttccgttcaaagtattgccaaccatcaaggaacttggtcgatcacggatagaagtgaacgttaaggtaaagagtgtttttngtgcaaaaatgtttgcacttggggttgtagtcaagattcctgttcca

SEQ ID NO: 47823 - DNA, 258 bp, Glycine max
  Clone ID: 701134617H2
ctgaaattcaaatcccttttttttttgtttgatattaatctatggtaggatatagaatctgaagctgaaaaaaggggttaattgttttgcagaatcagtataattgtagagagcgagatggatcactatggttcttctggaggaagctggacaatgatcccaacccacaattcccaatcccaatcgaaccaggaccctaacctctttctgcaacaacaacaacagtttctccagtcacaaccttttcagcaagcacta

SEQ ID NO: 47824 - DNA, 257 bp, Glycine max
  unsure (1)..(257): unsure at all n locations; Clone ID: 701134618H2
tttaactcgaccttgtatgatgaatgggttaacangggcaatgcaccggcactgcccganactcttaagaattacaacaagctggtgtctcttggcttcaagattatattcttgtcaggaagaacactggacaaacaggccgtaacagaagcaaacttaaagaaggctggctaccacacatgggaaaaattaattctcaaggatccacaagatccttccactccaaatgcagtttcatacaaaacagcagcgagaga

SEQ ID NO: 47825 - DNA, 261 bp, Glycine max
  unsure (1)..(261): unsure at all n locations; Clone ID: 701134620H2
tactcactaatcatcatcactaacaccantnaggagaaaaatggagataganaagagcactaagggcagtgcggaaataggagananagangnnnnnnnnnnnnnnnnnnntcgacgaggaggcatcagaacnttacctgtcattcntggcaaatgnagtgtgtgacagatttgcaagtnctggntttcatggtaacttgataagttanttgacccaagagctgaacatgccattggtagctgcctcanacacactgacna

SEQ ID NO: 47826 - DNA, 262 bp, Glycine max
  unsure (1)..(262): unsure at all n locations; Clone ID: 701134621H2
aacaattcaaaggtagtgttgattgattctttgcagtcatgggagtnccacanaaganaanananaaatcagaatactnctatngnngttcanttcacngcgtcanagacnangccatcggtggctatgactcctgnntttgaagaactggcttcaagggtatccggaagttctgnntctnactgntgatgtngatgaagtcaaggaggnagccaccaaaatggatntaaaggcaatgccaanatnntngnngctgaaggag

SEQ ID NO: 47827 - DNA, 268 bp, Glycine max
  Clone ID: 701134623H2
acaatgaggcctgctcttgctttgcttcctcttctatttgctttcttgttagctgccactacagaatcaagaaaagatacaggggaatattggaaaatgatcatgaaagatcaggaaatgccagaaggacttcaaggtcttgtttcatttcaatctgaaaataaccctaagactcaagagcagcttggtaaaggttccaaaaaccattgtgaagagtctctagttacaaatacacaagttaatagtgacttcgaacccataccaagtg

SEQ ID NO: 47828 - DNA, 268 bp, Glycine max
  Clone ID: 701134624H2
gcaagctccaagttgatgggagaagctacaaatcatacaacttgtgatacctttgaagaagtgtgtgttagtgagatcaactttaaaggagaggtatcatcataaaagaaaaacgtgaaattggattcatccatgtcacttgaacatcctttgttgatacacttctacccttaatactgcctccttaacttgtgcatcctggttagcttgatctgtcataggggtatctgcactagcttcatttgcgagtgctggagggaaatttatt

SEQ ID NO: 47829 - DNA, 267 bp, Glycine max
  Clone ID: 701134625H2
ctcagcctcaacaacacaaggattcttcggaggtttcgggttcagctgcggagaaagaaggtggacgcttaacgatttcgatatcggaaagcctcttggaaggggaaaattcggtcacgtctatttggccagagagaagactagtaatcatattgttgctttgaaagtactcttcaagagtcaattgcaacaatcccaagttgtgcatcaacttcgacgtgaagttgaaatacagagtcatctccgacatccccacattttgcgcct

SEQ ID NO: 47830 - DNA, 260 bp, Glycine max
  Clone ID: 701134629H2
tggaggggaaggagcaggatgtgtcgttgggagcgaacaagttccccgagagacagccgattgggacggcggcgcagagccaagacgacggcaaggactaccaggagccggcgccggcgccgctggttgacccgacggagtttacgtcatggtcgttttacagagcagggatagcagagtttgtggccacttttctgtttctctacatcaccgtcttaaccgttatgggagtcgccggggctaagtctaagtgtagtacc

SEQ ID NO: 47831 - DNA, 258 bp, Glycine max
  Clone ID: 701134630H2
gatcatccttccaggttgaagcactggcttctcctaggcttagctctccttacttcaggacttattcttcacttcactcatgccattcctttgaataaacaattgtacacgctgagctatgtttgtgtaacatctggagcagcagcattacttttttcagccttctatattatggttgatatttggggtttaacattcttgttcttgcctttgaaatggattggcatgaatgccatgcttgtttatgtcatggcagct

SEQ ID NO: 47832 - DNA, 258 bp, Glycine max
  unsure (1)..(258): unsure at all n locations; Clone ID: 701134631H2
gtaaccaagattgaggaaactaccccagaacagccagccaccgaggttactgccccagaaacagtcaacgaagaagcaaaagaggaagcagcagttgagactaatgaggcaacagaagttacagaggaagggaaggctgagannnnnnnnnnnnnnnnnnnnnnnnnnnnnnagactaaagaaaccgaatcagcaccagtggaggaagagaagcaggaggagaacaaaccagctgaaaccgtagaggaacccaaaaca

SEQ ID NO: 47833 - DNA, 258 bp, Glycine max
  unsure (1)..(258): unsure at all n locations; Clone ID: 701134632H2
ctctcagacttctccctcgtgccaccccnactacctccgtccagagccgccgtgccacgcctccgctgcgcgccaccaccggcgtcgtccagcgcgtgcatcccatgtgaaacctggtcaagtcatccatagcaaatcatattgctattaatagtgatccaaaaaaaatagaaaccccttcaaaattggcatagaagtagaagcattctttttccttgacatgattgattgaacaatgatgtgtgagtttttgtnaat

SEQ ID NO: 47834 - DNA, 256 bp, Glycine max
  unsure (1)..(256): unsure at all n locations; Clone ID: 701134633H2
gtgaganaaaataaaaatcaaagagcataatgtcagggatcattcacaagattggggagacccttcatgtgggagggcacaagaaggaggaggagcataagggtgagcaccatgctggagaatacaaaggggagcaccatggtgaacacagtagtgagtacaaaggagagcatcatggtgaacacaaagctggagagtaccatggtgagcacaagccagagcacaaagaggggttcctagacaaagtcaaggacaa

SEQ ID NO: 47835 - DNA, 258 bp, Glycine max
  Clone ID: 701134634H2
ctttggtattccaatggccactgttgaggttgtgtcagcaaaggtttccctcccagaggacacaaaagaggcatgcattgaaggctgatgagaagaagaacacagaagaagttgttgagactccaacaccaacaccagaaaatgtcgtcactgagcaaacaaaggaggaaagtactgaggccccacaacctgcagcttcagaagacaagccctcggttgaagttgtgtctggaactgtcacagaagagccaacagttt

SEQ ID NO: 47836 - DNA, 257 bp, Glycine max
  unsure (1)..(257): unsure at all n locations; Clone ID: 701134635H2
gcaacagacattattctgctnggcctgggcttgctcttcgtcngctggtggtgncggcgctggtccancancggcggcggcccgaagaacctccctccaggccctcccgggtggcccatcgttggtaacctcttccaagtgattctgcagcgccgtcacttcatttacgtgatccgcgatttacgtaaaaaatacggnccaatncttcagcatncagatgggccagcgtacgctgatcatcgtgancagtgcggant

SEQ ID NO: 47837 - DNA, 259 bp, Glycine max
  unsure (1)..(259): unsure at all n locations; Clone ID: 701134636H2
canagatgattgcagtncttctgttgaaatggatctttacgaaagcaactttcaggaaaatgangaaacccttnctgatggccctcanaatacctcatcaagcatgtnnaccnagcccnncatctagcagcagatgttttgcttcccggaagtcaggcaaacggtgganaaggcggtattatttacaggngaaagctcgtnaancaacgtttgaanaanagtaggaagtggaaagcgtagatcntgatgacctattgtt

SEQ ID NO: 47838 - DNA, 201 bp, Glycine max
  unsure (1)..(201): unsure at all n locations; Clone ID: 701134637H2
ctcactttcctaatcttaagtttggtattcatctgtgtcaatgttcatgcatctttcttcctcccagaaaccannnnnnnnnnnnnnnnnnnnnnnnnnnnttcatttcaggttgttcaccagtttgagttgttggatctcctccactgcttcttctcctgatcctgttctgtttcaaatttcaacccaaggagcttgggg

SEQ ID NO: 47839 - DNA, 261 bp, Glycine max
  Clone ID: 701134638H2
tgacattgccgacgccaccaaatacacaaccttaactttcccacaacactacccatccatcattccgttttctctctagattttttcagttagttattgctgtcttctttttgtgtgtgccaacaacacagaaagagagagaaagacatggctctgaaccaatcaaaggccgtgttgttgagggtgagtttggtggtggtggcgctgtgtatagcaggatacatagtgggtccccctctctactggcatttcgttgcagtg

SEQ ID NO: 47840 - DNA, 265 bp, Glycine max
  Clone ID: 701134639H2
gaaaatcctcttccattcaacaaaccctcacgaagagctaaagcaaccaagagagtgaattatggcttgctggtctgcagaaaatgccacgaaggcctacctcagcactttgaaaatgggtcaaaagtgcaaagagccagatgtagcagagtttatatcagcactagctgcaggaaacaatgcacaacttatggttgtggcatgtggtggtgcagcagactccaccacactagcattggttactgctgctcaccaaactggtggc

SEQ ID NO: 47841 - DNA, 268 bp, Glycine max
  unsure (1)..(268): unsure at all n locations; Clone ID: 701134640H2
tctctctctctctcgcatcacaatttcatcaaaaccttttaantcttcatagtnnnnnnnnnnnnnnnnnnnnngaaaaaacaaaaagtccaaaccatggctcagaaaaccgagaaagaagaaaccgacttcaaggttcccgaaacgattacgctttgcgttaacaactgcggcgtcaccggaaaccctgctacgaataacatgtgtcagaagtgcttcaccgccttcaccanctctaccgccaccacgtccggcgccggnggtgccg

SEQ ID NO: 47842 - DNA, 257 bp, Glycine max
  unsure (1)..(257): unsure at all n locations; Clone ID: 701134641H2
caagtacccaagctcaagtaacaggttgagcttccactacattggactcntgnnaacntgaaaaggatgccatcctcaaatgggaatccatcaaaccaactgttataactntccctcgcaaagccttggccattgttataatcaacagccaaacccacgagatcttaattgatctaaaggcaaggcgcattgtctccgacaatattcactccgggaatggcttccctaccctttccgttgatgancaagtcgttgcc

SEQ ID NO: 47843 - DNA, 261 bp, Glycine max
  unsure (1)..(261): unsure at all n locations; Clone ID: 701134643H2
ctccaatagcgtatatttaagttgttgcagttaaaaagctcgtanttggaccttgggttgggtcgatcggtccgcctccggtgtnccaccggtcggctcgtcccttctgccggcgatgcgctcctgtccttaactggccgggtcgtgcctccggtgctgttactttgaagaaattagagtgctcaaagcaagcctacgctctgtatacaaacnagagaaacnanaaaangaaaannananaaanaangnagnannannnaa

SEQ ID NO: 47844 - DNA, 260 bp, Glycine max
  Clone ID: 701134644H2
catagccgtttgatttgaaaacacttttccttttaagtgttctagttagctagtcctgtctgtgctgtatgagaaaaccaaaccactaaaaattactatgagcagagaattaaaaaaagtgttttgggggtgaagggaaaaacatgctgaaaagcttgtgttctcggatctgaagggttttgacttttgaaatcactctagtgtgtgcttttggcatacctttatatggagttatactctgaagcaggagaagatggaag

SEQ ID NO: 47845 - DNA, 259 bp, Glycine max
  unsure (1)..(259): unsure at all n locations; Clone ID: 701134645H2
gcgaaacgntgtcgttgcgcnaatcgnggcgttgntgttggtggtgctantcgcngtgagtgtggtggtggaggctcaggagnactcggacgtgaagacgctggtgaagcacatgcacgggaagaagtactgcgacaaaggatgggaatgtaagggctggtcaatttactgttgtaacctnactattactgattatttccagacntaccagttcgaaaatctcttcncnaagcggaactcgccggtggcgcacgccgtt

SEQ ID NO: 47846 - DNA, 257 bp, Glycine max
  Clone ID: 701134646H2
ggtggaggcccgcagcgatactgacgtgcaaatcgttcgtctgacttgggtataggggcgaaagactaatcgaaccgtctagtagctggttccctccgaagtttccctcaggatagctggagcccgcgggcgagttctatcgggtaaagccaatgattagaggcatcgggggcgcaacgccctcgacctattctcaaactttaaataggtaggacggtgcggctgctctgttgagccgcgccatggaatcgagagct

SEQ ID NO: 47847 - DNA, 255 bp, Glycine max
  Clone ID: 701134647H2
acagtttcctctagagattccgccgattctatttgaagagacttcacttccagcaggattgcacggttcacatactaaagatgtttatagtatttcagtgttgcctgaggaagatgaaaatgcaaattgcgcttcaccactacctttcttgagcatcttaggggttcctaatcaagttaaaagcccaatgtgcttagatgatcccataaattgtcaaaactgcattgattttcaaatgaagaatgcgggtgtgta

SEQ ID NO: 47848 - DNA, 255 bp, Glycine max
  unsure (1)..(255): unsure at all n locations; Clone ID: 701134648H2
cnaatctcttngttcctcacgattcgttccatttcttccaaaatggccaaagacccagttcgcgttctcgtcactggagctgcagggcaaattgggtatgctcttgtccctatgattgctaggggagtgatgttgggtcctgaccagcccgtgatcctccacatgcttgacattcctccggcagcagagtcattgaatggggttaaaatggaattggtggatgctgcattccctcttcttaaaggtgttgttgcc

SEQ ID NO: 47849 - DNA, 255 bp, Glycine max
  unsure (1)..(255): unsure at all n locations; Clone ID: 701134649H2
tcacactctacgaccttagctcttcctctgggttgaanaaacttgatgagtaccttctcccacgcagttacatcaccgggtaccaagctacaaaggatgatcttactgtttatgcagctttgccaactgctccatcagatgaatatggaaatgtttccaggtggtacaagcacattgntgctttgttgagaatctctggtgttactggcgagggatctggtgttattgttgagggatctctagttgcagagcctg

SEQ ID NO: 47850 - DNA, 255 bp, Glycine max
  Clone ID: 701134650H2
agtgggccctggatatcatgggtcgccggcgaccatggattgctagtctttataagactgacaaactagaaccccttggggaagcaagagagattttgaaatttgcacgagctcaggttcaaaaacgggctcctaatctccaacatcctttggtttgcattgatgttattgaagcaggagtagttgctggtccccgtgcaggactctggaaggaagttgaagcatctgaaggacttataaagtcagatactagcc

SEQ ID NO: 47851 - DNA, 256 bp, Glycine max
  Clone ID: 701134651H2
attgaggtgtgcatgttcattattgggcaccgatggattcagtttctgtgcaaatagcgacgtcaaaatttgttctttgccccgcggcgacggccagttctaagaagaatgccatcatcaatttcagttccaatttcaaaggaactctcaccaaaatccatgccatttccccaaatggctctgcctctagctgcacttcgcgtgtgtctgtgtcaagtttaaagacagacaagaacaaaggcagaagtaatcttga

SEQ ID NO: 47852 - DNA, 258 bp, Glycine max
  unsure (1)..(258): unsure at all n locations; Clone ID: 701134652H2
gctcgtgcctctagggttatcatatctccatttccatttcctctctctcngtttccnagaatcttaagctntgggaaagtcttacccaaccgtgagcgctgattaccagaaggccgttgagaaggcgaagaagaagctcagaggcttcatcgctgagaagagatgcgctcctctaatgctccgtttggcatggcactctgctggaacttacgacgtgagctcgaagaccggtggtcccttcggaaccataaagcaccc

SEQ ID NO: 47853 - DNA, 264 bp, Glycine max
  unsure (1)..(264): unsure at all n locations; Clone ID: 701134653H2
ctccccaaaacctctcatttctctcttcatctccttccaatggnttccattcccacactctctnccaccnacgacccacaatctctgctcactcctcaccccattcaaacccanacaaccactgcactctctctcccacctctctcttcggcaccaggatcaccctcctacgcgccacctcatcgtctcgttccctccccaacaccaattgccgtgcgacatcagccaccgtgtcgtttagcctccccaccccgaaaccccttt

SEQ ID NO: 47854 - DNA, 263 bp, Glycine max
  unsure (1)..(263): unsure at all n locations; Clone ID: 701134654H2
aacgtccccaacactgtgttcctgttcttcttcttcgatggcggcaacctcaacancactggcttctcaactctacattggcctnccgccgcccatgcctcaagcttgattctttcaattctcaatctttctctgtcttcgaccccaatcttcgcctatccctctctcctcccagaccctcacgcgccatcgtcnccatggcaggcaccggcaagttctttgttggcggnaactnnnagtgtaaggaacaaaagnctccatca

SEQ ID NO: 47855 - DNA, 265 bp, Glycine max
  unsure (1)..(265): unsure at all n locations; Clone ID: 701134655H2
caattttctagggttttattcattttccgatggcttctgcagatgttgagtaccgttgctttgtcggtgggctcgcttgggccactgacgaccatgccctcgagagagccttctctcagtacggcgaaatcgttgaaacgaaggtctgtttgttgcaggcatcacatctgatctcacacgattcggattcggaattttctcgatcncgttctgatctgtgatctctgatctgtttgcgttacttgatcttatgatacttgtgtta

SEQ ID NO: 47856 - DNA, 266 bp, Glycine max
  unsure (1)..(266): unsure at all n locations; Clone ID: 701134656H2
ctctgcacccctccctccttgtttgtatcatatcaggcagctcanaaggcaaagatagatccatgtccaccaccgcaactacaacctctgaagaagttagcagcaatgagtggaaagtcatacacatgagcgagcaagaggaggatctcattcgcaggatgtacaagctagtcggggacaagtggaatttgatagctggtcgcattcccggtcgtaaagcagaagaaatagagagattctggattatgagacacggcgatgctttt

SEQ ID NO: 47857 - DNA, 264 bp, Glycine max
  Clone ID: 701134657H2
agcaaagttttggggttgttggtttggtgatcctttctctgagcctgaggcattttctctgtcactacattagtgtgtgtctgagtcgtagaaataaaagtgtttctgtgaagtttgaagattaagccacaacatatattgcttaaaagaaggattggagagttgagaacaaggctgttttgtggatcattcaatggctatcaaaaggataatctcttggaatatcaagcaagtcaacttgatttgagctaatcatcgtcggtt

SEQ ID NO: 47858 - DNA, 262 bp, Glycine max
  Clone ID: 701134658H2
ctctctctctctgtatcttgcgaaatccgttcccctattctgcttttcgagttgttgctaaagagtgatggactcaccgcccagcaatcaccacgcggtcgacggagacgccaacgacgtcgttagatccttttcccaccgcgacgacgatgaagacggcaagccccaacccctcaccggggacggcgccagtcctggaaagatattcatagggggtttagcgagagaaacgacgattgcgcaattcatcaagcactttggt

SEQ ID NO: 47859 - DNA, 222 bp, Glycine max
  unsure (1)..(222): unsure at all n locations; Clone ID: 701134659H2
tcttccaattcttctggagctgcttctctgcttcactcactaggaagaaaccctggagggtggagaaacattaacagatttagcacggctgcagcagttgaggaactaatcactccacaagtttcaatacgttacacacagaacctgatanatgggcaatttgtggatgctgcatcagggaaaacatttccaacatatgatccgcgctcaggagaagtgatt

SEQ ID NO: 47860 - DNA, 258 bp, Glycine max
  Clone ID: 701134660H2
tgacttttcatggggtgatccagaataccatcaagagacattggaaaatttgagagttgctatcaaaagtaccaagaaactctgtgcggttatgctagatactgtgggtccagtaaacaagtattttccaataaaaatagtatcacccttcttcacagcctttgatagcccggtaaaatttaatggtaagagatttgaactagcttctttattttgatctggagttaagacaactaatgtgtctgcttcaagggtgat

SEQ ID NO: 47861 - DNA, 236 bp, Glycine max
  Clone ID: 701134661H2
gttgcaagagaaagagagcgagattccgatggcgactctggattccgacgtgcctatggttcccgccggcgagccctcgagcagcgccggtccttcttccaagaagcccaagcgcttcgagatcaagaagtggaacgccgtcgctctctgggcttgggacatcgttgtcgataactgtgctatctgccggaaccacatcatggatctctgcatcgagtgccaagccaaccaggcta

SEQ ID NO: 47862 - DNA, 257 bp, Glycine max
  Clone ID: 701134662H2
atggagagcaaagaggaagatgtaagggttggagcaactaagttctcagaaaggcaaccaattggtacagcagctcagggtgacaaggactacaaagaaccacccccagcacctttgtttgagcctggtgagctaaagtcatggtccttctacagagctggaattgctgagtttgtggccactttcttgttcctctacattaccatcttaactgtcatgggtgtcaacaggtcaccctccaagtgtgcctctgttgg

SEQ ID NO: 47863 - DNA, 254 bp, Glycine max
  Clone ID: 701134663H2
gctcccacccttcgttgacctcctattctcccctcatcggagctcaaatctccgatcccttcatccatatcgcttcaccgcaactttctcttcatccatcgcaagatctagttgaatctcaaccgcgctcctccgattcgaagctccactcactcaaatcctcttcagatctggggggtttgattgcgattctcactctgctgctcggatttgttcgtctgagatgtcgattttaccgaaaggcgattcggttc

SEQ ID NO: 47864 - DNA, 252 bp, Glycine max
  Clone ID: 701134665H2
gctcaatcaaaccctcgattgctctctcgggtatattggaaattaagggagtggatattaagcacaagagtgagatcaagagcgatcaacatggtatcttggtgtcggcaaacagcattggtgtttaccacgaccacttctacatttaccatcttgaccttgacattgatggtgttgccaactcttttgagaagacaagtttgaagactgtaagagtgacagatggaagttcgaagaggaaaagctattgga

SEQ ID NO: 47865 - DNA, 251 bp, Glycine max
  Clone ID: 701134666H2
ggactcacagcactgaaggcggagaatctgaagccagtaatcctcaaagctggtgttcccttggctgcatcttttgctggtttgatctatgcatggattgttgcaaggcaaaacttgtctaccaaagttttttcttcaccagaaaatgagtgtggttctccaaagatcacttgtcatcagggaactaaacatgaagaaagctttcatcacaatctttcttcttttgaagatgaagaatcatcaccttctcc

SEQ ID NO: 47866 - DNA, 255 bp, Glycine max
  Clone ID: 701134667H2
catagattagagcctggtggtgctgaatacaattatgcttcagcatcaaagggagccaaagttttagcttctaacaaagaagccagaggtgcctctgacattctaagcagaaacaaagacaaatatcttcgaaatccgtgttcttcagaagagaaatttgttgtcatagaactttcagaagaaaccttggtaaaaacaatagagatagctaattttgagcaccactcttccaatttcaaagagtttgaattatat

SEQ ID NO: 47867 - DNA, 251 bp, Glycine max
  unsure (1)..(251): unsure at all n locations; Clone ID: 701134668H2
tccgttaagaggtttccaaaggatccaaaagatgcaacaagcaagaacctngtatgtggaaagaatgtgctgattgacatgagcatacatacagcatatgttaagaccattcgtgctgcacaacattacatttatatagagaatcaatatttcattggctcttcatacaattggagtcaacataaagacctaggtgctaataacttaatcccaatggaaattgctctaaagattgctgaaaagataaaagc

SEQ ID NO: 47868 - DNA, 257 bp, Glycine max
  unsure (1)..(257): unsure at all n locations; Clone ID: 701134669H2
aattcctcgtgtgactatagnagatngagaggaaatcacataccaaaaagtcacaagcgtccgtcanaaggggcgcacaccaccttgnggcantgcagacctctgatggccattggcctgctcaaattgcangtcctctcttctttcttcctcctttggttttttgtatgnatnttacnggaaatcttgaatcagtatttccagangaacatcgcangcgnnantcttcgttacacatattatcnccngaatganga

SEQ ID NO: 47869 - DNA, 259 bp, Glycine max
  Clone ID: 701134670H2
ccgactggctgcacaccgtgttgctcaacactacaacatgcaaacaatggttcaagataatggcttagatggccagggaagtaaaattctggttaggaagttacctgaaagcaagtaccctgtagttcgattatccgaaatacctgctaagcagttggaaaatgataaatctgagcagaaaaaaattgttattagacctaggcctaataaaaacagtttgaatgatgctaacggagttgggaggaaaggaaacccttta

SEQ ID NO: 47870 - DNA, 262 bp, Glycine max
  Clone ID: 701134671H2
agcatgttgtcattattccctaacttgttcctcttcctatcactgttaattggtctatgcaattgcagggtgcaaaccctaaacactaacccaactcacttcaacccacaggtcccacccctccgaaccctctcgtcctcgaagcgcttcgaggggtcctcggagttcgtcaagctgaaataccacatggggccggtgctttcatctccgatcaatatctacctcatctggtacggcaagtggccccaatcccagaagctcc

SEQ ID NO: 47871 - DNA, 262 bp, Glycine max
  Clone ID: 701134672H2
gccgatccgctttacataggttgtgtggagcagtgtaagaaaactggatgtgtaggggatagatgctttcaacattgtaaattctcatcagatggaaaaccaattgatggtccatggtatatgcatgaacccctctatctgaggtggaaacaatgggactgttgcactgactgtagatattactgtatgctatctagagaggaagaaagaacaaaacttggtgacaagcctgtcaagtatcatggaaaatggccattccatc

SEQ ID NO: 47872 - DNA, 260 bp, Glycine max
  unsure (1)..(260): unsure at all n locations; Clone ID: 701134673H2
gccaggccttgatggtgtggtgaagcaatgtcgtggcaagaaccttttcttcagnactgatgttgagaaacatgtctatgaggcagacatagtgtttgtctctgtcaacaccccgacaaaaactcgcggtcttggagccggtaaggccgcggatttaacgtactgggagagtgcagcacgcatgattgctgatgtatccaagagtgacaagattgtggtggagaaatccactgtccctgtgaaaactgctgaggccatag

SEQ ID NO: 47873 - DNA, 259 bp, Glycine max
  Clone ID: 701134674H2
cccgcctagccattgatttggaaaagtccaactccaaggatgagtaagcttcagagtgatgctctaagagaagctatctcaggaatcatggctgattccaaggaaaagaacaggaaatttgtggagaccattgaactccaaattgggttgaaaaattatgatccccagaaggacaagcgtttcagtggctctgttaagttgcctcatattcctcgccccaagatgaagatttgtatgcttggagatgcccagcacgttg

SEQ ID NO: 47874 - DNA, 256 bp, Glycine max
  unsure (1)..(256): unsure at all n locations; Clone ID: 701134675H2
tgagggcatcagagatagcgaagaagttgaatctgcaacctcacccagaaggtgggttttacgtggagacattccgagaccattccgtccagctttcgacctctcagctcccccccgaatacaaantggatcgccctgtatcgacctccatctattttctcgttccttctgggagtgtgtctcgcctccatcgcataccctgcgccgaaacctggcatcattacatcggcgaccctctcaccgtagtggaattgaa

SEQ ID NO: 47875 - DNA, 257 bp, Glycine max
  unsure (1)..(257): unsure at all n locations; Clone ID: 701134676H2
cctgcctcttcctcacccctttctccanctaacgagtaaggaaaaatggcgcgtaagaagatcagagagtatgactcaaagaggttgttgaaggagcactttaagagactttctggcaaggagttgccgatcaagtctgcacaaattactgcatcaactgatttcactgagctacaagagaaggaaccctggctttcatcttctaaattggttgtgaaacctgacatgttatttggaaagcgtggcaaaagtggttt

SEQ ID NO: 47876 - DNA, 256 bp, Glycine max
  unsure (1)..(256): unsure at all n locations; Clone ID: 701134677H2
tctgaaaccactaccgtttcgtcgtcaccatgccgcaaggggattacattcgagcgtcacagaagagactatggctaccgtcttgatcacttcgagcggaagcgcaaganagaggcgcgtcaagttcacaaacgttcttcaatngcccagaaggctctgggtattaagggcaaaatgattgccaagaaaaattatgctgaaaaggcacagatgnagaagactttggctatgcatgaagaatcaacgtctaggcgct

SEQ ID NO: 47877 - DNA, 252 bp, Glycine max
  Clone ID: 701134678H2
taagtatgaactaattcagactgtgaaactgcgaatggctcattaaatcagttatagtttgtttgatggtatctactactcggataaccgtagtaattctagagctaatacgtgcaacaaaccccgacttctggaagggatgcatttattagataaaaggtcaacacaggctctgcctgttgctttgatgattcatgataactcgtcggatcgcacggcctttgtgccggcgacgcatcattcaaatttctg

SEQ ID NO: 47878 - DNA, 252 bp, Glycine max
  unsure (1)..(252): unsure at all n locations; Clone ID: 701134679H2
ctggtctgtcaggattgtatacagtagttatgaaagctgcaggtnctagcagaagggtatttcaacttttggatcgtacctcatccatgcctaagtcgggagataaatgtccactgggtgatcacgatggggaagtagaactagatgatgtgtggtttgcctatccatcacgccctagtcatccagtgctcaagggcattacattgaaactgcatccaggaacaaaggttgctcttgttggtccaagtggtg

SEQ ID NO: 47879 - DNA, 251 bp, Glycine max
  unsure (1)..(251): unsure at all n locations; Clone ID: 701134680H2
gaaaatgaaggtccttgttttcttcgttgctacaattttngtagcatggcaatgccatgcgtacgatatgttccctctccgaatgaacactggctatggtgcccgtactccggaggtgaaatgcgcaagttngaggcttgctgtggaagcacacaacatctttggctttgagaccattcctgaagagtgcgttgaagcaacaaaggaatacatccatggcgaacaatatagatcagactccaaaacagtta

SEQ ID NO: 47880 - DNA, 252 bp, Glycine max
  unsure (1)..(252): unsure at all n locations; Clone ID: 701134681H2
gctgagtctacactctcggtcaaggactctgaattggctgcattgaagaacaatttagatgaactagaagaattgagaganatgaaagangacattgataganagaatgagcaaacagctgccatactgaagatgcaagcagttcaactagctgaaatggaattgctttataaggnagagcaggttctcagaaagcgatattttaataccatagaagatatgaaaggcaagataagagtttattgtcggtta

SEQ ID NO: 47881 - DNA, 254 bp, Glycine max
  Clone ID: 701134682H2
ccttgattcagagcagagcgaaccttgaagagctatggctgtcggaaagaataagaggatttccaagggaaagaagggtggcaagaagaaagccgctgatccctttgccaagaaggactggtacgatatcaaggccccttccgtctttcaggtcaagaatgttggcaaaaccctcgtctctcgtacccagggaaccaagattgcttctgaaggactcaaacatagagtgtttgaggtctcattggctgatctcc

SEQ ID NO: 47882 - DNA, 252 bp, Glycine max
  Clone ID: 701134683H2
ctggatggaacacaagaaggtgcttatcaatgggttactatcaactatctattgggaaacttgggaaaggattattcaaagactgttggggttgttgatcttggaggtggatctgttcaaatggcttatgccatctcagagacagatgctgccatggctccaaaagtagtagatggtggggatccatatctcaaggagatgttcctgaggggaaggaaatactatctctatgttcacagttacttgcactat

SEQ ID NO: 47883 - DNA, 252 bp, Glycine max
  unsure (1)..(252): unsure at all n locations; Clone ID: 701134684H2
accactactactcactcactgcagatctcaattgcatcgctgtccatggctaccatcgttagcatcaaggcccgccagatcttcgacagtcgtggcaatccaactgtcgaggtggatttgacttgctccgatggtacttttgccagagctgctgttccaagtggtgcatccactgggatttatgaggcccttgaattgagagatggaggatctgactaccttggaaagggtgtatcaaaggctgntgacaat

SEQ ID NO: 47884 - DNA, 258 bp, Glycine max
  unsure (1)..(258): unsure at all n locations; Clone ID: 701134685H2
ggtcactcgcactctcgagaagaaaggcgtcctcgccaggatccgtgccgaactcagggcgagtgtgttcgaagccatcgaagaggaagatcgtgtgattgagaaggaacaaggtctacctcctgcattgctangtagttgcaacgatcgagctaagcagcttcacgcttctcctccagggagacttcttacggcaatgatatgtgaataccttgactgggcgcagttcagtcatacgctaaaagtttatcttccggg

SEQ ID NO: 47885 - DNA, 259 bp, Glycine max
  unsure (1)..(259): unsure at all n locations; Clone ID: 701134686H2
caagtgcgagaagaccaacaagtgtgaganatttggggtggatgctatgaagaaggtgatggttagtgatggtgcaacaaggttttacacaatggatggaaaacccatattccatttcttgaacacttcaactttcactgagtacacagtggtggattcagcatgcatcgtcaagattcacattgatggtagtaatggcgatctcaaccgcaatatcaaaagactcaccttactcagtngtggcgtatcttcgggtgtt

SEQ ID NO: 47886 - DNA, 226 bp, Glycine max
  unsure (1)..(226): unsure at all n locations; Clone ID: 701134687H2
atgtccgggatcatccacaagattgaggagaccctccatgtgggagggcacaaganagaggagcacaaaggagaacaccatggtgagcacaaaggtgaacacaaaggagaacaccatggtgagcacaaaggtgaacacaanggagaacaacaccatggggagcacaaggagggacttgtggataagatcaaggacaagatccatggtgatggccatgacaagggtg

SEQ ID NO: 47887 - DNA, 261 bp, Glycine max
  unsure (1)..(261): unsure at all n locations; Clone ID: 701134688H2
cttcccggagctctgaacttgaccgncgccattttcacatcaaaacgcttcaactaaaaaaatggcgttcttgtggaacaaaactagtatcgcttcccattttcgatctcactctcagaagactgagggtttgacttcttttccgcgccgtcgattccacgtcgaacccggggctcgtgaaaaagctctcttggcagaagatgcaacgctgaaaccgttcaaatcatataagaagagtgtaaaacagctcagaaaaattgg

SEQ ID NO: 47888 - DNA, 260 bp, Glycine max
  unsure (1)..(260): unsure at all n locations; Clone ID: 701134689H2
gggtacacctgtggaccacgancnaccacataaggaagcctgacaccanactctaanccaaaaccttaaggcncaggtttatgggtcttctnctcacttatatggtgttcaancttnccacttctacccgatgtgggacttcacctcacacttgtaacccaacanatctcccnctcaagtgtgagtctcttccacatggtagtctccccctcgagcggaagtctttatnatccangagtanagccatggccacctgcggt

SEQ ID NO: 47889 - DNA, 257 bp, Glycine max
  Clone ID: 701134690H2
tggctgcaatggcttcaagtcaggaagaggtgacccttttgggagttgtgggaagcccatttctacacagggttcagattgctctcaagttgaagggagttgaatacaaatatttggaagacgatttgaacaacaagagtgatttgctcctcaagtataacccagtttacaaaatgattccagtgcttgttcacaatgagaagcccatttcagagtcccttgtgattgttgagtacattgatgacacatggaaaaac

SEQ ID NO: 47890 - DNA, 256 bp, Glycine max
  unsure (1)..(256): unsure at all n locations; Clone ID: 701134691H2
gcaaatctgcatagcgatggcgcctccgaagctcttcgtatttgcgcttncagtaaccctgatttttgccatcgttggggccgaagccgatgtttccgtcgaaggagccactccagagcctgatacctccgccatcaagatccaattagatcaactcaattccaagatccaaattctcgagtctcaaatcagtgaaaagttggaagaagtgaagaagaaggacaaaattatagcagaaaaagaaaattccattgaa

SEQ ID NO: 47891 - DNA, 254 bp, Glycine max
  Clone ID: 701134692H2
gagaagacaagtttgaagactgtaagagtgacagatggaagttcgaagaggaaaagctattggacaactgaggttgaaactgccaagactgaaaatgatgcaaagataatacttgggttgagccctggtgagctttcagtggtgaatcctaacaagaaaacctctgttggaaatgatgtgggataccgtttgattccagcaatcccagctcatcctcttctcacagatgacgattatccacaaatacgtggcgc

SEQ ID NO: 47892 - DNA, 256 bp, Glycine max
  unsure (1)..(256): unsure at all n locations; Clone ID: 701134693H2
gtccctttctgttctcttcactcttggtcttgcgagagaaagccatgccagagacgaagattttnggcatgctgtttggccaaacactcccattccaagttcattgcgagancttctaaagcctggccctgcaagtgttgaaatcgatgatcaccctatgcaaattgnagacacacagtacccganaaccttcttctataaagaagaccttcatccaggcnaaacaatgaaagtacnattcagcaagcctnccttt

SEQ ID NO: 47893 - DNA, 252 bp, Glycine max
  Clone ID: 701134694H2
caagaatacaagcaacgggagcagacattgtgaagattgcaacaactgccttggacatcactgatgtggcacgcatgtttcaaataatggtgcattctcaagttccatttattggacttgttatgggtgatagggggttgatttctcgtatactttctgcaaaatttggtggatatctcacttttggtacccttgagtcaggagttgtttcagctcctggtcaacctactcttaaggatctattgtatctat

SEQ ID NO: 47894 - DNA, 251 bp, Glycine max
  unsure (1)..(251): unsure at all n locations; Clone ID: 701134695H2
gcggacttgtacgccgtgacgccgtcgtttttggtggtggaggttaagaaggacaacggtgacaccttggagtataaccagttctgtagcaaggagcttcgtccagctcttaaagatatcgtgtggaggacttctcctgcagagaatcctacactcgcttgaagaacaaccaagactcccatgctaattgtcgttcctttgtagttgtttntgttaattcttgtttcaggactgagatattttagttattt

SEQ ID NO: 47895 - DNA, 274 bp, Glycine max
  unsure (1)..(274): unsure at all n locations; Clone ID: 701134701H2
tgaganctgactctagctanaggatantaagattacaaganagaggaattgtntttganttggatccannaaattncangatgantgccagttaatttggcaggccagtttggtgacacnacatanactanggtgtntgntggaggcttggcctgggagactcanaagganacaatgaagaagtatttngagcaatttggtgagatcttngaggccgttgtcatcactgacaaagctactggaagntctanaggctacnganttgttactnttc

SEQ ID NO: 47896 - DNA, 269 bp, Glycine max
  Clone ID: 701134702H2
gcaggctctggttttgcggttagggtagctctttctactcaaaacaaaacaaaacatcaatttctgtttcagttcgcggagatcaatatttgtcgctgaggtcgatcgtcgataaaaggcaatgtttttgtgggattggttttatgggattctagcgtcgcttggcctgtggcagaaggaggccaagatcttattcttgggcctcgataacgctggcaaaaccaccttgcttcacatgctcaaagatgagagattagtccagcatcagc

SEQ ID NO: 47897 - DNA, 272 bp, Glycine max
  unsure (1)..(272): unsure at all n locations; Clone ID: 701134703H2
cggccgctcgcctgantttggctgtcaaaaaacccagggtgtgctcttggantggttgtagngctatggagtttgtttgtnttgttgcttggattggatagccatttgagtgaggtgtctggattacttcctcntggcttgttcttnataatcttggtaaagatggttctgcnatangcgggaatttccnanngcctcannttctgggnnatttccttggctgcggctggttgtaggcataacttacgggantgacactganttcttntgnt

SEQ ID NO: 47898 - DNA, 268 bp, Glycine max
  unsure (1)..(268): unsure at all n locations; Clone ID: 701134704H2
ggagattcaaaaggtgaaagagaaaattgtggaaaagacagatcaagtaccaaatgccacatgcacacctacacaaaaagcttcatcttctgaactcttcaagttcttttatggtcatgtcatatagctgcatcatccacttttaacaacctgtgcaaattctagtacacaccttgaacaactgttgaacaattccaagttttaaactcattcatggcctccactgtggaagtgcnatcatcntatagtgccaggnaacaagatgatt

SEQ ID NO: 47899 - DNA, 267 bp, Glycine max
  unsure (1)..(267): unsure at all n locations; Clone ID: 701134705H2
gnaaaaataaaaatcaaagagcataatgtcagggatcattcacaagattggggagacccttcatgtgggagggcacaagaaggaggaggagcataagggtgagcaccatgctggagaatacaaaggggagcaccatggtgaacacagtagtgagtacaaaggagagcatcatggtgaacacaaagctggagagtaccatggtgagcacaagccagagcacaaagaggggttcctagacaaagtcaaggacaagatccatggtgaggg

SEQ ID NO: 47900 - DNA, 266 bp, Glycine max
  Clone ID: 701134706H2
aaacagaacaacaatggcgacacttaaggttcctcagcctcttccccccgttgcagatgattgtgagcagctccgaaaagccttctcaggttggggaactaacgaggagctgattgtatcgatcttggctcataggaatgctgctcagaggaagcttatcagagaaacttatgcccagacctatggagaagatctcctcaaggccttggacaaagaactcacgagtgattttgagaggctggttcatctttggacacttgattctg

SEQ ID NO: 47901 - DNA, 264 bp, Glycine max
  Clone ID: 701134707H2
gtgggagataaagttgcctatgcacttcaacaaggtctgaaagttatagcatgcattggggaaactcttgaacagcgtgaagctggtacaacaacggctgttgttgctgagcaaacaaaagcaattgcagctaaaatatcaaattgggacaatgtcgttttggcctatgagccagtttgggccattggaacaggaaaggttgcaactcctgctcaggctcaagaggttcatgctgatttaaggaaatgggttcatgacaatgtg

SEQ ID NO: 47902 - DNA, 265 bp, Glycine max
  unsure (1)..(265): unsure at all n locations; Clone ID: 701134708H2
cttcttctagatttaaggaagatgggtaaggaaaaggttcacntcagtattgtggttattggccatgttgactctgggaagtccactaccactggccacctgatctacaagcttggaggcattgacaagcgtgttattgagagatttgagaaggaagctgctgagatgaacaagaggtctttcaagtatgcctgggtgcttgataagcttaaggctgagcgtgaaagaggaatcacaattgatattgccttgtggaagtttgana

SEQ ID NO: 47903 - DNA, 257 bp, Glycine max
  unsure (1)..(257): unsure at all n locations; Clone ID: 701134709H2
gtttccagctatcaggcaagggagatggcttaaccctgtcctttgccananccgctggaaactgaatgaaatctttgctactggggttgtgcttggaggttacttggcactgatgactgttatactcttctgggcaatcaaagagacgacattcttccccgacaaatttggagttagaccaattcatgacaatccagatgaaatgactgctgctttgtatctacaagtcagtatagttagccaggctttgatatttg

SEQ ID NO: 47904 - DNA, 263 bp, Glycine max
  Clone ID: 701134710H2
ttacttcttcgcatttgccctgcagtattatggccaaaagaagcatgctagcacctcatgaaagaggaagttgagctagagccgaagtttcagtaggtttcttaattcattgcctacttcaatgcagtatcaaagtggtaatagactttagtcaatgttgtgtctctgtgtcattaaaattcgttaccccaccccacaccatgcaggcccttgatgctttgtggtgtctttgctcagtcatgctagctgttcatttagacaaa

SEQ ID NO: 47905 - DNA, 262 bp, Glycine max
  Clone ID: 701134711H2
tgctgattctcagattgtctctgattatgtgcgttacttcctccatcaacacacaatacaacttggacaacctgcaacagttaaagttgctgcaaaccttgtccgacttctctcatataacaataagaatttcttagagaccgggttaattgttggtggatgggataaatatgaaggtggacaaatttatggagttcctctgggtggaacaatagtacaacaaccttttgctatcggaggatctggctccagttacttgtat

SEQ ID NO: 47906 - DNA, 262 bp, Glycine max
  unsure (1)..(262): unsure at all n locations; Clone ID: 701134712H2
agcctttacgtcctctcttcaatgctggctcagtttactacaagtcctctttgcctgctgaagctgtgtacgacantgagaaaagctntgatacggaattgaatgctccacttgaggttgttgatcctgagattgctgatataattgagcttgaaaaagctagacaatggaagggnctggaactgataccctccgagaatttcacttctgtctctgtaatgcaagctattggctctatcattactaacactcggaatgaagg

SEQ ID NO: 47907 - DNA, 264 bp, Glycine max
  unsure (1)..(264): unsure at all n locations; Clone ID: 701134713H2
ctgtactcgaancttcacaagtntccttcntttcaatccttctttctctccaaactctgtttttccttcgtgctaatcccaacgctanaanacccttaaaattcaattcccttaaacnctcatcggtttcgccncatgttcacctctttcaaccctttctctctcctcanatttcgnctccctacagactcttcagctgctgntntgcttctngcttcttcagtngcagttggcactgnncaggaccgtcttccagcagaatng

SEQ ID NO: 47908 - DNA, 264 bp, Glycine max
  Clone ID: 701134715H2
cttaaaataagataatttgaatgtacaagaagaaaaaccaacaattcacattaatgttgtggcaatatatattacaatcagaaacatgaaggacatgttccacaactttgttcaccacccaccatttttttcttatgccccaatcctattttcataacttcccataagttataacaaaataaagtttagactaatcactaagtctgctcaggtgtgacggtgatggacacactcagcaggcgtgactgggaacctagcagtgtc

SEQ ID NO: 47909 - DNA, 271 bp, Glycine max
  Clone ID: 701134717H2
ccgaggcgaagagaagagaaaaattaagatggaggggaaggagcaggatgtgtcgctgggagcgaacaagttcccggagagacagccgattgggacggcggcgcagagccaagacgacggcaaggactaccaggagccggcgccggcgccactggttgacccgacggagtttacgtcatggtccttttacagagcagggatagcagagtttgtggccacttttctgtttctatacatcactgtcttaaccgtcatgggagtcgccggggct

SEQ ID NO: 47910 - DNA, 261 bp, Glycine max
  unsure (1)..(261): unsure at all n locations; Clone ID: 701134718H2
ctgggcagcgggcactctcggtggctataatctttctgtggtgagttgtcaagntgtacacatcaaggaagaaaatccacaaggataaggatgctgagccaactgaatttgaggaatgcctcggacaggcattgtttgatctggaaaataccaacaatgagctgaaaagtgatctgaaagatttatacataaactcagctgtccaaattgatgtttctgggaaccgcaaggctgtggttatccatgtcccctacagattaa

SEQ ID NO: 47911 - DNA, 265 bp, Glycine max
  unsure (1)..(265): unsure at all n locations; Clone ID: 701134719H2
gctagttgtatggtttatgcgtgttacannnatattgntctgggaatattagtgttgaaaggtgcagaggcacagcgtgcgttctttgtgtttggggattctcttgtggataatgggaacaacaactttttggcaactacagctcgagcagatgctcctccttatggcattgatttcccaaccggaagacccantggccgttncnctantggntagaanatnccngnctgnatnagtcaatcacttggggcngaatccatttccc

SEQ ID NO: 47912 - DNA, 266 bp, Glycine max
  unsure (1)..(266): unsure at all n locations; Clone ID: 701134721H2
atggctcagactaccagaagttccctctccaaatgaaaactgggtttggtgggcaatacagcaatgaggtggcatgtgccagttggaggcttggcgtggaagcaaacaacgtagtcaagtggcaaactgttcctgcagcttgcggagagtacatagctgactacgttctaggagaccaatatagatcagattccaaaacagttaaccaacaagcttatttctatgcnaaatccctcaaactcaccaacaaagatgtctttgtcttg

SEQ ID NO: 47913 - DNA, 265 bp, Glycine max
  Clone ID: 701134722H2
caatggcttcaagtcaggaggaggtgacccttttgggagctactggaagcccatttgtgtgcagggttcatattgccctcaagttgaagggagttcaatacaaatatgtcgaagaaaatttgaggaacaagagtgaactgcttctcaaatccaacccagttcacaagaaggttccagtgtttattcacaatgagaagcccatagcagagtctcttgtgattgttgaatacattgatgagacatggaagaacaaccccatcttgcc

SEQ ID NO: 47914 - DNA, 265 bp, Glycine max
  unsure (1)..(265): unsure at all n locations; Clone ID: 701134723H2
ggcggcggaggaagctgctacagctgtggagagtctgggcatttcgccagagattgcccatcaagtgctcgttgaaattactgttatggtggtttatgttatgcggattgttttaagtttttactttaacatgttgtagggattttaatggtttctgtcaaagctgtggcttcttataagtagatgcgtgagatttttcttttntntggttatttaaatgaaagtttctgtgttatcgttacaatctgcaaacaaaatctgtttg

SEQ ID NO: 47915 - DNA, 267 bp, Glycine max
  Clone ID: 701134724H2
gctacccctttctgctcttcttctacctttcaagttttaaaagtataaagatggcagagacattcctatttacctcagagtcggtgaacgagggacaccctgacaagctctgcgaaccaaatctccgatgctgtcctcgacgcttgcctcgagcaggacccagacagcaaagttgcctgcgaaacatgcaccaaaaccaacttggtcatggtcttcggagaaatcacgaccaaggccaacgttgactacgagaagatagtgcgtgac

SEQ ID NO: 47916 - DNA, 266 bp, Glycine max
  Clone ID: 701134725H2
caaaaacccaatagtcccatactatactacttaaaaccctaagtatatctttcgcctcagtctctaaaacctcagcaacaaacactcttcttctctccgccgtctctctccattctctctttccttccccttttcgagacgacaagatggtgaagaagagcaagaagagtaagagcaagagggtttcgctgaagaagaagtacaaggtcataaggaaggtgagggagcacaacaggaagaaaacgaaggaagcgaagaagcttcga

SEQ ID NO: 47917 - DNA, 262 bp, Glycine max
  unsure (1)..(262): unsure at all n locations; Clone ID: 701134726H2
actggttcttatagtgntatatagagagagacaaagagtctaacttgaaagttttnctctttcaaaacctagtgacacttcttctgtgtcagagtttgngaagtgaaccccatcaacagagtcccataataatcatgaagaaaggaaacttgggtcttgatctcaaactctcagttcctgtgtctgatcaatctaattttgccaagttcctgactgaaagtgggacttttaaggatggggatctgcttgtcaacagggatgg

SEQ ID NO: 47918 - DNA, 264 bp, Glycine max
  Clone ID: 701134727H2
ggcaggaactaaatatggctgacttgttggaatggtcaaagcaagataagaaacgaatgcttcatgtcgtctaccgtgttggtgaccttgatcgcaccatcaaattttacacagaatgtttaggaatgaagcttttgaggcaaagagatatcccagaggagaaatatgctaatgcttttcttggatttggccctgaagaatcccattttgttgttgaattaacatataattatggggttacctcgtatgacattggcgatggct

SEQ ID NO: 47919 - DNA, 248 bp, Glycine max
  Clone ID: 701134728H2
ttacaaagccgagcaagagaagctccaacaacaaattaccatcagcaaggagtgttctttcttctgttcagattgatcaagatctcaaggtgaaaatctccaaggtgtgtgctgagttgaatgtggatggattaagaggagacatagtaacaaatagagctgcaaaagctcttgctgctctgaaggaaagagacaaagtaagtgcagaggatattgctactgtcatccctaactgcttgagacaccgt

SEQ ID NO: 47920 - DNA, 265 bp, Glycine max
  unsure (1)..(265): unsure at all n locations; Clone ID: 701134729H2
atcggcggcgagttagaaggcaggatcgtcgtcgagctcttccacgacgttnttcccaaaaccgccgagaatttccgcgcccttctgcaccggcgaaaagggcatcggccccaacaccggcgtccccctccactacaagggcatgtgtttccaccgcgtgatcanagggttcatgatccagggcggcgacatctccgctggggatggcaccggtggggaatcaatctatggcgccaagttcgaggacgagaacttggagatgaag

SEQ ID NO: 47921 - DNA, 265 bp, Glycine max
  unsure (1)..(265): unsure at all n locations; Clone ID: 701134731H2
aaaatggcaatctccatacccagtagacaanttttcatagatggagagtggaaagtccctcttctcaacaatcggnttccgatcatcaaccccgctactgaagacatcatagggcatattccagccgctactaaggaagatgttgaccttgcggtggatgctgctaaaagagccttttcccataacaaaggcaannattggtcttcagctcctggctctgttcgtgctcgctatcttcgagccatcgcttcaaagataacagaga

SEQ ID NO: 47922 - DNA, 265 bp, Glycine max
  unsure (1)..(265): unsure at all n locations; Clone ID: 701134732H2
gaaaatgaaggtccttgttttcttcgttgctacaattttngtagcatggcaatgccatgcgtacgatatgttccctctccgaatgaacactggctatggtgcccgtactccggaggtgaaatgcgcaagttggaggcttgctgtggaagcacacaacatctttggctttgagaccattcctgaagagtgcgttgaagcaacaaaggaatacatccatggcgaacaatatagatcagactccaaaacagttaaccaacaagcttac

SEQ ID NO: 47923 - DNA, 269 bp, Glycine max
  Clone ID: 701134733H2
agactgaactgaataacattaacacagcgatgtcgttgaaaacattagcaacctctcctctttcggggatcactcttttggtccttctcatcgctctccttctcagattttacatcaaattcgaaactgctgagagattgttcagtgctgaagagctatcattgttcaatggaactgatgaagggttgccaatccttctaggaattcttggatccgtgtttgatgtaaccaagggaaaatctcattatggttctagagggggatacaat

SEQ ID NO: 47924 - DNA, 267 bp, Glycine max
  unsure (1)..(267): unsure at all n locations; Clone ID: 701134734H2
cttcttcaccctctctatcttccaatcctttttttccattcccnactattccctatcatctttctttgtgttctcatctttttccntttcccaagcaattgtactttttaggggcatacacgtnaagcagttggtttctggagtagttagagttacatgtgttttgcaggcacatggcaacacatgaaatggatcccgatgttgttcgctggggtcttcatctcctagatgtctgcacactttctcaccatggttcccctagtattg

SEQ ID NO: 47925 - DNA, 266 bp, Glycine max
  unsure (1)..(266): unsure at all n locations; Clone ID: 701134735H2
ctccctcttaattcttttctcttttctttctttcacacaaactcctctntcctatgatgggtcttgatcaagatgctagcagcaactctggccttcatcttattctagggttagctttgactgccaccaccaccactactccatcactaccatccatttccaacaagcttgatcatgttgatcaatcatcancaatctnataaatncttagaccaacaacaaagtcaccctataattcctctgaggctgaaccatcattaagtggg

SEQ ID NO: 47926 - DNA, 266 bp, Glycine max
  Clone ID: 701134736H2
caattctctgtgtagaagccatgtctaagggtcctggtctctactctgacattggcaagaaagccagagatctcctgttcaaggactaccacagtgaccagaagtttaccatcactacctactcacccactggagttgctataacatcctcggggaccaagaaaggtgacctttttgtggcggatgttaacacccagttgaagaacaagaacatcaccactgatatcaaagtggacaccggttccaatcttttcacaactatcact

SEQ ID NO: 47927 - DNA, 267 bp, Glycine max
  unsure (1)..(267): unsure at all n locations; Clone ID: 701134737H2
ctgtagactaatggctgaatcacttactanaattgtncgaagtaagcagtatcttgcgacacanaagcnagtaaatctggctctcggctatcggaatccacatggatatgggttcagttttggatcgagangatcaatacacgagagggtgagctctcatttcaagggcanagctgtgantacctatgacnnnntcntcntgntcatcnccggggnggtttnagnnnctttgntcttntttnntnttcncntctctnaaagntcntt

SEQ ID NO: 47928 - DNA, 264 bp, Glycine max
  unsure (1)..(264): unsure at all n locations; Clone ID: 701134738H2
gaagtcttnnttctgatgattgatcaaaattcaaataatagtcatgacngaagctttgagtgatnttcttctctctnttgtatattaatatacatattgggattgatgttcacacagtctgagatgncagcttnntggaatatctgatgctgaggcactcaagcagcattttggaaggaanataatggaactggaggatgagaaaagaacggtgcagcgaggatagggatcgtctatngctgaagttgaaaatcttgctgccat

SEQ ID NO: 47929 - DNA, 264 bp, Glycine max
  unsure (1)..(264): unsure at all n locations; Clone ID: 701134739H2
gttctatatattattgaattgacaatgaggcctgctcttgctttgcttcctcttctatttgctttcttgttagctgccactacagaatcaagaaaagatacaggggaatattggaaaatgatcatgaaagatcaggaaatgccaganggacttcaaggtcttgtttcanttcaatctgaaaataaccctaagactcaagagcagcttggtaaaggttccaaaaaccattgtgaagagtctctagttacaaatacacaagttaat

SEQ ID NO: 47930 - DNA, 265 bp, Glycine max
  Clone ID: 701134740H2
gtggaaataaacacaaatgatactgagaaacaggaagaggttccagcatctcacgccgacgagaaacaagggattgaggatgatggcaaattcgatctagaagaagcgaaagggattgaagaagcaacaaaagcacagttaccagaggaagaagtcaacacaacattgcccattactgcctttgtccaaggcgatactgatcaaataccacagcagcaaacactgcaggatgatgattcagaagtgattgatattgccctgaaaa

SEQ ID NO: 47931 - DNA, 261 bp, Glycine max
  Clone ID: 701134742H2
ggaactcattaggaagggagacaaggttggatcttctgaagctgcattgcttgccaagctaggcataaggcccttctcatatgggcttgtggttctctctgtttatgataatggttcagtgttcagccctgaggttcttgatcttactgaggatgacctcattgggaagtttgctgctggtgtctcaatggttacttcactttcattggctatttcatatccaacacttgctgcagcaccacacatgtttgtcaatgccta

SEQ ID NO: 47932 - DNA, 260 bp, Glycine max
  unsure (1)..(260): unsure at all n locations; Clone ID: 701134743H2
gtgccctccatgcatgactgacaaacatcagaaaatgaatggtgaggatgangagtaactcccaaagagttactcttggtgttgcaatgttcgttgttttagcaanggtattgcgtcggaagcctgatgctcttatatctgtattgcccacattgagggagagtacaaagtatcaagggctagataagcttccagtcattgtatggatgatagctcaggctgctgtaggagatctctcagtaggtttgtatgcttgggca

SEQ ID NO: 47933 - DNA, 260 bp, Glycine max
  Clone ID: 701134744H2
ggagttgggtataacatcagacgaggcactaagtttagaggatcttccaaaacatgctgtggttcttggaggaggttatattgcagttgagtttgcatctatatggcgtggcatgggttccacagttgatctagttttcagaaaggaacttccactgagaggttttgatgatgaaatgagagctgcagtggcaagaaatcttgaaggcaggggaattaatttgcatccaaggaccaatttgacacagttgatcaaaacag

SEQ ID NO: 47934 - DNA, 243 bp, Glycine max
  unsure (1)..(243): unsure at all n locations; Clone ID: 701134745H2
cattgctatatattatggctagcatgaaggttacatgggnggttgtgancatgtgcatggccgtggtgggtgcaccgatgatggcgcaagccatgacatgcaatgatgtgacggtgaacatggcacagtgcctatcctacctgcatgcagggaggaacaccttcaacactttgctgcagcggagtcaagaacattcttggctctgctgtcaccaccgttgacaaacaaactgtgtgcaatgtc

SEQ ID NO: 47935 - DNA, 264 bp, Glycine max
  Clone ID: 701134746H2
ggataacgcggcagtacccccactcactaccaccagccgacgcctccgatcactcttctcttttatcaattccggatatgtcttctgatagtgcaaaggaaaatgcatcagtagttgattcatcagtcactgaatggaggaatgacattggaaattcagatgatccagtgtgtccagatgatcatgacttcagcaatgatagtggagcaaggaatagggtgttgatcacatactcaaaaacatttcatagatgcatgtacatct

SEQ ID NO: 47936 - DNA, 263 bp, Glycine max
  unsure (1)..(263): unsure at all n locations; Clone ID: 701134747H2
caaaatcaaactttgtcacagttattggtgtgctacctccgtnagttatataagacccttttataaactccttttaaggcttttcaatctccaatcacttcttcttgtgttgtcataacttcaacaacttctttcttctcgatctcacgatggctcatttggccctgtctcagatggctgtaactgttcctgttggcaacgatttgtctctcagaagatctgcagttaaggcccctaacttgaacttttgggataaatcatgg

SEQ ID NO: 47937 - DNA, 245 bp, Glycine max
  unsure (1)..(245): unsure at all n locations; Clone ID: 701134748H2
gttcttacacatctttctctcacctcactttcggtttannaaccaaaaccctaatcgagatcacaatcggatcgtaaacaaacagagaccagccatggacggtgattcctcttggagtgctcgactctcttccgcttccaggcgctaccaatccgctcttcaatctcgatcagacatgttcgncggttttgatgaaaatgatggggacgatgatataagagaggagtttctctgcccattttgtt

SEQ ID NO: 47938 - DNA, 269 bp, Glycine max
  Clone ID: 701134749H2
ggagcagcctcaggaggagaaggatgtctcacaggaagttcgagcacccaaggcacggttcactgggatttcttcccaggaagcgtgctgctcgtcacaggggaaaagtgaaggcattccccaaggatgacccatccaaggcacccaagctcactgcattcttgggttacaaggccggtatgactcacattgttagagaggtcgagaagccaggatcaaagcttcacaagaaggaaacttgtgagcctgttacaattattgagacccct

SEQ ID NO: 47939 - DNA, 266 bp, Glycine max
  unsure (1)..(266): unsure at all n locations; Clone ID: 701134750H2
gctaaatctggggttgccagttttgttaaaatatttcccaaagtttcacacggttgggctgtgagatataacactgaagatgcagaaaccgtaaaggtggcagaagaggcccaccaggacttgctggactggcttgctaaacatcataagtgagacatcttgctctgttaagactgtacaatggagtacttgagtgaaggatgtaatgtaaaatggtactcaatcaacgtagctgtagtttgcaaganaataaatgttgtattgtt

SEQ ID NO: 47940 - DNA, 267 bp, Glycine max
  unsure (1)..(267): unsure at all n locations; Clone ID: 701134751H2
ctctgccgtgctctttcggcgcaggtcaagagattcgcaatanaaagtgagaaaaaaaaatgagtcgaggaagtgcaactgctgcgaagggcaagaagaagggtgcgacattcaccattgattgcgcgaancggtggaggacaagatcatggacattgcgtctctcgagaagttccttcaagagaggattaaggttggtggcaaggccggtgctctcggcgactccatcaccggtcgtacgtgagaagaccaaaatcattgttactt

SEQ ID NO: 47941 - DNA, 266 bp, Glycine max
  unsure (1)..(266): unsure at all n locations; Clone ID: 701134752H2
gcagcattgaccctgagtggaagatgataaaaagagatgaaggacgaattgagaagtggattctgaggagagcctttgatgatgaagagcanccttatctgccaaagcacattttatacaggcagaaagaacaattcngtgatggagttggctatagttggattgatggccttaaggcccatgctgcaaaacatgtgactgaaaaaatgatgcttaatgctggtaacatttacccccacaacaccccaaaaaccaaggaagcatat

SEQ ID NO: 47942 - DNA, 262 bp, Glycine max
  unsure (1)..(262): unsure at all n locations; Clone ID: 701134755H2
cccataatcatgaagaaaggaaacttgggacttggtctcaaactctcagttcctgtgtctgatcaatctaattttgccaggttcctgactgaaagtgggacttttaaggatggggatctgcttgtcaacagggatggagttcgaattgtctctcagaatgatgtcgaagctccacctccaatcaagccnacagacaaccagttaactttggcagacatagatgtaatcaaagttgttggaaagggaaatggaggggtagttc

SEQ ID NO: 47943 - DNA, 262 bp, Glycine max
  unsure (1)..(262): unsure at all n locations; Clone ID: 701134756H2
gtctgatcatagcagcttcttctgggtttgtgaattgctttgatgttgaaaagaaggaaaagattggaatatttgagctcaataaanntgacctttctttgaaggtcaccaactggggtgcttcaattttgtccctggtgattcctgataagaatggaaagttgagtgatgttgttcttggatatgattctgttaaggattacactaatgatacaacatattttggagcaactgttggccgggttgctaacagaattggagg

SEQ ID NO: 47944 - DNA, 253 bp, Glycine max
  unsure (1)..(253): unsure at all n locations; Clone ID: 701134758H2
tttttctttccttccttctctcatcttcccagccgccgcttcatactgancttcactccgttgcctgtgtttttctttcttcctttatttctattcaacggatcggaacggtgcactgtgaaagggtttttgttttgtgagtgtattaaaaaatgctgcgtagaaacatccgtttgaggagagagtatttgtaccgaaagagcttagaaggcaaagaacgcttgctctacgaaaagaagcgcaaaatcagaga

SEQ ID NO: 47945 - DNA, 262 bp, Glycine max
  Clone ID: 701134761H2
gcaagcctggcactgggccatgagacctatgtggttcagaggccagagttgagcctccagatagagaagctgcagaggctcctctccttcaagaagcaaggtgctcatctcattgaggcctctttcaatgatcacaagagccttgttgatgctgtgaagcaggttgatgttgtcatcagtgccatctctggtgttcacatcaggagccacagcatcactctgcaactcaaacttgttgaggccatcaaagaagctgggaacg

SEQ ID NO: 47946 - DNA, 266 bp, Glycine max
  unsure (1)..(266): unsure at all n locations; Clone ID: 701134763H2
gtagccgnagagagaatgggttcctcggaagccgaaaacncatgctctccgtggcgccgnanaagaagagggtnctacttctaacaagaaatgcggcnagtnctacgatntttatggacccgaaggcaaggcagacattgtttttaactcaccagaagataattcaactgctcaatcttagtgatgttcaaggacttgtaactngggtgctcagtgaaggatttatgccgtcatnggtttttatnaagaataaaccncttattccc

SEQ ID NO: 47947 - DNA, 267 bp, Glycine max
  unsure (1)..(267): unsure at all n locations; Clone ID: 701134764H2
aagatgnancgaattccattgcatacaatgcatcccccttttccacatgcttcaaattctncaggggacattcttgatggggtgaagtacaactcttcccccgcnagtntnctgatattncatgagcttttnagcgtgctctctttcttcctcactagattccttgaagaacttggcaaatcccttgagagccacgttgtccctgtcaaagtatgcaaacaaggagnggtacacgtaggaagcattgtattccacatttatctgctc

SEQ ID NO: 47948 - DNA, 94 bp, Glycine max
  unsure (1)..(94): unsure at all n locations; Clone ID: 701134766H2
aaacaaagaaagagaganaganactncagaccttcgttcgtttcgttcctnccatgaaataatggnctttccgttttctaactntactgtttcg

SEQ ID NO: 47949 - DNA, 262 bp, Glycine max
  unsure (1)..(262): unsure at all n locations; Clone ID: 701134769H2
cttgcatgcccctttgagtttcagttttcaattttgaacccccttttttgtaatccataaccatagctggtagcatccttggttgagtcgagggatttgattatggataagtatgaggctgtcanggatttgggagctgggaattttggggtggctaggctcatgaggaacaaggagaccaaggagcttgttgccatgaaatacatcgagcgtggccaaaagattgatgagaatgtggcaagagagattatcaaccacagat

SEQ ID NO: 47950 - DNA, 262 bp, Glycine max
  Clone ID: 701134770H2
gttctaccttggggagagagatggtggtgacttctggacttctgatgctggtccactagaggccttcaagaggtttggaaagaagcttcaagagattgaacataagcttatacagaagaacaaggatgagacgttgagaaaccgcactgggccagctaaaatgccttacactctgctctatccttctagtgaggagggattgactttcagaggaattcccaacagtatctctatctaagggctctctcattgaggttgctgt

SEQ ID NO: 47951 - DNA, 261 bp, Glycine max
  Clone ID: 701134772H2
caaaccccacttcgtcagatactaaaaagaaaccaacagtttccatacttagtatttcttctctgactgactgatcaggttgacatcttgacattgcaatcctgccttttggttccccatttccatgtttgtggattcttcctgattcaaaggcaatatattgtgtcttcatagctcagtttttgagcctcatcagttgcaacttgcaacacaaactttatctataacttggtatctctaaaggactctcagcattgatca

SEQ ID NO: 47952 - DNA, 262 bp, Glycine max
  Clone ID: 701134773H2
gcgacgtctgcgtaccaagtggagggtatggcccacaaagacggtcgcggcccaagcatttgggacctcttcatcaaaaaacccgggattgttgcaaataatggcacgggagaagtttctgttgatcagtaccatcgctacaaagaagatatagatctcatggccagcttgaattttgatgcctaccggttctcaatctcgtggtccagaatttttccaaatggaactggccaagtaaattggaaaggtgtagcatactaca

SEQ ID NO: 47953 - DNA, 259 bp, Glycine max
  unsure (1)..(259): unsure at all n locations; Clone ID: 701134775H2
gcaacatgaaggggaggttcatgtttctgtcggtgctcctttgtgccacctttcatgtctccttctccattactgacggcttantagcaaacggcaacttcgagctgggtccgaagccctccgccctgaaaggaactgtggtgattggtggcagccactcgatcccagaatgggagatctctggcttcgtggagtacataaagtccggccagaagcagggcgacatgctgctcgtggtccccgagggggcctacgcggt

SEQ ID NO: 47954 - DNA, 217 bp, Glycine max
  Clone ID: 701134776H2
ccgtcgtttggttcctcgaacaccgcgaaggcgtggataatccatggcattgtggccggagtggcgattgctgcggcggtgggcgcacgcgcttacatgacccgattcagcaagtttcggagccgggtcgtgggcatcatacccgcccgattcgcttcctcgcgctttgagggaaagcctctcgttcaaatcctgggcaagcccatgatccagagaa

SEQ ID NO: 47955 - DNA, 189 bp, Glycine max
  unsure (1)..(189): unsure at all n locations; Clone ID: 701134777H2
gagaagaaagagaganaacaaagggcggtggtgagtgcttctgcttcatcatcatcagagaatggcggctactgtgtcttctgcttggtcaaagcccggcgcgtgggccctagattccgaggaacacgaagccgagctccttcaacagaacaacaacaagccccaacgacaagccactcgccgacttcc

SEQ ID NO: 47956 - DNA, 261 bp, Glycine max
  unsure (1)..(261): unsure at all n locations; Clone ID: 701134779H2
ctttacttcccaaaacttgctctacaatgagtntccttcgttcttttgcaagaaacaaggatanatcnaaagtaggacgcagaggtatccattgcatgcagaaactatgtgcagaaaaaatatctcctgattcactagagaaggcccaaaatcgtgtgatagatgcngcactcacacttgttcgaganaatacaaggcttaagaaagaactcgtgcatagtttgggaggtgctgtggcaacttcaactcttcttggagttc

SEQ ID NO: 47957 - DNA, 263 bp, Glycine max
  unsure (1)..(263): unsure at all n locations; Clone ID: 701134780H2
ctgggtttcaggaaaaaagaaaaaggaaaacaatgggttccgataatcaccagaacttggagttcttgaaggagatcggtttgggctcttccaacattggctcttacattaatggccagtggaaagccactggttcttctgtcacttctgttaatccttctaacaatcagagtatagctcaagtgaccgaagcaactttgcaagattttgaggaggggttgcgagcttgcagtgaagcagctaagacatggatgnctataccg

SEQ ID NO: 47958 - DNA, 265 bp, Glycine max
  Clone ID: 701134781H2
taggatccatagttgcttccttgatgtttgtttgggccatgtttaagcaatttttcccttatcaactaagcaaccaaattgagaaacactcccaaagattggtgaccttagtctacccttacatccaaatcacattccatgagttcactggtgagagactcatgagaagtgaggcctattctgccatagagaactacctcagctccaaggcatcaacacaagcgaagaggctcaaagctgacatagggaagaacaaccagtctct

SEQ ID NO: 47959 - DNA, 262 bp, Glycine max
  unsure (1)..(262): unsure at all n locations; Clone ID: 701134782H2
gtaaattcccatattgaagcggaggcttcggtttccctcaggaagcatagactccatttgaagaagccatggggaatgcctgtcttgtttctttcatcagttgtgtttgcccttggtcatactgtggttgcttatagaaccagctgcagagcacgcagaaagctcttgtttcatcgagttgaccctgaagctgtcctattgtgnaaaaatgtttnnggggttnanaggncncgggttnaaantctttttgggggngaacccc

SEQ ID NO: 47960 - DNA, 241 bp, Glycine max
  unsure (1)..(241): unsure at all n locations; Clone ID: 701134783H2
gcgaaaccctagcgttagggacttaaatgtcctgctcacttccctccaccgagaaagcntctttctctaaattgattgatttcttgtgtnttattctctcaagattggtgttggtgaaattttgttgttctctgttcaatcgggccttattgctcactgcgccttcaaatccatggtcgtcagtttaccatggatccctttcatcagattgaacaacaagaagacgagtgggacatgatgg

SEQ ID NO: 47961 - DNA, 242 bp, Glycine max
  unsure (1)..(242): unsure at all n locations; Clone ID: 701134785H2
tctctctctgcgatctgtttcacngttgtagctagctactcgaaaatgctggcacgcctcgccgcgagtcgcttcaacgagatccgtcagattttccgtcagccttctagggctttctcaaccgctctgaactaccaccttgacacaccggacaacaaccctaaacttccatgggaattcaccgaggccaatcaagcaaaggttaaggagattttgtctcactatccatccaactataagca

SEQ ID NO: 47962 - DNA, 261 bp, Glycine max
  Clone ID: 701134786H2
ggagaagggaagaaaaggagagtactggtaacattggaggggaacaacaatacagagccagaggaagagacaaattaagatgttgggaattttcaaggacaagttggtcaatccaccagaagagctaaacagccctgcttctttgaattcatcaaaaaggtctaaacttccaaatgaaatccttcaggaattccagtcctacaatccctccaatgctttctccgttagctttggaaatgatgctttgctagcttattcccc

SEQ ID NO: 47963 - DNA, 259 bp, Glycine max
  unsure (1)..(259): unsure at all n locations; Clone ID: 701134787H2
cgccctttttttggtggaacaaacggaatgcaaataatcttccagaacagatggggcatgttggtcaagcagagaaaacttagtagcaattgattattcttcttgcttgtactgttctataatcacatgtaataaatataggtatgcacagttcttttttattttctctacaatagatacatattccatattttgagtgggatgaatgttgcatccttcattgattcattagttaaaaanaaaaaaaagannaaaaang

SEQ ID NO: 47964 - DNA, 262 bp, Glycine max
  Clone ID: 701134788H2
tggcaattaaggtctcatccaaataagcacaaatgggtagccagagttacttcaaggctttgattatttgccttatagcactaattggatcaactcaagctcaattgcagcttggtttctatgccaaaagttgtccaaaggctgagcaaataattctgaagtacgttgttgagcatatccacaacgctccatcactagcagctgctctcataagattgcacttccatgattgttttgtcaatggttgtgatggatcagtgct

SEQ ID NO: 47965 - DNA, 261 bp, Glycine max
  unsure (1)..(261): unsure at all n locations; Clone ID: 701134789H2
gctttctttcttcaccatgtcacttgctgggaaaatcaccactgaaatcggggttcatgcaaccgctacaaagtggttcaacctcttcgcaacacaactccatcatgttcaaaacctaactgatagagtgcatggaaccaagctgcatcaaggtgaagactggcatcacaacgagacagtcaagcactggacttataccatagatggtaaggttacaacatgtctggagagtnttgaatccattgatgaacagagcaaaac

SEQ ID NO: 47966 - DNA, 184 bp, Glycine max
  unsure (1)..(184): unsure at all n locations; Clone ID: 701134790H2
ctttattttactctgaattatgcattacagaaactttattttntgtttttcgtttgatgtggttgcacgggnnnnnnnnnnnnnnnntgccgtatctatttcatttctctggccacttgttgggttctgtttacgatttccagacttataaacgcatctatttgcactccaagagtgtaaagct

SEQ ID NO: 47967 - DNA, 193 bp, Glycine max
  Clone ID: 701134792H2
aattccgtctccaagatctagaatgttttactatgctggaagtgaagaccactatgaggagcctcacttcctccaagcttgttttctttgcagaaaaccactaggccaaaatcgtgacatcttcatgtacagagggaacacaccattttgtagcaaagagtgcagacaggagcaaatagagattgatgaggca

SEQ ID NO: 47968 - DNA, 260 bp, Glycine max
  Clone ID: 701134793H2
gttcctttgaatactttgtctcgcaactcggatgaaaagattgaattatgtcgattttccaaggacggaaccaaaccatttttattttgctctgttcaaaaaggtgatacttctgtcactgcggtttatgatattagcacatggaataaaattgggcataagaggctgattagaaagtctgcttcagtaatgtcaattagcaatgatgggaaatacctttctctgggcagtaaagatggagacatatgctttcgatccct

SEQ ID NO: 47969 - DNA, 259 bp, Glycine max
  unsure (1)..(259): unsure at all n locations; Clone ID: 701134794H2
aacaaagcaagcaaaacaaaagacgcagtgatggagaggatgaagagggtgcttctgccgcttctggccttcactgttcttctcatgttgccagaagcttctgctacaaagtttactgttggaaacaaccagttttggaaccccaatattaactacactgagtgggctaaaggcaaacatttctaccttggtgactggctctattnngtgtacgataggaaccaagcgagcgtgttggaagtgaacaagacagattatg

SEQ ID NO: 47970 - DNA, 221 bp, Glycine max
  unsure (1)..(221): unsure at all n locations; Clone ID: 701134795H2
agctattgttgcattggctgtgttactgcttcttacagggacctcttcagctaacctctcaaagaacttctattccaagacatgtcccaacgttttcaacactgtaaaatctgtagttaaatctgctgttgtcagagaacctcgcattggggcatctnnggttcgtctcttcttccatgactgctttgttcaaggctgtgatgggtcaatactacttgatg

SEQ ID NO: 47971 - DNA, 276 bp, Glycine max
  unsure (1)..(276): unsure at all n locations; Clone ID: 701134801H2
gcagcattgaaggcgattttttactagcatggcagcaataatgttgacgactatgantattcctctgnacacttcggtttgggttaattcccggcggaagagttggtgctgctacgcctcactttcgcagccagacaggaaggagntccgtctcggtttgcccagcaaaggtcgcatgtnccgctganaccctcgannttctcaagaattgtcaattgtcagtnaagcaggtcaatcctcgtcagtatgntgctgaaattcctcagctatccaacc

SEQ ID NO: 47972 - DNA, 285 bp, Glycine max
  unsure (1)..(285): unsure at all n locations; Clone ID: 701134802H2
caccaaacatgtaaccantgnaccagcaagntatctcaagaacatggatganacttctntnctttgtncaaggnatnaaccctcaaaaganagtnacagggncaacatatagaagatgaaaatgancatgtccatttgccttttntntnagggcnttctattgccaatattcacactctnttggtggatgggtcattttctgatgctagcaagggggaaatggatgcagagattgtttggagctcttgtaagnntgattcagatgatggngataatctaaggcat

SEQ ID NO: 47973 - DNA, 279 bp, Glycine max
  unsure (1)..(279): unsure at all n locations; Clone ID: 701134803H2
gcatgtgtaagtatgaactaattcagactgtgnaactgcgaatgggctcattaaatcagttatagtttgtttgatggtatctactactcggataaccgtagtaattctagagctaatacgtgcaacaaaccccgacttctggaagggatgcatttattagataaaaggtcaacacaggctctgcctgttgctttgatgattcatgataactcgtcggatcgcacggcctttgtgccggcgacgcatcattcaaatttctgccctatcaactttcgatgg

SEQ ID NO: 47974 - DNA, 279 bp, Glycine max
  unsure (1)..(279): unsure at all n locations; Clone ID: 701134804H2
attctctcgcatctcaatacccttttgatttgtgaaangaaagcaaacatgcttgattcaggtccaacaccctacaatcatggacaaggttgctggccagctccatctccgttctggtgtttctggtattaggagttatgaaggagcctactgccaccccacaatgtaccanagaccctcttttgggaattactcgaatgctgcattgcagtatcctgtgatgcnctcatgcaaagctactatggatttgtctgctgctgcaacaatgcctnccccgtc

SEQ ID NO: 47975 - DNA, 248 bp, Glycine max
  unsure (1)..(248): unsure at all n locations; Clone ID: 701134806H2
ctggattttggatttctgccctaaactntgatgaacaggtgtggttaacttttttggtcgantatcaatactcatagaccagaacacacaggcgttccatttgttcatgactgcacttctccagctgtttgaccgctctggaatgttgtatggagagctagctagatttgtgttgcggttgcttgggattaaaacaaagtccaagaaggttcacccgccaggtccaaatggacaaccgttgcctggac

SEQ ID NO: 47976 - DNA, 278 bp, Glycine max
  unsure (1)..(278): unsure at all n locations; Clone ID: 701134807H2
cggtagctagacaacaacgagagananagaganaganatggaggatctcgaggaggaagagaacggagcggaggaggtgttggngtcaagcttgaccattgagnaagtnngcngctgcgaagaagtncattgagaatcattatagggctcagatgaagaacatccaaganangaaggagaggcgctgggttttagaaagaaaattggcatcatcanatgtgccaaatgaggagcggatcaacctcatcaaagatttagagaggaaggagactgaatat

SEQ ID NO: 47977 - DNA, 275 bp, Glycine max
  unsure (1)..(275): unsure at all n locations; Clone ID: 701134808H2
gccagtggcgcgaantaaccgtgcgttggattatgactgaacgcctctaagtcagaatccgggctagaagcgacgcgtggcgcccgccgtccgtttgccgancagcagtntgnggcctcggcccccaaaggcacgtgccgttggtgaccctcgtgangcggattagccctacgagacgccttgaagcgcaattcccatcgagcggcgggtagaatcctttgcagacaacaataaaccaagaggacgtcataatttgacaacgcagaagaagcagg

SEQ ID NO: 47978 - DNA, 278 bp, Glycine max
  unsure (1)..(278): unsure at all n locations; Clone ID: 701134809H2
gaaagaaatacacgccagaatggggactcctctcgttcgtgtttggaggcttagggttcattctcatcgggcgctcacgaagcccttcttcantcttctccttcttcccanaacaagaanaccanaaccctcttctcgatntctctggtcctcttctcctctttcttcatcctcaactccacgctatccctcttcgacgcgcacagctcaaacgacgccgttggcgccgcgctccagctgcaagtcctatccatcgcgttcgtcttcctcttctactc

SEQ ID NO: 47979 - DNA, 233 bp, Glycine max
  unsure (1)..(233): unsure at all n locations; Clone ID: 701134810H2
ctctctgnacttgcnngcatnctgctctctgttactttctgttcacaaagatttgtaaatntatatttatcatnccatatatactatatantatattgtatgctccacttgtttgaagctgtgttgcatattctggatcctatcatcttgtggctttgatgtctagagcattggaacatgattacatagggttggcagagaatccgtcaatggacgaagctctgacaaactgt

SEQ ID NO: 47980 - DNA, 273 bp, Glycine max
  unsure (1)..(273): unsure at all n locations; Clone ID: 701134811H2
cgggagctggcanaacgttctggaaggnttgcccagaacgaagggtgggttcgtttgtnagantngtggtgatgtgaggtttgtcccgtgtgggaactgcagtnggagtaggaaggtgtttgatgaggatgaaggggtgttgaagaggtgtttggagtgcaatgagaatggcttgattcggtgtcctaattgttgttcttgaagttcgcaaacaaaataataaaaagaagaaaaatttganaccttggtgtgtgtagttgtttttttgttgtt

SEQ ID NO: 47981 - DNA, 274 bp, Glycine max
  unsure (1)..(274): unsure at all n locations; Clone ID: 701134812H2
ggagagtgctttgaaaatgggaaagtttagttcaagttacagtacttctgattttnntncactttggagttctacttccctttgcttctgttatcacagttgttctttcaacttgcatggtgtggctccatagtaaagttccttcctggattagagggaccccttccttttgttcttgaaaccgggtatgtgggagtgggtgaatcagaggatgtgcaggcattctactacttcattgagtcagagaacaatccaaaggaggatcctctcatgc

SEQ ID NO: 47982 - DNA, 272 bp, Glycine max
  unsure (1)..(272): unsure at all n locations; Clone ID: 701134813H2
catccatttatgatttggagaagcacaaatctcgtagagtgttatacaaaggttacatttctganctgtttgtgccataccaagacccaacagatgatttttactataagactttctttgntgctggagagtttgggtttggtctctccacggtctcattggtgcccaaccgtgattgcccatcgaatgctcagttcctagatacatatgttcacgctgctgatggtactccgttactcatcaagaacgcaatctgtgtctttgaacaatat

SEQ ID NO: 47983 - DNA, 266 bp, Glycine max
  unsure (1)..(266): unsure at all n locations; Clone ID: 701134814H2
ctcaactccacactctcactctgatcggtttcaatggcttcaccggcgtggttgccgcaggagtcgcagccaccagtgtctggtgaaacggcctcttcccntggcttcttccgctcatacaactccttctactgctccggcaccggcaccgccattgcgnttacggcatgcttcagaatgttaacgcttccggaagttctcaacagtcatcnacgcatcctgggatgaaatccaattctgcagtgaatcccatggttgttcaacct

SEQ ID NO: 47984 - DNA, 276 bp, Glycine max
  Clone ID: 701134815H2
caacacccacttgaatgagctcttagccatggcaataattcagaagagaaatgagaatgaagagtgaagaagagagagaacacccacttgagaggaggcaggctgaagcatctcgaataagagagaagtatcctgacagaattccagtaattgttgaaagggctgagaagagtgatgttcctgaaattgacaagaaaaagtatcttgtacccgctgatttgactgttggtcagtttgtgtatgtggtgcggaagagaatcaagctgagtcctgaga

SEQ ID NO: 47985 - DNA, 273 bp, Glycine max
  unsure (1)..(273): unsure at all n locations; Clone ID: 701134816H2
ggaagaaaagttagcagtagtttggcgtggtaattggtagagcgagaaacagagaaatggacgattacacgagggaaatgatggacctgaagacactggtcactcgcactctcgagaagaaaggcgtcctcgccaggatccgtgccgaactcagggcgagtgtgttcgaagccatcgaagaggaagatcgtgtgattganaaggncacaaggtctanctcctgcattgctaggtagttgcaagatcgagctaagcagttcagcttctcctcca

SEQ ID NO: 47986 - DNA, 238 bp, Glycine max
  unsure (1)..(238): unsure at all n locations; Clone ID: 701134818H2
cgggatcatccacaagattgaggagaccctccatgtgggagggcacaagaaagaggagcacaaagganaacaccatggtgagcacaaaggtgaacacaaggagaacaccatgtgagccaaaggtgaacacaaangagacaacacatggggagacaggagggctttggtagacaaggcagtccaggtgtgnctgcaagtagaaagagagaggcagagagaggactgctncanatgntac

SEQ ID NO: 47987 - DNA, 280 bp, Glycine max
  unsure (1)..(280): unsure at all n locations; Clone ID: 701134819H2
ccgagatcaaccccgacgaaggcaaggngtttttctcggcntcttcagatttctgaaatggcgcctgtntcagctttngccaagtacaagctcntcttcctgggtgaccaatccgtgggcaaaaccagcatcatcactcgcttcatgtatgataaattcgataacacctatcaggctacaattggtattgattttctatcaaaaactatgtatcttgaagatcgaactgttcgactgcagttgtgggatacagctgggcaggaaagatttagaagtcttt

SEQ ID NO: 47988 - DNA, 282 bp, Glycine max
  unsure (1)..(282): unsure at all n locations; Clone ID: 701134820H2
cattgggcacttggaaagcaaggcggagagnagcctnagggaccacttgaggctctttcggcntanattacagccaacgcagcagcaaacacgttaccggaaatctccttatgctccttcaggagaagaagggggaagtgttccagccgaggatgcaccttccaaccagtaagcagcaatcagtcttttgatgatgtgctgactattgttctaatanctgagtgagtaggtatcacttctttgttttcaacaataaaggaagcttgtcatgtattcatatta

SEQ ID NO: 47989 - DNA, 275 bp, Glycine max
  unsure (1)..(275): unsure at all n locations; Clone ID: 701134822H2
cagatactagttaccaaacagactggtcctcagggaaaaatagttagcaaggtttacttgtgtgaaaagctgtcactagtaaatgagntgtantttgctataacactggatcgtacgantgctggtccaattataattgcttgtagtaagggaggaaccagcattgaagacctagcagagaaatttccggacatgattataaaggtacctgttgntgtttttnaaggaattactgatgaagatgctgcaaaggttgttgatggtttggctctcaa

SEQ ID NO: 47990 - DNA, 281 bp, Glycine max
  unsure (1)..(281): unsure at all n locations; Clone ID: 701134823H2
cnctntttctcagtctctctgtttgnggctgaggattccgaacgagtgaccttcntcgtttctcgcaaagttnaagtaattcntcgggtaatgaaaangttgancatcaacattggcgtcatnggacatgtcgagctctgggaagtcanntaccactggtcacttgatctacaagcttggangtattcnacaaggcgtgtgattnanaggttcgagaatgaggctgnccgagatgnacaagaggtcatncangtatgcctgggtgcctacaatctcaaagt

SEQ ID NO: 47991 - DNA, 276 bp, Glycine max
  unsure (1)..(276): unsure at all n locations; Clone ID: 701134824H2
cttcctctttcttagatctcttctttctctacgccgcacgccgaaaccatggccggaaaaggagagggtcctgctatcggaatcgatctcggaaccacctantcttggcgtcggtgtgtggcaacatgaccgcgttgaaatcatcgccaacgaccaagggaacagaaccacgccgtcttacgtcggattcactgacaccgagcgtctcatcggtgatgcggccaagaatcaagtcgccatgaaccccatcaacaccgtcttcgatgccaagaggtt

SEQ ID NO: 47992 - DNA, 276 bp, Glycine max
  Clone ID: 701134825H2
gtcctaggagtgtaaaacagagacgcaaaatgaagacgatcttgtcgtctgagaccatgaatattcccgacggcgtgagcatgcaaggttcacgctaaggttatcgaggttgagggccctcgtggaaaactcgtgcgagacttccaccatctgaacttggacttccaacttattaccgacgatggcggtaaaaggaagctcaagattgattcttggtttggttctcgtaaaacctccgccgccatccgcaccgccctcagccacgttgagaatttg

SEQ ID NO: 47993 - DNA, 246 bp, Glycine max
  unsure (1)..(246): unsure at all n locations; Clone ID: 701134826H2
gtgcaaaaaaacanaanttaaacactacaagtataacgtgagaaaatgggtgaagctaaggaaatntggtctgcaccaataacccctagaacagcttcagtggttggnacacctgttgtggcatctccacctgtgtcatgtccaccctctcagcttcactctccatctctaacaaggtcacccctccttcaccctgaggntggagatgcaccacgtcctaataaaacttctaagactccaaagaca

SEQ ID NO: 47994 - DNA, 273 bp, Glycine max
  unsure (1)..(273): unsure at all n locations; Clone ID: 701134827H2
aaatgacacagaggggacaataatttatcttttgttnatttcttttttaattttaggttaatattagactcttnaagtctcataactgancagttcaatgcagaaaacttctggaaatattataggccattttcttggaggtttntattattatctaagaagatgcatgtttgccattttatctgtgggtcctgtgccaagtcatattgntttcnatcatggatgggaatcgaaggtatgcaaagaagntaaacatggaagaaggtgatgncc

SEQ ID NO: 47995 - DNA, 276 bp, Glycine max
  unsure (1)..(276): unsure at all n locations; Clone ID: 701134830H2
cactcttcaaaagggagaagaaaaggaaagaaaactctcaaaaaactattntagcaatggcagaacaaaaccaaaaccaaacaactgaagctggaaggcaccaagaggttggtcacaagagccttctccagagtgatgctctttaccagtatattctggagacaagtgtctacccaagagaacctgaatccatganagaactgagagagttgacagcaaaacaccnatgganatctgncaaacttnngcnagncnaagggnatttntggacgntgt

SEQ ID NO: 47996 - DNA, 250 bp, Glycine max
  unsure (1)..(250): unsure at all n locations; Clone ID: 701134831H2
ggcaaaacctanttactcatttcttccctcaaatttcaaaatgcgtgagnatccttgcacatccagggtggccaatggcggcaaccagatcggcgccaagttctgggaggtggtttgcgcggagcacgggatcgaccctaccggaagtacggtggggactcggagttgcagctcgagaggatcaatgtctactacaacgaggccagttgcggtcggttcgtgccgcgcgcggttctcatggacctcgaac

SEQ ID NO: 47997 - DNA, 275 bp, Glycine max
  unsure (1)..(275): unsure at all n locations; Clone ID: 701134832H2
ggggaagggtggattcattgagaaggtgaaggatttcattcatgacattggtgagaagattgaggaagctattgggtttgggaagccaactggctgacgttactgcgattcacattccatcgattaatcttcacaaggcagatcttgttgttgatgtgctcatcaagaacccgaatccggtggccaatccctctgattganctagattactggttgacagtgatgaaaggaagntagtttctggattgataccagtgcgggtaacatccggtgcc

SEQ ID NO: 47998 - DNA, 278 bp, Glycine max
  unsure (1)..(278): unsure at all n locations; Clone ID: 701134833H2
ctcacatcccttcgtcaacacctctccgactcttctcgttctgctccatgggcttcgtcctcctcaatgtggcgaggagcaaacgcgttacgacaccgatcacttggagctcttcaggcaaganagttacttcgcttacttgtttggagtcatagagcctggattctatgcagctattnacgttgcaactggganttctatcctatttgctcctaggttaccttctgagtagctgtttggttgggggagattaagccatctcctactttaaggaacac

SEQ ID NO: 47999 - DNA, 282 bp, Glycine max
  unsure (1)..(282): unsure at all n locations; Clone ID: 701134834H2
gcataacctaaacctatctttcttctctctctgtgggtgcgcttcaacggcaaccagaagcagccatggccanttgcaaggactgtgaaggatgtttcacctcatgagttcgttaaggcgtactcctctcacctcaagcgatccggcaagatggagctgccagagtggactgatattgtgaaaactgcaagatttaaggagttggctccttatgatcctgactggtactatgtcagagctgcttccatggcaaganagatctacttgagaggaggacntggt

SEQ ID NO: 48000 - DNA, 279 bp, Glycine max
  unsure (1)..(279): unsure at all n locations; Clone ID: 701134835H2
cccatgaccacggcgtantccatttcccccactccgnaaatgtcgctccagggcagcgccagcggaaacggcaccgtggcggcggcgtcgacggcgagcctgaggctgcggctgaaccctaacaaggagcacaagcccgatggctacgaggacatgcaattggatttcagccctaacattttcagctcgctggagaggtacctccctccgagcatgctcaacgtgacgcgtgacgagaaggccaagttcatgcgcgagattctcctcaagtatctgccc

SEQ ID NO: 48001 - DNA, 278 bp, Glycine max
  unsure (1)..(278): unsure at all n locations; Clone ID: 701134836H2
gctcagtcatctcttttaccattctcttctctcttgctcttgcaggagagagccatgtccatgcatcgctacctgaggaagattattgggaagctgtttggccaaacactcccattcccactgcactgcgagagcttctaaagcctctccctgcaggtgttgaaatcgatgaactccctaagcaaattgatgatacacagtacccaaaaacattcttctataaagaagaccttcatccaggcaaaacaatgaaagtacnattcaccaagcgtccctat

SEQ ID NO: 48002 - DNA, 259 bp, Glycine max
  unsure (1)..(259): unsure at all n locations; Clone ID: 701134837H2
tctcacagtcacacaacagcaatggaagcaatcacaganggagtgaacaacatcaacatctctgattcttacaagaagaatcgcattcaggtctccaacaccaaaaagcctctcttcttctacgtcaatctcgccaagaggtatatgcaacagcataatgaggttgagctctcagcactaggaatggctattgctacagtggttactgttgctgaaatcttgaaaaacaatgagcttgctatganaagaaaatcacgac

SEQ ID NO: 48003 - DNA, 62 bp, Glycine max
  unsure (1)..(62): unsure at all n locations; Clone ID: 701134839H2
accancaccttctgcaagccttttcatcantnntgntntcaaccccaaccacaccttattnc

SEQ ID NO: 48004 - DNA, 255 bp, Glycine max
  unsure (1)..(255): unsure at all n locations; Clone ID: 701134840H2
ccaangacacaatgtatgtcacactcgaaccgtcaattttaccgagaatgcnacntttacggaaccgtggacttcatattcggcaacgccgcggtggtgttccaaaactgcaccctctgggcccganagcccatggcccaacagaagaacaccatcacggcccaaaaccgaaaggacccgaatcagaacacgggcatttcgatccacaattgtaggatcatggccacgccggatcttgaagcatccaagggtagt

SEQ ID NO: 48005 - DNA, 118 bp, Glycine max
  Clone ID: 701134841H2
tgggttgataattgagaagaattagtagatagtttggcttaatcatacggcgcggctgaccaatctgcattttgctttgaagtttaatgaagtttgtatttttcattactgtgataaa

SEQ ID NO: 48006 - DNA, 271 bp, Glycine max
  Clone ID: 701134844H2
atcccctttcaagaaaattcagattcaaagggatgacactacatttgacgcatatgtggttggaaaagaggatgctcctggaattgttgtgattcaggagtggtggggtgtggattacgaaattaagaaccatgccgtgaagatttctcagcttggtagtgggtttaaagctcttattccagatttatacagaggaaaggttggtctggatgttgctgaagctcagcatttgatggatggtcttgattggcaaggtgctgtgaaggatatt

SEQ ID NO: 48007 - DNA, 251 bp, Glycine max
  unsure (1)..(251): unsure at all n locations; Clone ID: 701134845H2
ggtaagagtgagcaacttccacacaccatagtgaaanggcttccaaggctgcacttctcttgtgtttcaatgttctcttcttcaccgtggttagctccacatatgtgccatgcaacccaccccccaaaactccaaaacacccacctgtcccaaagccaccttccccaaagcaagcaagttgccccaaagacactattaagtttggtgtgtgtgctgatgtgttaggtttgatcaacgtgcaattgggaagc

SEQ ID NO: 48008 - DNA, 272 bp, Glycine max
  Clone ID: 701134847H2
gttagaacaacattagcattggttagggactgaaaatgggtccgaaattggcgaaaacggggtcgttccgtcatggattggcggagaagaaggagaggcttctgtcggcgaagatgcggcaggaggaagaggaagaggaagaggaagaacgcaggtggtggtggtcgaagtggaacagtgtgaaacgcgtggctgagaaggcttgggagatgggtcggtctgatccaaggtagataatcttctctgcaaaaatgggacttgctttgaccctt

SEQ ID NO: 48009 - DNA, 271 bp, Glycine max
  unsure (1)..(271): unsure at all n locations; Clone ID: 701134848H2
caagatcagangtttacatcaacctcncagctttgcagaagcttgacacaatgctcatagaaatattggatagtttcaaggatactgaattttggtacgcggagcaagggagcatatcggggaattcaactcggtcacgtggaggctcatttcgaaggattgttcagangaaagatgaaaagtggtggctgccagttccttgtgttcacctgggaggcctctctgataagtcaaggaagcacttgaatgagaaagagactgtgtaatccaa

SEQ ID NO: 48010 - DNA, 261 bp, Glycine max
  unsure (1)..(261): unsure at all n locations; Clone ID: 701134849H2
gggcgacagtcactctccgacacacaacacttccgcnncgnaaaatgtctctggncgcgaacgaggatttccagcacattctgcgtgtgctgaacaccaacgtggatgggaagcagaagataatgttcgctatgacctccatcaagggtattggaaggagattcgccaacatcgcttgcaagaaggccgatgttgacatgaacaaaagggctggtgagttgagtgctgcagagttggatagtgtgatgactgtggtggcga

SEQ ID NO: 48011 - DNA, 280 bp, Glycine max
  unsure (1)..(280): unsure at all n locations; Clone ID: 701134850H2
gaaanacacaatgggcanagaaagtagtacttgtnttcttctatnccttctcattctttcactcntngtggctganatatatggaaatagacaagttcaagctcttaacaaactgcacaagtccaccaagttcagagganattcacaaattgataggagtgagtttgaggtagaggagcttgcttatgatggcattgttcantctcaagagggtctcaaagagaaagatagaattgagagtcttccaggacaaccccctgtncagtttttctcactatgg

SEQ ID NO: 48012 - DNA, 277 bp, Glycine max
  unsure (1)..(277): unsure at all n locations; Clone ID: 701134851H2
ctttcgcttctgaatcttcaacaatggtgctcgangcgacgatgatctgtatcgacaattctgaatggatgcgtaacggagattannctccttctcgatttcaagctcaagcagacgctgtcaatctcatatgcggtgctaaaacgcagtctantccggaaaatacagtgggagttctcacaatggctgggaaaggcgttcgtgttttggttacccctaccagtgatctgggcaagatcttagcctgcatgcatggactagatataggtggtgagat

SEQ ID NO: 48013 - DNA, 278 bp, Glycine max
  unsure (1)..(278): unsure at all n locations; Clone ID: 701134852H2
cacatagctagttgtttaaagtgagaganaaagaaagaagaaaatggcaaactttccagtngttgacatggggaaacttaacaccgaagaganagcagcagccatggagattataaaagatgcctgtgagaactggggtttctttgagttggtgaaccatgggatatccattgagttgatggacactgtggagaggctcacaaaagagcactacaagaagactatggagcaaaggttcaaagaaatggtggccagcaaagggcttgagtcagttcaat

SEQ ID NO: 48014 - DNA, 277 bp, Glycine max
  unsure (1)..(277): unsure at all n locations; Clone ID: 701134853H2
tagactttgatagtttgattagctctaataaggttaaggaccagagagagaaagagaaataagaagaaaaacacaagatgggttattggaagtctaaggttcttcccaagatcaagaaggttttcgagaagaatagcaccaaganagctgctgctgctgaggccaccaagtcctttgatgagtcaaaggaggaatacaacaaagcctttgaagaaaagaagactgaacttcaaaccaaagttgttgaaatatatgaggcttcatcaactganatcag

SEQ ID NO: 48015 - DNA, 274 bp, Glycine max
  unsure (1)..(274): unsure at all n locations; Clone ID: 701134855H2
gagctcggttgnntcctcaatgatccctccttatcctggtacatccgaaccacccctggctggcctttgactaccaggggatactgatggctgatctggcagcaactagacgactacttgctgtagagaaaggaggggagtggtgttccaagatcaggatcttttatgcatcccttccttgttggtcacagagcggggagctcggttgcttcctcantgatccctncttatcctggtagcaatgctcgtgcccgtgatagagtccaggctcttc

SEQ ID NO: 48016 - DNA, 273 bp, Glycine max
  Clone ID: 701134856H2
cttgtccttacctgcctcaacgggcagcccgaaacgcagcatttcccgtgttgtgacgctgcccgaactgcccgattcttggctgagaaattacgagcattcggtctgcagtacctgtgtgttttccttctgtctctctctgacctctgatatttctatattttggttctctgtgtctctacgatcaggatccaacggtccaaaatgttcggggcttgtgctgtttgttttcccaggttttagagctccaaaccttcagatccacctcattcg

SEQ ID NO: 48017 - DNA, 272 bp, Glycine max
  Clone ID: 701134857H2
caaaaatggtaaccattaaagcatcttacacagtccttccaaatgaaccaactccggagggccttttatggctatctgatattgatcaagtggcacgtctacgccacacacccaccatctacattttccatgcaaaacacaaccatgatacattaattgagaggatgagaaactctcttagcaagattttggttcactactatccaatagccggtcgattgagaaggatagaaggtagtggtcgattggaattggattgcaatgcaaaaggg

SEQ ID NO: 48018 - DNA, 250 bp, Glycine max
  unsure (1)..(250): unsure at all n locations; Clone ID: 701134858H2
agtttccggtctccgaaaacnaacgacgcagatgnctcgaagcaaatccagacngatggtgcggttcatccgccaggaagctgaggaaaaggccaacgagatctctgtctccgccgaagaggaattcaatatcgagaagctgcagttggtcgaagccgacaagaagaagatcaggcaagaatacgaacgcaaagagcgccaagtcgaaattcgcaagaagattgggtatcgatgcagctgaatgcttctc

SEQ ID NO: 48019 - DNA, 271 bp, Glycine max
  Clone ID: 701134859H2
ctctgatccttacccttcttccactggcctaatcagctcccccagattttttggtgaaggactcaaactcatcatcaccaagtaaaccaccaaacaatggtgctattgttcattctaagaagatccagagagcaccatccatgccaccattgagattgagagaagaagaccataaaggaagctgttctgttaggagcaaattggtgcaccaaccaacagatcctgttgtgtctcatgcagcaagtgaacctcatgtgcacagatgaaagga

SEQ ID NO: 48020 - DNA, 271 bp, Glycine max
  unsure (1)..(271): unsure at all n locations; Clone ID: 701134860H2
ctcgagcgttntcttacatatggtgagagaagggcttcttggatggtcaatttcttcaacttcagcagctacaggatgagaacaacccggactttgtagttgaagtggtctctctcttctttgaagattctgagagacttctcaatgaccttacctttgctctaaatcagaaaagtattgacttcaaaaaagttgatgctcatgttcaccagctaaagggtagcagctcaagcataggtgctcagagggtaaagaattgttgcatttcttt

SEQ ID NO: 48021 - DNA, 114 bp, Glycine max
  unsure (1)..(114): unsure at all n locations; Clone ID: 701134861H2
gtgcctttgataaagtggttgcntcaagtgacatcttaggcaagcttccctttccacacaacatacgannagcncgnnagggggatgaggngatggccanantctccancnnna

SEQ ID NO: 48022 - DNA, 271 bp, Glycine max
  unsure (1)..(271): unsure at all n locations; Clone ID: 701134862H2
ctctcttctggaatggatctcaccaaagccataaccatcttcatcatcatgcaccatgtnacactgacactacacacatctgancgcaanacaacacttttcactgcatctttnattccaaatacactccaaccncaacatgacanacaaaccacctntgtcacttcatnattgagttttgtctcaaacaccaacaaccatcctttccgttcccttatggaaattacncaacanagcgcgccanagcnaaagntctcnttggttnncaggt

SEQ ID NO: 48023 - DNA, 277 bp, Glycine max
  unsure (1)..(277): unsure at all n locations; Clone ID: 701134863H2
tctcantataaaacccaatgatctcacnctcactctgtttctgatttctcagtcttcgtnnctgcgttcggttcattcagtcgtgtgtctcatccatggcgtttccctacatggaagccgtagtcggantnatggatnttaatgtncatttttgaaactantggnngtgcganaacntaggggccctcaaacttgcctactngtncaaagantttaggaaggtgtatcagccaagcagaatttgcaganatcccagagccgatagtcttgataaaag

SEQ ID NO: 48024 - DNA, 273 bp, Glycine max
  unsure (1)..(273): unsure at all n locations; Clone ID: 701134864H2
actgtancgtangnnttgtnannnncaanganttcattcatgncattggagagaggntganaggagctannganggggggaatgtcaattgatgaacatggagaaggcaaagaagagaatatggctgcttgggcttgttggnataaactctctcaagattcagcctttncaagcttcncactttggnacccnatggtgtcagagttagnntgaaggcngttggtatttgtnggantnatgttcactaacctcanacctgaggtgtgnccattt

SEQ ID NO: 48025 - DNA, 279 bp, Glycine max
  unsure (1)..(279): unsure at all n locations; Clone ID: 701134865H2
gcatcatggcctcaagagcagtgttattgttggctatgtgtgtgcttccggcgatggttgtggccattcgcccagtcaaanaaccctttttgncgtgaagggtcgtgtctactgtgacccttgccgtgctggttttgagacctcagctaccanctacattgctggngctgagattatgttgcaatgcaagagcagggttagcaacgaggttgtgtacacgaagaaggggtacaccgactcaaccggagcatacacaatgtacgtggatgaggatcacgc

SEQ ID NO: 48026 - DNA, 268 bp, Glycine max
  unsure (1)..(268): unsure at all n locations; Clone ID: 701134866H2
ggnactctgtnaacnatctngngtttgaacncangattttgagtggtcccgtgtcngaaactcttgtactnngganactcactctncanggttctagnaatncatgcttnntacnggtncaattgggttcctctctncattctgnttcgtgcattacttgtacncttctgtcaagtnggnttnaagtctcaacgcnctnacaaattnccattactgagaaaagatttcatcaagaggnccctttgaaatgtncaattttatatgtaac

SEQ ID NO: 48027 - DNA, 277 bp, Glycine max
  unsure (1)..(277): unsure at all n locations; Clone ID: 701134868H2
tagctatagtaagctacacttatttgaggttggagaaatatgggctaaagatgttgangttcaagagcaaggaggagagtanttctgcaaaagactaccatgaccctcctccagcacccttgttcgacccagaggagctcacacagtggtccttttataganccctantcgctgagttcatagcaacccttntcttcctttatgtcaccgtgctcaccattattggctacaaaaggcagantgatgccacgctaggtggcaccgagtgtgatggggt

SEQ ID NO: 48028 - DNA, 282 bp, Glycine max
  unsure (1)..(282): unsure at all n locations; Clone ID: 701134869H2
cttgtaagcatggagtcctcanagatctntgnttacntgctncctttggcatgctgcttcntntnctccgncagtanccnttctcggttgtggctacagtggnaaaccccccaaanagcacaagcctggtaaaacaccaaagacacccacagtacccgttgttaagccaccagtcacaatccctcccattgtnnagccaccagtgcacaatncctcccnttgttaatccaccagtcacaatncctcccnttgttantncaccagtcacantccctccnattt

SEQ ID NO: 48029 - DNA, 272 bp, Glycine max
  unsure (1)..(272): unsure at all n locations; Clone ID: 701134870H2
aatgtcattaagattatagaggagttcccactaagtagcnagctagatantcaagcctatggtgatcatacctgtataatagcagaagaacatntggagcctaacttnggtgggntcactgttgagcaggctatccaaaacaagaagttgttcatcttagatcaccatgactatctcattccttatttgaggaaaataantgcaaataccacaaagacttatgctacaagaaccatatttttcttgaaagatgatggaactttgacaccatt

SEQ ID NO: 48030 - DNA, 272 bp, Glycine max
  unsure (1)..(272): unsure at all n locations; Clone ID: 701134871H2
tcccgggtaatttgatcacggattaaaggagaagcttccacccacggattccaggctgagaccagaccagcgacatctagagaatggggantacgagaaggctaatatggagaaacaaaggttggaaaagaggcaaagaatgtcaaggaaaatgcaaganaatggatggcagcctaggtggttccacagagaaaatgaaaatggaacgttccgatatattggcgggtattgggaagccagagcccaaggaagatggattggatgcccaaata

SEQ ID NO: 48031 - DNA, 271 bp, Glycine max
  Clone ID: 701134872H2
gggcttcttttcatatccaatattcattccttgtgcttgtgcttgctatggtgatcacattgatgaaccctaccaatgcaaccctctctccccatttctatgataaagtttgccctcaggcattgccagttataaagtcagtggttcaacgagcaattatccgtgagcgacgcatcggagcatctcttctgcgcttgcatttccatgattgtttcgtaaatgggtgtgatggatcaatattgctagatgacacccgaaacttcactggcga

SEQ ID NO: 48032 - DNA, 266 bp, Glycine max
  Clone ID: 701134873H2
atggaacatgccaataatatagctctcaccttgtgcacaccttaagcaagcaaatgaatggttggaaaaactgagaagcacttcaaacttggaaaatgatgagctggtggaaactgttgacagattgaagcaaaaagtttattcttgtttgcttctacatgttgactctgctgcatttgctttggaaaaccgagcttgattctaggacagtgatatgttttaaagcaatatattctatttaatgttgtttataagttaaattatct

SEQ ID NO: 48033 - DNA, 269 bp, Glycine max
  unsure (1)..(269): unsure at all n locations; Clone ID: 701134874H2
atgttcctaatcatctgtcgcaggcnaggcnggtcnctcntttcatatttccacgggcntntctgtcncgctaaggagtatttcttgatgntttgtntttgccctttnatgttttatattattgattttccttgtgtctgntnatnaatgacaattttacgacatggtcttgtctttngtnatttagattgtcaagttgtatganagatgtgtcattgnatgtggcaattatnntgagtattggatacgctatgttttgtgtatggaag

SEQ ID NO: 48034 - DNA, 124 bp, Glycine max
  unsure (1)..(124): unsure at all n locations; Clone ID: 701134875H2
actactactantttctctctagatntgggttctngngctgtgcaactgtntctgatcttggggctcttggctagctcatgcttagcccaagcaccaggtgctgcaccgtcacaaccacccacta

SEQ ID NO: 48035 - DNA, 270 bp, Glycine max
  unsure (1)..(270): unsure at all n locations; Clone ID: 701134876H2
taaaaaccgaagaaggaagctggncttttaaagtggttgttcaactggctcttgaccttgcaagagggttgagctatctccacacaaagaagattgcccacagagatgttaaaacagaaaatatgcttctggacaagacacgaaccttgaaaatagctgannttggagtagctcgtattgaggcctccaatcctcatgacatgacaggtgaaactggaacccttggttacatggctcctgaggttctaaatggtaatccatacaatagaa

SEQ ID NO: 48036 - DNA, 271 bp, Glycine max
  unsure (1)..(271): unsure at all n locations; Clone ID: 701134877H2
ctttccagttcatacttcatcctattattactttccctctnngcattccaaatggccactgttgaggttgcacagcaaacaccaacaactgtgacagagaatgaaacaacgactgangtaaccaagattgaggaaactaccccagaacagccagccaccgaggttactgccccagaaacagtcaacgaagaagcaaaagaggaagcagcagttgagactaatgaggcaacagaagttacagaggaagggaaggctgagaaaacagaagaag

SEQ ID NO: 48037 - DNA, 270 bp, Glycine max
  unsure (1)..(270): unsure at all n locations; Clone ID: 701134878H2
aaaaagagagaagaaaaatgcgaaagnttcgatccatggcccgttttcttcaagcgcgagtggaaacgcaactngcccttcctcgttggattcgcagtcaccggagctctaatcaccaaactttcccttggccttaccgaggaagaggctaagaattccaaattcgttaaggcgcacaaaaggtganttctgaatcgtgacatctgcctggctttgcattttatgttaggtttgtcaagattactttgcttgacttgattttatggatgg

SEQ ID NO: 48038 - DNA, 269 bp, Glycine max
  unsure (1)..(269): unsure at all n locations; Clone ID: 701134879H2
ttcctttctctgctctttgccttctctgacacatttggtgccttgtagagcgtgttttggcaggaaggtggtatggcgaaggacgttgaggttgctgancgtngctccttctctgggaaggactaccaggaccctccaccagcaccactcattgatgctgaggagctcncaaagtggtccttttacagggctctcattgctggatcattgccactttgctcttcctctanattactgtgctcacagtcatagggtacaagcaccagact

SEQ ID NO: 48039 - DNA, 267 bp, Glycine max
  unsure (1)..(267): unsure at all n locations; Clone ID: 701134880H2
tcgctgctccgtaccagtttcactgcataaatttgagagaaaactctgcaaacatgttggtttatcaggacctccttacaggtgatgagcttctctcggactccttccgttacaatgaaattgagaatggaatgctgtgggaagttgaggggaagtgggttgttaagggagcagttgatgttgacattggtgcaaacccttctgctgagggtggagaagatgagggagtcgatgacgcagctgttaagtgtttgacntgttgaatac

SEQ ID NO: 48040 - DNA, 280 bp, Glycine max
  Clone ID: 701134881H2
cacgttctgaaataaaattggcaaattcttacttttatgacaaggccatgtgtacgcttgcctggaaacttttcctacctgaggaggaatttagtttggaccatccagctgctaatccccttgtcccaggccggggtcctcctttaaagttgatgcctccaacattgacagttgtggccgaacatgactggatgagggatcgtgccattgcttactcagaggagctccggaaggtgaatgttgatgcacctgttcttgagtataaggatgcagtacatga

SEQ ID NO: 48041 - DNA, 275 bp, Glycine max
  Clone ID: 701134882H2
gtgggactctgacttctcaatgcaaaaacatcatcatgggcatggcaacggcgtaggagccatgcacatgaacatgaacaggcatggtggcaagttaggaggcatgtttcaagaaggcatgcacagtgaccaccatggtggcagaaagttcccttttggtggtcatcatcatggtaataataacgcctctcaacatcattttccaaaccatggtgggcaccatgagtattttcggaggaatccgaggagtacgaggagtcttatgcagaggagca

SEQ ID NO: 48042 - DNA, 275 bp, Glycine max
  unsure (1)..(275): unsure at all n locations; Clone ID: 701134883H2
ggccctacctttgtgtccgctactctctctaccccttccttttttgctcacccttttgaantttgagcagtagcactgttgctacacaacaacatcatgaacatgaacatgaacatgaacatgaacactaagagcaggttgatcaccctttgggttgtgctctatttttgttccntcacaaactcactanctgcttcaaagcagtgccatttccctgccatcttcaatttggtgactccanttnagacantggnngtctctcttgctgcctttgg

SEQ ID NO: 48043 - DNA, 276 bp, Glycine max
  unsure (1)..(276): unsure at all n locations; Clone ID: 701134884H2
gttgttgtgtaatgatactcattgtcaccaccaacacgctttcactttactgaacaacganttcatcttcactcttccttcaaatttccaacaagaaagtttgttcaactgtccctttattggcgttagtatgctacctactggagcaaaagagacccaattacgtgagaacaacagccagaaggtccatcctcaaccaatggaagaggccatgaatcagaatccagaagcaatggaaaccctaatntctaaagtttttacaaatatctcttcctt

SEQ ID NO: 48044 - DNA, 273 bp, Glycine max
  unsure (1)..(273): unsure at all n locations; Clone ID: 701134885H2
tcacgacccgccaccgtcaatttcgcagattcaaatcttcagacttttcctccttctggagctccagggcaagatcaccgctgcttccngncctcctcgtnacgctgatgattcattttcaaaacctgtatctggttctgatgaaccgcagcagggtggttggtttcagacttttacaattgctgcttacaaaccatactttgatgttgacacttcagatgttctagagaggattatcgactcactatttccatttagaggatctttcaatga

SEQ ID NO: 48045 - DNA, 269 bp, Glycine max
  unsure (1)..(269): unsure at all n locations; Clone ID: 701134886H2
tagggttttagcgcanttcttctagatttaaggaagatgggtaaggaaaaggttcacatcagtattgtggtcattggccatgtcgactctgggaaatccactaccactggtcacctgatttacaagcttggaggcattgacaagcgtgttattgagaggtttgagaaggaagctgctgagatgaacaagaggtcttcaagtatgcctgggtgctggacaaacttaaggctgagcgtgaaagaggaatcaccattgatattgctttgtgg

SEQ ID NO: 48046 - DNA, 273 bp, Glycine max
  Clone ID: 701134888H2
tacccattgatctgcgcctcctcttccatggctccaccgccgccggtggaacacaacggcgactccgccgctaccgcctccgcctccgcctccgcggagtctcagagatcaattcccacgccctttctcaccaaaacctatcaactcgtcgacgaccaatccatcgacgacgttatttcctggaacgacgacgggtcaacgtttatcgtctggaaccctaccgttttcgccagagacttgcttcctaaatttttcaaacacaataatttctct

SEQ ID NO: 48047 - DNA, 299 bp, Glycine max
  unsure (1)..(299): unsure at all n locations; Clone ID: 701134889H2
gcagtagcagaagccatatatcatccagctgaatatgattggantttcctttgttctctcacntgctggctatggcnttccttatncaatatcttggcttatgntttgtttgttgaatctttctaggcattcccagttttcagttcattgcaggctggtgaagttccaattanatgtggaccaaggcacttttctttctgacatnctttcagcttgcagncagacanaccccaggatttagtgccatggatatgaagctncctagggcagtngccaagttctgcaanatggatnaaggg

SEQ ID NO: 48048 - DNA, 249 bp, Glycine max
  unsure (1)..(249): unsure at all n locations; Clone ID: 701134890H2
accaaattaaagttgagtagncnaaatctttgaanntggtcaaaaccgacccaaaacaccctactttcaattcaattcaaagtattgtttgttttttgtttgttggtgcttacaccgggagaagaaagttcttggaaggaaggaagaagccaaaaggcaaagagacaccggcaccggcatgggtcaagcttttcggaagctatttgacaccttctttggcaacaccgagatgagggttgtgatgcttgg

SEQ ID NO: 48049 - DNA, 271 bp, Glycine max
  unsure (1)..(271): unsure at all n locations; Clone ID: 701134891H2
gttccctctcacactgttctttatctttnttctaggcactacttcagttctgctactgtcttctngctttgtccaattatagtcattttgaacagtgatgaaggcangggtcagcaaacaaccaacagctcttttgggcaagagtggttatgcgcaaatggcttaacatggctagtaacgagcctgattacaccgctgaccctgatgatgataatgaggatgaccctgaaagtgactcagataatgaaggtgagtgtttacaatgatgttt

SEQ ID NO: 48050 - DNA, 62 bp, Glycine max
  unsure (1)..(62): unsure at all n locations; Clone ID: 701134892H2
agntantaataacangaagggnttgatctcttnttcaaaagntttggttttgggagggngtt

SEQ ID NO: 48051 - DNA, 268 bp, Glycine max
  Clone ID: 701134893H2
ggccctgctttgattggcaaggacccaactgagcagactgctattgacaacttaatggttcaacagcttgatggaactgttaacgaatggggttggtgcaagcaaaagctaggagcaaatgccatattggcagtgtctcttgcagtctgcaaagctggtgctagcgtcctgaaaattcctctttacaagcatattgctaatatcgcgggtaacaaaaagttggttttgcctgttcctgctttcaatgtcataatggtggatcacatgc

SEQ ID NO: 48052 - DNA, 256 bp, Glycine max
  unsure (1)..(256): unsure at all n locations; Clone ID: 701134894H2
atccctaacgcgtgcatagcagagtcagagacagagacgcagccatggggcggagacctgcgaggtgttataggcaaattaagaacaagccataccccaagtcacgtttctgccgtggtgttcctgatcccaagatcaggatttatgatgttggtatgaagaagaagggtgttgatgagtttcctttctgtgtccatctggttagttgggagaaggaaaatgttcaagtgaggccctggaacntgnccnattcntg

SEQ ID NO: 48053 - DNA, 271 bp, Glycine max
  Clone ID: 701134895H2
caccatgatgttgggggagacccaccgcgcaaatccaaccgtacacgtgccaccgtggacgccggagatcttctcaccgtacaccggcaatgccgattactctccgtactcattgcaagaagcactgagtgcgcttcagcactacgaatccaccgatgctgagtcagactcggagtttccgtctcgggaaccggaagtcccggtggacgcttactcctgcggaccatttccgcatgttcgagttcaaggttcggagatgcgcacgtggcag

SEQ ID NO: 48054 - DNA, 70 bp, Glycine max
  unsure (1)..(70): unsure at all n locations; Clone ID: 701134896H2
cccgcaccgccaccgtcagcgtctggnngacntgcctgagnctagagagatannnanagagacgaacgtg

SEQ ID NO: 48055 - DNA, 187 bp, Glycine max
  unsure (1)..(187): unsure at all n locations; Clone ID: 701134901H1
ccttcttacanagcgtcaatgtaactgtcgntgaggctcttcggcctcagtngccggtgcnggcgtcaataagcgatctccaggcagctngcaaaaacgggtcagctccagctccgggttccacggncaccaccangtcactcctggaggtganaaaggaggagcaggcanagtcacattcaccggg

SEQ ID NO: 48056 - DNA, 179 bp, Glycine max
  unsure (1)..(179): unsure at all n locations; Clone ID: 701134905H1
accatnagctgcaggagggggaagtgaaccagctgnaatncctgtaggaagtccnttctaccccacttacatntgancggaaatgagcaatcatcantacagcagatcccccatgttcaaactcagagttcttctntaacttctgnctctantgtctcaanaanagatntgcagggggt

SEQ ID NO: 48057 - DNA, 182 bp, Glycine max
  Clone ID: 701134909H1
gcttggtgatgtccctttctgttctcttcactcttggtcttgcgagagaaagccatgccagagacgaagatttttggcatgctgtttggccaaacactcccattccaagttcattgcgagatcttctaaagcctggccctgcaagtgttgaaatcgatgatcaccctatgcaaattgaagaa

SEQ ID NO: 48058 - DNA, 173 bp, Glycine max
  unsure (1)..(173): unsure at all n locations; Clone ID: 701134913H1
cgggntngagcntgncagtagtcatatgcttgtctcaaagattaagccatgcatgtgtaagtatgaaactaattcagactgtgaaactgcgaatggctcattaaatcagttatagtttgtttgatggtatctactactcggataaccgtagtaattctagagctaatacgtgc

SEQ ID NO: 48059 - DNA, 180 bp, Glycine max
  Clone ID: 701134916H1
gttttctgcgtcatctccgattccccgacaatggccacccaaatgagcaagaagagaaagttcgtagctgatggagtgttcttcgctgaactgaacgaggttctgacaagggagttagccgaggacggatactccggcgtggaagttagggttacgccgatgcgcaccgaaatcatcatc

SEQ ID NO: 48060 - DNA, 59 bp, Glycine max
  unsure (1)..(59): unsure at all n locations; Clone ID: 701134920H1
gtcggctcgncccttctgcaggcgatncgctcctgtanttaantggnnggatcgtaacc

SEQ ID NO: 48061 - DNA, 169 bp, Glycine max
  unsure (1)..(169): unsure at all n locations; Clone ID: 701134921H1
ctttaagctcaagctatctaaganttgttattacttctttctttgcaagtttacatctttttgtgtgtnanaaaaatggcatgcattagcaagagcagagcaatgttcttcttcatggctttcttngngggnctccaattgnngnangggntaatncccagaccnntga

SEQ ID NO: 48062 - DNA, 56 bp, Glycine max
  unsure (1)..(56): unsure at all n locations; Clone ID: 701134925H1
cagacaaaccattaccaganaagggtangcttttgcaagcagtgatgaaagctggt

SEQ ID NO: 48063 - DNA, 181 bp, Glycine max
  unsure (1)..(181): unsure at all n locations; Clone ID: 701134926H1
taaaaaccctttttttctctctctttcacacacacnaancanataacgatcagtggtggcagatagagagagacatgatgtcaacttccggcgccggcaggtacatggcttttccgccgtctccgtccgcgcctccgtcgccgcacctctccggtcttcgctccactcccctctccgaccc

SEQ ID NO: 48064 - DNA, 176 bp, Glycine max
  unsure (1)..(176): unsure at all n locations; Clone ID: 701134930H1
gtgctgctcaagcttcttctgtttcacttctacttgaagtttataactgctcctcaattctaatctcgccttccccatttatatatcttctactttctagagtaagagtagctacactcatacacaccacacaacatacgannnnnaaannnaggnnnnnggngggnnngcnccnc

SEQ ID NO: 48065 - DNA, 177 bp, Glycine max
  Clone ID: 701134931H1
gagaatatgaagttgtttgttttctttgttgctgcagtagttttggtagcatggccatgccatggcgcaggctaccaaaggttccctctccgaatgaaaactggctatggtgagcgttcttcggaggtaaaatgcgcaagttttaggcttgctgtggaagcacacaacatccgagct

SEQ ID NO: 48066 - DNA, 179 bp, Glycine max
  Clone ID: 701134932H1
ggggtttcttccccttcagtgccagcaaactcagaatcatctgatgctgctgcttccaagtctcccattcaggagcaagtttcaggcaccaaagagtacaaagttatattccctgtaagctacaaccaacatgtgatgaaatacagaaggggaaaccacacaggatagtacattgatta

SEQ ID NO: 48067 - DNA, 179 bp, Glycine max
  unsure (1)..(179): unsure at all n locations; Clone ID: 701134941H1
tcacactctcctctcactctttccnatcnnanaagatgtanganaatagtaagcactgaggcccaaagtccangaacccccgangnncgancagtcggcngcaccgaattcagctggtgcaaggccgttcncgccggcacnggngtgacagtgctaagcctcctcctctcaaaancgcc

SEQ ID NO: 48068 - DNA, 189 bp, Glycine max
  unsure (1)..(189): unsure at all n locations; Clone ID: 701134943H1
acnccctnttttagcgttngaacaaaattngggttttntcaaccctanggtttaccgtctcttcccctcttcgcaattaggcaaatcaacagcagngcacncgactcacaaanagaagaaaagaagnaanagcaatncagtcattcattgatcgctgaaaggctacgatgacngggaaggggagaccac

SEQ ID NO: 48069 - DNA, 180 bp, Glycine max
  Clone ID: 701134945H1
agaggccgtgcatgaccgcatttgcgcccaggaacaaaagatgagtttttcattctcaagcgcaaataacaactaagaagtcctttcttctttgtttttttgtttttctttttcttttaccttaatatgaaaaaaatccaaaataggatgttctaaagtatgatatttttttatcttttg

SEQ ID NO: 48070 - DNA, 178 bp, Glycine max
  unsure (1)..(178): unsure at all n locations; Clone ID: 701134948H1
gtcgccaccaacaccgaacntcnngcttgtnaaacacgntgatttcaacagagtcttcattggaggtcgnacagcgctggtgctaatatagttcataacattgccatgcgtgctggggctgaagctttacctggtggtgtcaaactcttgggtgcttttctttctcattcctacttct

SEQ ID NO: 48071 - DNA, 177 bp, Glycine max
  unsure (1)..(177): unsure at all n locations; Clone ID: 701134952H1
gttgccttggattatgagcaagaacttgagactgcaaagagcagttcttacagttgagaaaaactacgagcttcctgatgggcaagttatcaccattggagctgagagattccgttgccctgaagttnttttccaaggntncagatccgatagtgttggccttcgggatcggagtaa

SEQ ID NO: 48072 - DNA, 180 bp, Glycine max
  Clone ID: 701134953H1
ctttgctatcttttgtgttgttttggcatgcttgattggaattgacctctgttgttgtttgccctgtattattgctattctctatgctgttgcaggacaggagggtgcatcagaatcagatctcagtatacttccaaaatacagatttcaattgttaagcaatgaggaaacacctggtgt

SEQ ID NO: 48073 - DNA, 180 bp, Glycine max
  unsure (1)..(180): unsure at all n locations; Clone ID: 701134961H1
gtgcctaaccattanaanncacactctctttcacnanattctnntatgaancgancaaagagaagacaagannaaagagcgatttttccctcaccaaagaagaaccaaaacaatggcggatcaactcaccgatgaacagatctccgagttcaaggaagccttcagcttgttcgataagga

SEQ ID NO: 48074 - DNA, 172 bp, Glycine max
  unsure (1)..(172): unsure at all n locations; Clone ID: 701134973H1
ggcaaagttaataanattctttgagttgaananaggggccaagattccttctgttgggttaggcacttggcaagctgagcctggtgttgtagccaaagctgtcaccacagccattctggttgnctacaggcatattgattgtgctcncgcgtataacaatcaagcagagatt

SEQ ID NO: 48075 - DNA, 157 bp, Glycine max
  unsure (1)..(157): unsure at all n locations; Clone ID: 701134974H1
gttcttttcctctttgnccttgtctcgttcactttcccatgcttctntcaatgatnctctgtgtagcagacctaaaaggtccagatagcccttcaggctatcagtgcaagccacctaacacagtcacagtggatgactttgtgttctctggctttgt

SEQ ID NO: 48076 - DNA, 184 bp, Glycine max
  unsure (1)..(184): unsure at all n locations; Clone ID: 701134981H1
ctttcttcttaataatgtgattgaaaaaatattgctattgacacggngagcagaaagatacttggttgttggtgctgtccggttcgttcgaactattctctctcgccatgatgagcatctganaanttatntggntangaataangctctngccatngnnggacattgaggaatgtcggtatga

SEQ ID NO: 48077 - DNA, 176 bp, Glycine max
  unsure (1)..(176): unsure at all n locations; Clone ID: 701134986H1
caaagcacnctctggntttggtccttcgatagggttcggggattnacaatttaccatttngtcgantacttatttanccccanaaatcccatgatccttctctgatcgtttcgatactctcaagttcncnngggaaaagnantnannnggtttgggattcgtctgctttgggtccc

SEQ ID NO: 48078 - DNA, 53 bp, Glycine max
  unsure (1)..(53): unsure at all n locations; Clone ID: 701134987H1
ggttagctgtgtnaagcagctcttcatgaaantactcncnanctttcnagaca

SEQ ID NO: 48079 - DNA, 173 bp, Glycine max
  Clone ID: 701134989H1
cttgtgccgtttgtgttgttttcgggacgaagaagaagatggtgtcaggttctggaatctgcgtccaagcgggtggtggtggacgcgcgccaccacatgctgggtcgtctagcctccatcgtggcgaaggagcttctgaacggccagaaagtggtggtcgttcgctgtgaaga

SEQ ID NO: 48080 - DNA, 103 bp, Glycine max
  unsure (1)..(103): unsure at all n locations; Clone ID: 701134990H1
ggaacagtngngtagagaataagctatgcagttcaatatcacatcacaattccntcatatcttcncnnaaaccttcttccttatcattacctcttcacttncc

SEQ ID NO: 48081 - DNA, 171 bp, Glycine max
  unsure (1)..(171): unsure at all n locations; Clone ID: 701134994H1
atcnctgnnaaacaaaccatngcttccgaancaaaccagntnncngaatgtgtgtgtanttggagtggaccctcggggctattggcagcgagggagctgagaaaagaaggtcacaaggtggttgtgttggagcagaaccatgatattggaggtcaatggctatatgaccca

SEQ ID NO: 48082 - DNA, 171 bp, Glycine max
  Clone ID: 701134995H1
ctcaactctgcttcttttcaatcagttacattttctttggtattccaatggccactgttgaggttgtgtcagcaaaggtttccctcccagaggacacaaaagaggcatcattgaaggctgatgagaagaagaacacagaagaagttgttgagactccaacaccaacaccag

SEQ ID NO: 48083 - DNA, 295 bp, Glycine max
  unsure (1)..(295): unsure at all n locations; Clone ID: 701135001H1
gccaggagctgccggttganaagggttccatttactcgctcacgttttgtgcggctcgcacctgcgcgcagtttgagtccatcaacgtctcggttctgcctgcgtcgcagacgatagacctgcagacactctacaacgtccagggatggaacccttacgcggtttctttcaatgcggatcaggacacttttaggttgctatttaagaatcccggcatggaggatgaccccacttgtggccccatcattgacaacattgctatcaagaagcttttcactcctcttaaacccaaaga

SEQ ID NO: 48084 - DNA, 223 bp, Glycine max
  unsure (1)..(223): unsure at all n locations; Clone ID: 701135003H1
tttttcaagcaacaaaaccttcaagaagctgaaaagccaacaaaagggtgcanaaattgttgagaactcagacatggcttgtgggtgttcttcaacaacattggcagagaagatttcatggaattgttctgtgtttgtggcactaatgctggttttgagtagctgcgagtcaaacacaagtgatttcacaagtcagatgatgcttcatgggagtgtcaccggc

SEQ ID NO: 48085 - DNA, 286 bp, Glycine max
  unsure (1)..(286): unsure at all n locations; Clone ID: 701135004H1
aaatcatctctctccaaaaccaactcttcttcttcttactccactcttctcacttccactatcgccatggctnncncactcaaaccaaccagntcccggagctgaagggctaggagagaaggaccccccaacaagtttccagaacccgctttctgagatatccccgtcgccgtctccgtcgtcggcgccggcgccggcgctggtgctgtcgaactcggggaagcgaatcgaccaggcggggaagaagaagtacgtgaagcaggtgacggggcgccacaacgacacc

SEQ ID NO: 48086 - DNA, 164 bp, Glycine max
  unsure (1)..(164): unsure at all n locations; Clone ID: 701135005H1
gtgaacagagaaagattgaagaagaaacagaagaagagaaggttttattttgnatggnaagtccaggtttatacngcannagtgntcccatctccttcaatcgagttcgcntngnnggaagggaagaagntgttnggtgaagngcttgagcgaggaaccatgca

SEQ ID NO: 48087 - DNA, 282 bp, Glycine max
  unsure (1)..(282): unsure at all n locations; Clone ID: 701135006H1
ggaaatgcaaatttcaactctttattcctaaaatttgcaatttctcatgtgggtatttcttctttgcccttcttgcanccgggactgaaatcttgtacagtcttcaacagaggaacactcattcgccagtgtttaaatggaaagcggaatttttctctatcagaaaagcgatttaattgcaagttttcaaagaaagacagattctttatccctagaagtagtagttcttctaactctagtggaagtacggatgaaccctctaatgagacagagaagacacca

SEQ ID NO: 48088 - DNA, 257 bp, Glycine max
  unsure (1)..(257): unsure at all n locations; Clone ID: 701135007H1
gtccgaggttaatgaagtccgcaggaagcaagcatctttagaaaacaagggtgtgttagtgttcttagtgtgttgtattttttcaatgctagttatattacggctatctctagatatggctacgagtgtctatagagtattacaaagtgttaatagaacagattgctccaggaaattttgtgccgttagctcttcatggtttctcctnnnnntgaattgtatcattattatttttatattaactctgtgatagtcca

SEQ ID NO: 48089 - DNA, 161 bp, Glycine max
  unsure (1)..(161): unsure at all n locations; Clone ID: 701135008H1
tngaaggaacacaatggcggtntctctatcggcgctcacaacntnnntctcttcantctccttcncttcncacatttcccagagannctgcactctctccttcgncagaagccgaatccntctctctctccgtntnnnccttgccccaaaacccnctcctc

SEQ ID NO: 48090 - DNA, 280 bp, Glycine max
  unsure (1)..(280): unsure at all n locations; Clone ID: 701135009H1
cagcgcggaggggcaagctagggagtaaganatggatttggaccagtggatctccaaggtgaaggatggccagcaccttctcgaagaggagcttcaacttctttgcgaatatgttaaagagatccttattgaggagtcaaatgtgcagcctgtcaacagtccagtgacggtttgtggtgatattcatggtcagtttcatgatctaatgaaacttttccagactgggggtcatgtgccggagacaaattacatttttatgggagactttgttgatcggggt

SEQ ID NO: 48091 - DNA, 278 bp, Glycine max
  unsure (1)..(278): unsure at all n locations; Clone ID: 701135010H1
ctccgcccctggacaaaatcaaggtcccatttatgcaagctttgnttcacattcctgttcgtttttccttcgcaccttttcttcttcttcgctccgtgccatgtcttcctctctcgctcttccttccactcccttcttcgcctctggaacaagaatcttcgctctcaagcactctctccctcgctctagggtttccatgagcgtctccgctggatctcaggcttccgttcaccagggctttgttcgccgattacaaggcctccacttcattcctcttc

SEQ ID NO: 48092 - DNA, 277 bp, Glycine max
  unsure (1)..(277): unsure at all n locations; Clone ID: 701135011H1
gacgcaacacactttcactgagaaaggatctctatctaccaaggagcagaataaaacccttctctctggtaagtgaataagagaatggcttcagatcggaaacttcacactttcgaggaggtggcaaagcacgaccagaccaaggattgctggctcatcatttctggcaaggtgtatgatgtcacccctttcatggaggatcatcccggaggtgatgaggttttgttatctgcaacagggaaagatgcaaccaatgattttgaanatgttggacaca

SEQ ID NO: 48093 - DNA, 90 bp, Glycine max
  unsure (1)..(90): unsure at all n locations; Clone ID: 701135012H1
agagtctctctcttcctatctctctctttcaatgtcagggcacaaatcttccacacaacatacgaccntancncncncggngcgganntt

SEQ ID NO: 48094 - DNA, 283 bp, Glycine max
  unsure (1)..(283): unsure at all n locations; Clone ID: 701135013H1
accatcagctgcaggagggggaagtgaaccagctgcaattcctgtaggaagtccatctaccccacttacatttgatggaaatgagcaatcatcactacagcagatcccccatgttcaaactcagagttcttctttaacttctgcctctanctgtctcaacaacaaatcttcaaggagttcactctgatgatagaagttttgcctctcattcttttcctgcaagccaagacagagcacagccatcagaacaatcattctctgattctctgcgctccagatttaa

SEQ ID NO: 48095 - DNA, 105 bp, Glycine max
  unsure (1)..(105): unsure at all n locations; Clone ID: 701135014H1
gccanaacattcaacaatgtcgtattttnccaaggggacgttcgcgacgacgagcnatcatcggtggaacggacttacgnacggagtaacgaccccacnccatat

SEQ ID NO: 48096 - DNA, 288 bp, Glycine max
  unsure (1)..(288): unsure at all n locations; Clone ID: 701135015H1
ggcacttcgttgcttggtgatgtccctttctgttctcttcactcttggtcttgcgagagaaagccatgccagagacgaagatttttggcatgctgtttggccaaacactcccattccaagttcattgcgagaacnttctaaagcctggccctgcaagtgttgaaatcgatgatcaccctatgcaaattgaagaaacacagtacccgaaaaccttcttctataaagaagaccttcatccaggcaannnnngaangtacaattcagcaagcctccctttcaacaaccatg

SEQ ID NO: 48097 - DNA, 289 bp, Glycine max
  unsure (1)..(289): unsure at all n locations; Clone ID: 701135016H1
aganaatgggtactaacagatctttaatggccacgatcctcatcgtnttcnccacggtgttggcagtgtcatcggcgttggacatgtcgataatctcgtatgacagaagccacgcggacaagtcagggtggaagagtgacgaggaggtaatgagtatatacgaggagtggcttgtgaagcatgggaaggtgtataacgccgtcgaagagaaggagaagaggtttcagatcttcaaagacaacctcaactttatcgaagaacacaatgctgtgaaccggacatacaaggt

SEQ ID NO: 48098 - DNA, 293 bp, Glycine max
  unsure (1)..(293): unsure at all n locations; Clone ID: 701135017H1
aatggccaccacctcggagagggatatggagaacaagatncgatcaagaagaactgaagcatcttgggtttgtgaagattgcggcaattaaagcctttgtgtgtgtgtcgaatctctacgacttcgcaaagcaaaactcgggacctttgagatctgctgttggaaccgtggaagacactgtaaccaccgttctgggtcccgtctaccaccaattcaaggctgtccccaaccacctcctcctttttgccgacaacaaggtggatgaagctgctcacaaattcgatgagcatgca

SEQ ID NO: 48099 - DNA, 95 bp, Glycine max
  unsure (1)..(95): unsure at all n locations; Clone ID: 701135022H1
accagttggaaatggagacaataacagagaacggatcagatggtgtgagtttggcaagaanatacatccaacaacgcccgtcgancggttgccaa

SEQ ID NO: 48100 - DNA, 278 bp, Glycine max
  unsure (1)..(278): unsure at all n locations; Clone ID: 701135023H1
ggaattaaccatacttgggtcattagacctatcatccgtgaagaacatggaggatcctaaggtggttaagaaagtgaatgactgagtaacatgtagggctgatgctattcctggggacccaccatgtcagcatgctggtccgcggtaagtcatgtgggccacaaagtaaganaaaaaagctaatgaattcaaacttgaagttctaaaccaaaaaattcttgctgatgatgatgctttagaaagggagaaaaagaagaaaaaaaataataatttttatc

SEQ ID NO: 48101 - DNA, 280 bp, Glycine max
  Clone ID: 701135024H1
attgaggtgtgcatgttcattattgggcaccgatggattcagtttctgtgcaaatagcgacgtcaaaatttgttctttgccccgcggcgacggccagttctaagaagaatgccatcatcaatttcagttccaatttcaaaggaactctcaccaaaatccatgccatttccccaaatggctctgcctctagctgcacttcgcgtgtgtctgtgtcaagtttaaagacagacaagaacaaaggcagaagtaatcttgaatccctgttttgttatgataaggc

SEQ ID NO: 48102 - DNA, 279 bp, Glycine max
  unsure (1)..(279): unsure at all n locations; Clone ID: 701135025H1
gcacaccccaattctctgccctcaactgcatcgatctctccaaccccgacatcaaccaatccgtcaacttactcaaagaggcatgtttggattccggttttttctacgttgtcaatcatggaataagccangaattcatggacgaggtttttgcncagagcaagaagttcttctctcttcctcacaacgagaagannnagactctcaggaatgaacaacacaggggatacacccctgttcttgatgagttgcttgatcctgaaaaccaagtacatggag

SEQ ID NO: 48103 - DNA, 242 bp, Glycine max
  unsure (1)..(242): unsure at all n locations; Clone ID: 701135030H1
ctcanncaatcagttgcatantctttgctattccaatgacnantgttgaggttgtgtcacccaaggttgccctcccaganganacaaaagaggcatnattgncaggttgacgaggagaagaacacagnagaagttgttgagactccaanaccngaaactgtggtcatgngcaaaccaaggaggnaagtactgaggcccaaggactgnagcttcagaagacaagnccctcgggtgaagtncng

SEQ ID NO: 48104 - DNA, 290 bp, Glycine max
  unsure (1)..(290): unsure at all n locations; Clone ID: 701135033H1
ctcaattactacatcgtattctgcaaattcaaactgngtcttggttttctgaaagatgggaggtggcaaggacaagcaccatgatgaatctgacaaaggaattttttcacagcttgctcatggggtagctggtgcagcacatggtggacatgggtacccacctggggcttacccaccaccacctggggcataccctccgcaccaagggtaccctccacaacatgggtatcctccggctgggtaccctccacatcaaggttaccctcctgctggttacccaccagctggtt

SEQ ID NO: 48105 - DNA, 82 bp, Glycine max
  unsure (1)..(82): unsure at all n locations; Clone ID: 701135038H1
tcctcattttcttcacccaaaaccaaagtcnnaaaaatcatcaccattgtccanagcaacatacgactcnaggnnnntgngg

SEQ ID NO: 48106 - DNA, 90 bp, Glycine max
  unsure (1)..(90): unsure at all n locations; Clone ID: 701135039H1
gccagaaacaggagataaggtaaggcaaggcacgcaactccaatcttgaatcactctgcactnctgcactcngcacaacgtacgnnngng

SEQ ID NO: 48107 - DNA, 269 bp, Glycine max
  unsure (1)..(269): unsure at all n locations; Clone ID: 701135041H1
gggaactctcctttcacctagctcgagtcttttcttncttcccggagctctgaacttgaccgacgccattttcacatcaaaacgcttcaactaaaaaaatggcgttcttgtggaacaaaactagtatcgcttcccattttcgatctcactctcagaagactgagggtttgacttcttttccgcgccgtcgattccacgtcgaacccggggctcgtgaaaaagctctcttggcagaagatgcaacgctgaaaccgttcaaatcatataag

SEQ ID NO: 48108 - DNA, 226 bp, Glycine max
  unsure (1)..(226): unsure at all n locations; Clone ID: 701135047H1
tgattnatccctcatcatcatcntcatgnccncgtncncnnnanaanctctngtncgttgctacaacagncnnctggntnggttntcgtggccgcaatgtgtctgcagtcgtnggcgggcatcgggtacttgttngggagcatntcgcccgtcataaaganctctctgggcnacaaccagaagcngctcgccatnctcggcgtcgcnaaggaccttgggcgagcgc

SEQ ID NO: 48109 - DNA, 286 bp, Glycine max
  unsure (1)..(286): unsure at all n locations; Clone ID: 701135049H1
ctcaatcgcctccactctctcccgcaaaccattcttcttctcttctctccctctgagcctttcatcgctcctcggagagatggctgcgtccgaagaatcatcaaccactcagatggttggcaatgcttttgtgcagcagtattactccatattgcatcaagagccagaccaagtccacagattttaccaggagtctagatctaagtcgacnngaagaagaggtaccatganaatgggggntattactcnggnatttaataaaaagatactcncccnggttacanag

SEQ ID NO: 48110 - DNA, 285 bp, Glycine max
  unsure (1)..(285): unsure at all n locations; Clone ID: 701135051H1
ccagtagtncatatgcttgtcncaaagattnagccatgcatgtgtanntatgaactaattcagactgtgaaactgcgaatggctcattaaatcagttatagtttgtttgatggtatctantactcggatnaccgtagtaattctagngctaatacgtgcnacaaaccccgacttctggaagggatgcatttattagagaaaaggtcaacacaggcnactgcctgcttgctttgatgattcatgataactcgtcggatcgcacggcctttgtgccggcgacgcatt

SEQ ID NO: 48111 - DNA, 279 bp, Glycine max
  Clone ID: 701135056H1
caggcttcacctatcactgttggtgagcgacaagctgttgttgaggaaaagagaactactacacgagtccagcggtagtgggagagggaggtactcaggaagaggtggtttccgaagcgacagtttcagagcgcgtgggaaatttggcagtggacgtggttatagcagaaatgaattcagaaaccaaggagaattctcagggcaacctaggagttctcaacggccaaatcaaaatggaggtgggcgtggtggtggacgtcaaggtgtggggaaccgtaa

SEQ ID NO: 48112 - DNA, 275 bp, Glycine max
  unsure (1)..(275): unsure at all n locations; Clone ID: 701135057H1
ggaagtacctaatctttgggctagcttatggttctgggtttttctgttgtttaccttggtataggtgcatggaaggctgataatacagacatgtaccataaggttattattttagatacagggtgcgtaacccaagatcttgaatgtcgatgatggcgtcctcatcctcttccttgtcaccgtctcaggcatngcaaccgtgatggtttccttcacgcattaagctcgacgatgaaaaattcctctacgaacgtgctaaatgttgaggccacatt

SEQ ID NO: 48113 - DNA, 279 bp, Glycine max
  unsure (1)..(279): unsure at all n locations; Clone ID: 701135061H1
atccctccttaagcagacttntcgtgttgctcttgaggagatcaaaatcaagtttatcgatacctcctcatagtttgggcatggtcgcttccagaccacacaggagaagcagaagttctttggacgcctcaaagcataattatgttaattggatggaaatgctggaattctatttggttgccatcacttataaactttgtagtgtttctgttttgatattatggattctcgggtagtgagttttttttctccttaagttggncaaacttttgtttcagg

SEQ ID NO: 48114 - DNA, 284 bp, Glycine max
  unsure (1)..(284): unsure at all n locations; Clone ID: 701135066H1
ctcactctcttcgcagcggcactctcggtggctttcatcttntcgggttgtcaagatgtacacatgcgaggaagaaaattcacaaggataaggatgctgagccaactgaatttgaggaatcagttggacaggcattgtttgatctagaaaataccaacaatgagctgaaaagtgatctgaaagatttatacataaactcagctgtccaaattgatgtttctggcaaccgaaaggctgtggttatccatgtcccctacagactaaggaaaggatccggaagattc

SEQ ID NO: 48115 - DNA, 259 bp, Glycine max
  unsure (1)..(259): unsure at all n locations; Clone ID: 701135068H1
aaaccctagccgctcttctcttcanncttcactttggaaaacaatcataatggcgttctgtanataaggttggaaatgtcttgaggcagggtgctgctcgcagcacacatgcccctgttgcgtccatgcttaattacatccgctgcatgtcttcaagcaagcttttcattggaggcctttcatatggagttgatgaccagtctcttaaggatgcatttctggctttggagatgtggttgatgcaaaagttataactgat

SEQ ID NO: 48116 - DNA, 246 bp, Glycine max
  unsure (1)..(246): unsure at all n locations; Clone ID: 701135070H1
aaaaagcttgcaccanccataggtattgctgctgatcatcgncgcaagaaccgttctttggaaagtctgcaagctaatgtgcagaggctgaaaacatacaaggccaaattggttgtgttcccaagacgggcacacaaggttaaggctggtgattctactcccgaggagcttgcaaatgcaacacaagtccagggtgctttcttgcctattgtgagggagaagccaactgttgaacttgtaaaggtt

SEQ ID NO: 48117 - DNA, 274 bp, Glycine max
  Clone ID: 701135072H1
agtttcacagcagcaatggtgtacgtcaaggctcagaaatcaaaagcctacttcaagagatatcaagtcaagttcaagagaagaagagagggaaaaaccgattaccgtgccaggattcggttgattaatcaggacaagaacaaatataacactccgaaataccgatttgttgttcgctttagcaacaaggacattgttgcacaaataatatctgctagcattgctggcgatattgttcttgctgcagcatatgcacatgagctgccacaatatg

SEQ ID NO: 48118 - DNA, 275 bp, Glycine max
  unsure (1)..(275): unsure at all n locations; Clone ID: 701135073H1
agtacctccacattgtctcctactnttactgttctcttctcttctcatcatttttattttttccaatcaaaccaaacaanacataagcaccgctcttttctctccgaaatccccatctcccttcacttctgagctctggacgagatcccagatctcaccatctttcacgcactcttccatcngattcacccnctcgtttaacgcaaactcataacttgaaggttaatggctgctccaccggcaagggctcgtgccgattacgattatctcataaa

SEQ ID NO: 48119 - DNA, 271 bp, Glycine max
  Clone ID: 701135075H1
gcccaggcaaattatgatatgtttgctgatgatgacgagcatgataccagtaagccatctacagatgaaaataatgcagtcagtcaatcttcttcagttgccataaattctggtcctgagggtggagcatcacaaaacgattatgtgtatgatgaatcttctgggtactattacagcagcactttgggctattattatgatccaaatacagggctttattgctcagcagcatcagggcaatggtactcatataatgaggagactagcgcat

SEQ ID NO: 48120 - DNA, 267 bp, Glycine max
  Clone ID: 701135077H1
gaaaaggttgtgctgcttctctctctgtctcctcgttcgcttctttctctctctagggttttgggggttctgagtaaacgttgtaaaacatgcagctgacacttgaattcggagggggattggaacttctttgtgactccaagaagattcataatgtcaatattgagcaacacaatggagaagacaagaccaacttgattaaggagaggcctgaaatgtttatgaaaggagatactgtgagacctggagttcttgtccttgtgaatg

SEQ ID NO: 48121 - DNA, 285 bp, Glycine max
  unsure (1)..(285): unsure at all n locations; Clone ID: 701135079H1
cgcagttcnctacctctcctttcaagatgcagatagntcgtcaagaccctcaccggaaagaccatcacccttgaggtggaaagctctgacaccatcgacaacgtcaaggccaagatccaggacaaggaaggaattcccccggatcagcaacgtctcatcttcgccggaaagcagctcgaggacggccgtaccctcgccgactacaacatccagaaggagtcaacccttcaccttgtccttcgtctccgtggtggcatgcagatcttcgtcaagactctcactggc

SEQ ID NO: 48122 - DNA, 284 bp, Glycine max
  unsure (1)..(284): unsure at all n locations; Clone ID: 701135080H1
actaccaggaagcaattgaggacattaccaaaagaatgggngctggaatggccaaatttatttgcaaggaggtagaaacaattgatgactatgatgaatattgtcactatgtggcgggacttgttgggctgggtttatcaaagcttttccatgcgtctggttcagaagatctggctccagatgacctttccaattcaatgggcttgtttctacagaaaacaaacattattcgagattatctggaagacatcaatgagatccccaagtcacgcatgttttggcca

SEQ ID NO: 48123 - DNA, 269 bp, Glycine max
  unsure (1)..(269): unsure at all n locations; Clone ID: 701135084H1
ttctgggtcagtgagaaaatggctgattgggcaacggttttgatcggggtaantctgttcgtgctgctccaaccggggctgcttttctcctttcctgggaacgggaagcagcttgagttcggtagcatgaagaccaacggcaaagccattttcatccacacgctcatcttcttcgcgctctactccgtcctcatcctcgccgttaaaatccatatctacaccggctgatccggttcccgggntctgaggtatcatttcgttataggtta

SEQ ID NO: 48124 - DNA, 278 bp, Glycine max
  Clone ID: 701135085H1
ggctccggctcttgccgctaagaagaagcctgagaaggtcacgaatccgttgttcgagaagcgtccgaagcagttcggaatcggaggggcgttgcctccgaagagagacttgactaggttcgtgaagtggccaaagaatgttcaaattcagaggaagaagaggattctgaagcagaggttgaaggttcccccagctttgaaccagtttaccaaaactcttgacaaaaacctagcaacaagtctgttcaagttgcttctgaagtacaggcccgaggaca

SEQ ID NO: 48125 - DNA, 274 bp, Glycine max
  Clone ID: 701135087H1
ttcaagcattgcatccctcttgatttgtagtttgttttgtgctttagataaaagttctgccaaatcaagaggggttttaagatcatagtgtgtgttttgcaacaatggctaagttctttgctgctatgatcttggcactctttgccatttccatacttcaaacagtggtaatggctgctaatgaacaaggaggccacttgtatgacaacaagagcaaatatggaagtggaagtgtcaagagttaccaatgcccatcacaatgctcgaggagatg

SEQ ID NO: 48126 - DNA, 247 bp, Glycine max
  unsure (1)..(247): unsure at all n locations; Clone ID: 701135088H1
gcgacgatttgctttgggctatgaccactttacgactcgaacnngtatattgatccgctcaaggtttanctcgccgcttacagagagattgagggtgattcaaagggttcggccaagggtggagatgcatctgctaagagagatgtttatcagagtcctaatggccaggttgagaatgttgctcatcaaggttctttctcacaaggtgttaattatacgaattcttagccccaggctcaacatatga

SEQ ID NO: 48127 - DNA, 254 bp, Glycine max
  unsure (1)..(254): unsure at all n locations; Clone ID: 701135089H1
cttttcacgtcattatcctaaaaacttgcagattttcacatcccaaacaacancaagggnaggttcatgtttctgtcggtgctcctttgtgccacttttcatgtctccttctctattatcgacggtttagttgccaacggcaactttgagttgggtccaaagccctccgccctaaaaggaacagtggtggtgggcgggagccactcgatcccagaatgggagatctccggctttgtggagtacataaaatccgg

SEQ ID NO: 48128 - DNA, 272 bp, Glycine max
  unsure (1)..(272): unsure at all n locations; Clone ID: 701135090H1
cgcnaatcaaggtctagcggtgacgccnccngccgcgngctgganggactnagcaagaagggangnngnaggntatnggggatnnaacttatactgacntatgtggtgccnaagagagggaactatatggttagtgttgagtgtaatgggaggcctatcatggggagtccctttcctgtgttnttcagtgcagcaggtaatagtactggagggctgttgggtttagctcctgcatcttcatttccaaatcttgttaatcggactncgncaac

SEQ ID NO: 48129 - DNA, 275 bp, Glycine max
  Clone ID: 701135092H1
ggaactttttgttatggccagggaacatgctccatcaattatcttcatggatgaaattgacagtattggatctgctcggatggaatctggaagtggcaacggtgatagtgaggtacagcgtactatgctggaacttctcaaccagttggatggatttgaagcttcaaataagatcaaggttttgatggccaccaatcggattgatatcctggatcaagccctccttagaccaggacggatagaccggaaaattgaatttccaaaccctaatgaag

SEQ ID NO: 48130 - DNA, 278 bp, Glycine max
  Clone ID: 701135093H1
agagcatcacttcgattctcaggcggatgcgggagcgtccaagacgtatcctcagcaggctggtaccattcgcaagaatggctacatcgtcatcaaatccaggccttgcaaggttgtagaggtctctacgtcaaagacaggcaagcatggacatgcaaagtgtcactttgttgcaattgatatttttaatgggaaaaagcttgaagatattgttccatcatcccacaactgtgatgttccacatgtgaatcgcactgactatcagcttattgatatct

SEQ ID NO: 48131 - DNA, 281 bp, Glycine max
  Clone ID: 701135094H1
acaatgaggcctgctcttgctttgcttcctcttctatttgctttcttgttagctgccactacagaatcaagaaaagatacaggggaatattggaaaatgatcatgaaagatcaggaaatgccagaaggacttcaaggtcttgtttcatttcaatctgaaaataaccctaagactcaagagcagcttggtaaaggttccaaaaaccattgtgaagagtctctagttacaaatacacaagttaatagtgacttcgaacccataccaagtgttaccaaatatga

SEQ ID NO: 48132 - DNA, 283 bp, Glycine max
  unsure (1)..(283): unsure at all n locations; Clone ID: 701135095H1
ttagctacctagattattcacttcaattcctcacaagcaacaccgttntcttgctccaatggcagctttgtatctcccaataagcatgttggcactcattgttgttgtttctcttggttngtggagtggtgttcaaggtgcaccacaagtgccatgctacttcatttttggtgattctttggttgataatgggaacaacaaccagctccagtctttggctagggctgattacttgccttatgggattgacttccctggtggaccttctggaaggttttccaat

SEQ ID NO: 48133 - DNA, 287 bp, Glycine max
  unsure (1)..(287): unsure at all n locations; Clone ID: 701135096H1
atttaatgncaattnnnatcaaatgcaagaggcccaacagtgtagagcacaaaaggaagcctcttgcatttgagcccaattgccattaaatgcaagaaattatggntatatcatatttcaagnnattttaagntatatgatagagctgtgtnaccctctaatttgccttctttctggccttgttttgtttgtcttcatttttatttgtggttttgcgtttgtaggctctgggcttgaattgatcatacacaataatgagtgacagtacgtatgaaatggatagttct

SEQ ID NO: 48134 - DNA, 269 bp, Glycine max
  unsure (1)..(269): unsure at all n locations; Clone ID: 701135101H1
caaaccctccaaccttagtttcaattctaaacttgttcaccctttattctctcctcttccaaacatcaaccatggncctcaataataaccttggtgacatccaccttggctctttctttctttcactttgtcatgtgctattgacacctccaccatcaccaactacaccgacaatgaggtcatgaccatgtacgaggagtggttggtgaagcaccaaaaggtgtacaatgggttgagagagaaggacaagaggttccaagttttcaaag

SEQ ID NO: 48135 - DNA, 166 bp, Glycine max
  unsure (1)..(166): unsure at all n locations; Clone ID: 701135102H1
ctcattcacacgaatcacactctccacagtgcgattcattnaccaatggatcgcaacggtgttctctctcttgcattcatctgcattgtagtcgccggcgtcggaggccagtctcccgccgcagcgccctcgaacactccggnaacccccgccgcnnnnactcccg

SEQ ID NO: 48136 - DNA, 257 bp, Glycine max
  Clone ID: 701135103H1
agatgatccacgttcttttcctctttgctcttgtctcgttcacttcccatgcttctgtcaatgatttctgtgtagcagacctaaaaggtccagatagcccttcaggctatcagtgcaagccacctaacacagtcacagtggatgactttgtgttctctggctttgtagctggaaacaccacaaacactttcaatgctgcattaacctccgcatttgttactgattttccaggtgtgaatggtcttggtgtatctgtg

SEQ ID NO: 48137 - DNA, 255 bp, Glycine max
  Clone ID: 701135104H1
ggggtttgtcacgctttttgtcttgacggtggtctgtggacgaggatgttggattttggttttgattctttgaggacacgacgagcagaagcaacaaggtggtgactacagatctcgttaatgtcttgctcttgcgtaatgctatcacggaggatgaacaccattacaaaaatactaattgtgatttaaccatggcttcaatgaatgacaaaggtaaaattctcttttgacaatagaaaaagtaaagatcagttg

SEQ ID NO: 48138 - DNA, 256 bp, Glycine max
  unsure (1)..(256): unsure at all n locations; Clone ID: 701135105H1
gagatctcatatatcatgggctacctccatggtgaagcttatgcttttctctgctctcatactcttgtccttgcaagcagttgtgtctgtaacaccactgcattttcaacatccactagaccctttaaccaaacaagagataagtcttgtccaaaccatagtccaaaacaagtacccaagctcaagtaacaggttgagcttccactacattggactcgnccgaacctgaaaaggatgccatcctcaaatgggaatc

SEQ ID NO: 48139 - DNA, 252 bp, Glycine max
  Clone ID: 701135106H1
aatggcacctgcaacactgtctctgtctctcctcctcctgttctcactcagcatcgccgtaaccgttagatcgagcgactacgactacgattgtgtgtacactgcatacgttagaaccggttcggtgttgaagggcggaacggactctaagatcgggctgaagctgtacgacaagtacggctactacatctacattaaaaacctcgaagcatggggcggcttgatgggcaagggctacgactacttcgagcg

SEQ ID NO: 48140 - DNA, 256 bp, Glycine max
  Clone ID: 701135107H1
ggaaattcaggaagtgtgacgggcaactttgcagcaaatccagggctcgaactcagcaaacacctcaggatatcaaacctgaagtcaacatgggtaccatgcagagatccttgcctatggatccttcatcaatttacgggcagggaggaatgcagtcaaagcctggaattgcaaatgcaggattgaatccgggagttggtagtctcacattgaaaggatggcctctaactggcattgatcaaattcgtcctggttt

SEQ ID NO: 48141 - DNA, 252 bp, Glycine max
  unsure (1)..(252): unsure at all n locations; Clone ID: 701135108H1
tggagctgcctcaactcaagtcttcaactatctgaatctgaactcatccactcactcgtcngcgctgctagaacgaaaactgagtaatggaaagtggagggaactcccttccatcagggtcagatggtgtgaagagaaaggtttcatatttctatgatccagaggttggaaactattattatgggcagggacacccaatgaaacctcataggattcgaatgacacatgctcttttagcccactatggattgc

SEQ ID NO: 48142 - DNA, 251 bp, Glycine max
  Clone ID: 701135110H1
gctctctctgtatttctcttccttctctttcatttcccctctcttgttggttcaaaattatactctctctaagttttaaccttatgaatatggatatgtgccaaaatgtatcagtttccggtgagtgccaacaagtgcaggtttttgccccttcttgctcaagcagccttgatgacctcttctctgctcagaacacggaagtggatgttgagttggagtggctttcagagtttgttgaagactgtttttca

SEQ ID NO: 48143 - DNA, 253 bp, Glycine max
  Clone ID: 701135111H1
atggcctcaaccaacgctctctcttcagcctccattctacgctctcccaaccgccagtctctgacccgaagagcgaaccataatggaagagtaaattaccggaaaccgaataaccgtttctccgtgaaagcctccgccaaagagattgcctttgaccagcattcccgctctgctatgcaggccggcattgacaagctcgccgacgctgttgggctcactcttgggcccagagggaggaatgttgtgttggatg

SEQ ID NO: 48144 - DNA, 252 bp, Glycine max
  Clone ID: 701135112H1
ctgaaattctcagttatgtcgtggcaagcgtatgtggatgatcacctactgtgtgaaatcgaaggtaaccacctcactcacgccgctatcatcggccaagacggaagcgtttgggctcagagcaccaacttccctcagttcaaacctgaggaaataactgccatcaataatgactttaatgagcctggatcacttgctccaactggattgtatatcggtggcaccaaatacatggtcatccagggtgagcct

SEQ ID NO: 48145 - DNA, 232 bp, Glycine max
  unsure (1)..(232): unsure at all n locations; Clone ID: 701135113H1
gtctcgctaatcatttacatatcctcttcatttctnaatncccacgctttgaatnntntcctcagaccaccatatttaacaagaaaaatngtatcttacaggactattaggtaatcatggacggtcataaatctaatgaatgtngatggtgatanattattgagttnttattttagaagaaagtattaataaaaccccactgaaattatatatagtaacctgaaattanatt

SEQ ID NO: 48146 - DNA, 250 bp, Glycine max
  Clone ID: 701135114H1
agggccctgctaactggcaaagctcccagcactcttggatctatgagtaatacaaatgcctcaagttgatcttgaaattggccttaggttgatccagattatctacatgttttctgtttttgtccattgttggacttttgctaagagtttggtaccgtggtttgcatgtagagtctatttatgtcatttctgttgaaacatgctcacagtttgataaattaaatcccaaactagttttgcttttaaaaaa

SEQ ID NO: 48147 - DNA, 253 bp, Glycine max
  Clone ID: 701135115H1
cagaggtgcaatcaccagagtggaagcgccaaacggtcctccccggctttccattttttctcttctgataaaattttagttcatcccagttgcgcataatcactcagattgagattgaatttaaagttaaattcggaaaaacgaacttgtgccactgtacatttacagatctgcggcttcgggctagcctgtgtagatctagtgtccgtaaagcggttaccatttcaccactcaccactacgaggccggaaag

SEQ ID NO: 48148 - DNA, 265 bp, Glycine max
  unsure (1)..(265): unsure at all n locations; Clone ID: 701135117H1
ttgaaagtagcaaagatgtttcctttcgggcaaaagggtcaaaaganaaaggggactatggtggtnatggcagangaatgtgttttatatcaacagcatcaccagtgttgnagggatcgttgaccaaggcttangcntcataggcagtgcagttcgatgcacttacttttgcagccaccnaaatctccatccagtngattatttcnaccaaggctgntggttnttcaggaaaaattgggaagagggcnaatttnagaggaaagnt

SEQ ID NO: 48149 - DNA, 208 bp, Glycine max
  Clone ID: 701135118H1
catcaacaatgaagatatctgatgagaatcagttctaaaccaatcaaccccacaagttttcaaggagggatagaatgtgtggggaacagaaagatggggcagaacagaagggctttgagcgtgatcaatcaggatctggtggcggaagggagaccttacccttgtgttgttaacaaaagggcattggcagaaaaacacgatgtttgtg

SEQ ID NO: 48150 - DNA, 257 bp, Glycine max
  Clone ID: 701135119H1
agtggcaccttcagctgcacaaagattcccaaagttgagaaacagcacactctctcactcacttgtcattgttatttttgttttacattttgtcacaatctgtgactgttcgagttatccgaggcccctcttttatatggtcgttaataaaaatggcttcgacccttttcacaaagatgcttttgggccaacgattgatccatccttattcgttcctcactcaccagccacagattctctcttctctattcagtaaa

SEQ ID NO: 48151 - DNA, 229 bp, Glycine max
  unsure (1)..(229): unsure at all n locations; Clone ID: 701135120H1
gtgcaaaaaaacagaaattaaacactacaagtatacggtgagaacatgggtgangctaaggaaatatggtctgcaccaataacccctagaacagcttcagtggttggaacacctgttgtggcatctccacctgtgtcatgtccaccctctcagcttcactctccatctctaacaaggtcacccctccttcaccctgaggatggagatgcaccacgtcctaataaaactt

SEQ ID NO: 48152 - DNA, 252 bp, Glycine max
  unsure (1)..(252): unsure at all n locations; Clone ID: 701135121H1
aatatgaagttgtttgtnttctttgttgctgcagtagttttggtagcatggccatnccatggcgcaggctaccaaaggttccctctccgaatgaaaactggctatggtgagcgttcttcggaggtaaaatgcgcaagttttaggcttgctgtggaagcacacaacatccgagccnttaaaaccattcctgaagagtgcgttgaaccaacaaaggactacattaatggcgaacaatttagatcagactctaaa

SEQ ID NO: 48153 - DNA, 256 bp, Glycine max
  unsure (1)..(256): unsure at all n locations; Clone ID: 701135122H1
gcagaagcatcctcattcnaacaantanacangtgagcccacattgctgtactacctagtccaggcattggccacgtcannacccctcntagagntctccaagctcctggtcacacaccaccagtgccacgttaccttcntcaacgtcancaccgaatnttccgcagcccaaaacaacntccttcantccccaactntccctcncaacntccacgtngtcgatctcncanccgttgacctctccaccatggncaag

SEQ ID NO: 48154 - DNA, 252 bp, Glycine max
  unsure (1)..(252): unsure at all n locations; Clone ID: 701135123H1
agaaactgaatcgcttacgcacgcgttaacattaccactttcttacttacagcacagcacnnctgctaacctttcgtcttcaatttccctttggatttcattcattagatggattcgagttcggggcatcaagaattcgattatttgtttaagttgttgatgattggagactctggggttggcaagagtagtcttcttctcagtttcacctccgatgcttttgaagatctctcccccactatcggtgttgat

SEQ ID NO: 48155 - DNA, 253 bp, Glycine max
  Clone ID: 701135124H1
aaaaaccagctttcttcaagcacctagatttcctctctctctaaatggcgttctcttcttttctcggcagagtcctccttcgcctccgttttcatcctctccgcttaccaagaatttaattcttatggagttgatgggggacccgcagcaaaagcactcagaccgaagtttgatgcctttgcacatcaagtacattctaaagttggctttcaacttccagatattgatatgaaatttttagtggctggggcta

SEQ ID NO: 48156 - DNA, 227 bp, Glycine max
  unsure (1)..(227): unsure at all n locations; Clone ID: 701135125H1
accatggcggcactgaagcttctcctctcccaagctncgccgccattccctccccaaatgcgctttctctatgacctctcacagatccctctgtgcttcttcggaatcaaactcaaaccctccccgaagacccttcgaacccatccccatccaacccgtctcctaccccgtcaagcccaaacccgcaccacccgaacctcaaccttcacccgaacctcaatcacaat

SEQ ID NO: 48157 - DNA, 252 bp, Glycine max
  unsure (1)..(252): unsure at all n locations; Clone ID: 701135126H1
atacgtggtgttgttactgctgctcttttctcttttcttttctctttagttctctcttcccctnnnnnnnnnnnnnnnnnnnnnnnnngagcttgtttaagcttttcttccattaacatattatcacaatgtgtggtattcttgctgttcttggttgttctgatgactctcgagccaaaagggtccgcgtgcttgagctctctcgcagattgaagcaccgtggccctgactggagtgggctccatcaacatg

SEQ ID NO: 48158 - DNA, 230 bp, Glycine max
  unsure (1)..(230): unsure at all n locations; Clone ID: 701135127H1
ggtagccctgagtactgctgcagcggcgcgtatggctcacncgccacttgcaggccgtccanttactcggagatgttcaaggctgcttgccctaggtcttatagctacgcatacgatgatgctacgagtacgtttacgtgttccggcgccgattataccgttaccttctgtccatcctctccaagtcagaaatcttcacgagataccactaccaaccccatgacctcaac

SEQ ID NO: 48159 - DNA, 253 bp, Glycine max
  Clone ID: 701135128H1
gttcgagcacccaaggcacgggtcactgggatttctccccaggaagcgtgctgctcgtcacaggggaaaagtgaaggcattccccaaggatgacccatccaaggcacccaagctcactgcattcttgggttacaaggctggtatgactcacattgttagagaggtcgagaagccaggatcaaagcttcacaagaaggaaacatgtgagcctgttacaattattgagacccctccaatggttattgttggtgtt

SEQ ID NO: 48160 - DNA, 251 bp, Glycine max
  Clone ID: 701135129H1
gtggcattctgagcatcaggcatggggtcgtaggttaaagataaccggagaaaaaggggcccttaatacgcaccgttttgttcagattgttctcagcacaatcgagtgagtagtagaaaggaatcaaggattggggaattctagtttcagattcttatatgccaacaatgcgctccagaaaactcttcaattccttttaccgaaccatttcctcttcaagttttcctcctcctccggttgtttcttcccga

SEQ ID NO: 48161 - DNA, 251 bp, Glycine max
  Clone ID: 701135130H1
aaaaaatgatgcttaatgctggtaacatttacccccacaacaccccaaaaaccaaggaagcatattactacagaatgatctttgagaggttcttccctcagaactcagctaggctcactgttcctggaggagcaagtgttgcatgtagcacagccaaagctgttgagtgggatgctgcttggtctaacaaccttgatccctctggtagagcagcacttggagtgcacatttcagcctatgaaaaccagaac

SEQ ID NO: 48162 - DNA, 253 bp, Glycine max
  Clone ID: 701135131H1
gatcatcacttcacttcactaatacatcatggcagacgagacccagaacaagtatgagagctctgaggttgaggtccaggatcgtggtgtttttgactttctcggtaagaaaaaggatgaagaagacaagcctcatcctcaggaggaggtcatcgccaccgagtttcaaaaagtcactgtctcagaccaaggagagaacaagcacagcctcttagaaaagcttcaccgatctgacagcagctctagctcttca

SEQ ID NO: 48163 - DNA, 253 bp, Glycine max
  unsure (1)..(253): unsure at all n locations; Clone ID: 701135132H1
gcaaagaccgttgttgtgagctttgcttgtcagcttatcatcttcctttatctacttgacaatgacacctcttggatgattcttgcaagctcctggaattggttgtnttattgagttttggaaaattggtaaagccatgcgcatagagattgataggacaggaaggatacctatgttgaagctccgcgatcgagaatcatacgtacggaataagacaaaggaatatgatgatattgctatgaagtatttgttc

SEQ ID NO: 48164 - DNA, 264 bp, Glycine max
  unsure (1)..(264): unsure at all n locations; Clone ID: 701135133H1
cttgcgagtnaacacaagttacaacaatgggctttctttggtagaatnnggaatttgttacgacagacagcgagcaggcaggttagttcaaaattgcgttcgcccccttcattttttcaggctatacgctgtatgtcatctgccccaagcacaaaactgtttattggaggtgtttcatattctactgacgagcaaagcttgagggaagctttttcaaaatatggtgaagttgttgatgctcggataattatggatcgtgaaact

SEQ ID NO: 48165 - DNA, 93 bp, Glycine max
  unsure (1)..(93): unsure at all n locations; Clone ID: 701135134H1
ggtgaaactcacagttgcacatattttatncgctgaatgccaattnncnggatagcataaatntangggnngncgtcnnccgtaaatatccaa

SEQ ID NO: 48166 - DNA, 255 bp, Glycine max
  Clone ID: 701135135H1
caaagtaagcacaatgagggagatattgcacgtgcaaggtgggcaatgcgggaaccaaatcggttccaagttctgggaagtgatatgcgacgagcatggcatcgaccccaccggaaagtacaccggcgacgaggcctccgatctccaactggagaggatcaacgtctactacaatgaagcctccggcggaaggtacgttccccgggccgtcctcatggatctcgagcccggcaccatggacagcatcagatccgg

SEQ ID NO: 48167 - DNA, 254 bp, Glycine max
  Clone ID: 701135136H1
ctctttctctctcttcccttggtttccttactaattactttaacccaataatccaataactacatacaaagttgaacaataccaccatcatagcgcatcatcatcagaattccaaggggaattgttgatgtggtggtgagaatgatgtatggggagtagaactacctggagggttgttggtgttgaagatgacaagggagctgaaagaggaatgccgagcttcaattctgagttacccaattccaattcatgct

SEQ ID NO: 48168 - DNA, 252 bp, Glycine max
  Clone ID: 701135137H1
ctcaagtccaacctacccctttttcttctcccaccaacttcaccgtcttcttcctcgatcatgtctcacttcaagggcaagtaccatgatgagcttattgccaatgctgcttacattggcactcctggaaagggtattcttgctgctgatgagtcaacagggacaattggcaagcgtttggccagcatcagtgtagagaatgttgaatccaacaggcgtgctcttagggagctgcttttcaccgctcccggt

SEQ ID NO: 48169 - DNA, 250 bp, Glycine max
  Clone ID: 701135138H1
agatcctctacacctctctttgccacactgatgtttacttctgggaagccaagggccaaactccattgtttcctcgtatatttggtcatgaagctggagggattgtggagagcgtaggtgagggtgtgactcatctcaaaccaggggaccatgccctcccagtgtttaccggggagtgtggagaatgccctcattgcaagtcagaggagagcaacatgtgtgatcttctcaggatcaacactgatagggg

SEQ ID NO: 48170 - DNA, 250 bp, Glycine max
  unsure (1)..(250): unsure at all n locations; Clone ID: 701135139H1
caggctaaagatcatattgaattatccatcgttgcataaggagatatttactatggatgctgagaactttttcgtaccatcatttctcngagcaattaaaganaacacagaagcgaattttagaagtataatggctgaaccttgtaaaggagtttatacatttganatgcttcaaccgcaattnngnaaaaaactgatgtctgaggtggatcattttganagatgggtccatggtaccaaactcaanntc

SEQ ID NO: 48171 - DNA, 251 bp, Glycine max
  Clone ID: 701135141H1
gcatttttcagaaggtgttcgacctttaacgccgtggcaaactgtatataaactgcaccttttttcgtccattttcttaccataaatattcaattcaatgcttcatcctcatctattgcctattgcattcgtacctccctttgttttcgctattgctgtgtctctcgaggattgtctcaattgagttggtgctgaatccgaggtttattttagctggtgtggaatcatttcaacattatctggaagaagac

SEQ ID NO: 48172 - DNA, 252 bp, Glycine max
  Clone ID: 701135143H1
aaaaatatgataagaagaagaagtttcagtgtcctcaaaactcaccacttctttaaacctctctcatttgttttttcaccctttctttagttttccctcaacactctctctatgatgatctcttgtttgttaaagagtactcagaaaaataaattcgatctccaaccttgtagcttgtggcaaaggtgcatgctgagcaagatggagaagcaggtgtgagttagtccttcatgtgccccccttccccatcat

SEQ ID NO: 48173 - DNA, 249 bp, Glycine max
  Clone ID: 701135144H1
gatgcagttcagaagcttgtgaagttcttccaaggctgtccagagcagcattttgtacacatattggagcctttcttgaaaatcatcacaaaatctgcaaggatcaataccacattggctgttaatggattaacaccgctgctcattgcaaggctagatcatcaggatgctatagctcgtcttaatttactcaggctaataaaggccgtttatgagcatcaccctcagcccaagaaattgattgtggag

SEQ ID NO: 48174 - DNA, 248 bp, Glycine max
  Clone ID: 701135145H1
atttttagcatacttctggtggtgttatgatagactaaaggaaaaaactgatgacaatattccaatgcctacctattttcgtttccttgctttacttgcctttaagatatttgcagcagagcaggtagatgttgctataatggaggtaggattaggtggaaaatacgatgcaacaaatgtggttcaggcacctattgtatgtggaataacttctcttgggtatgaccacatggagattcttgggaata

SEQ ID NO: 48175 - DNA, 241 bp, Glycine max
  unsure (1)..(241): unsure at all n locations; Clone ID: 701135146H1
aaaaaggggagtttcttattctttctagacgcttccattgatcggcgatttcanagacatggcggagcatcacgaacacgaggaagtgaagggtgagtccttgttggagaagatttctgggaagatccacgaccacgattcgtcatcttcgtcggattccgacaacgagaaaaccagcgcttctgactccttgaagtcaaaggttttcaggcttttcggcagagaaaagcccattcaccat

SEQ ID NO: 48176 - DNA, 253 bp, Glycine max
  unsure (1)..(253): unsure at all n locations; Clone ID: 701135147H1
gncctctttcattgccagccatgaccgaggtcctccactcctccccacctcgttttgttgcttcatcaccaccnnnnnnnnnnnnnnnnnnnnnnnnnnnnnnnnnnnnnnnnnnnnnnnnnnnaacaccaacaacctcttcattctcttctcccaatgcctttctcctccgacctctcttggcgcttcttctgacccttctcaggaaatccttccagcttcctcgcaaaaacatcggctccattatggacat

SEQ ID NO: 48177 - DNA, 260 bp, Glycine max
  unsure (1)..(260): unsure at all n locations; Clone ID: 701135149H1
gcctcctcttatggtagtggcagcagctttcaaagcagtggtaaatatggaggctttggatctagagatggtgacaggtttaatgatagctatagagacaaaggatcctatgaagaagaaaaagattaccaaggaaaatcacaccatgccaccgctagtgacaatcaagagaactccttcaagaagggttctnctcgctctgccagtaaaagtcaggagaacaagtcatctggattatcaagtcatcgactaatgcaaat

SEQ ID NO: 48178 - DNA, 258 bp, Glycine max
  Clone ID: 701135150H1
ctacacactccagcttcagtgaaaaactcatcacccctcaaaagaagtttcaaattgggacacccacaacaactgcaagagacacacacacaacaatttcttggtcttttccttctcctttatgcaaagctcttcacaaatcagttcctttggctgcttcactttcaattcttctctggtcaacccctgcacatgctgggttcatgtcaggaatttctggaatagaggctattcctggtcctcagctacctcagattg

SEQ ID NO: 48179 - DNA, 246 bp, Glycine max
  unsure (1)..(246): unsure at all n locations; Clone ID: 701135151H1
ttcacttcatcgtttttgggattctctctctcaataatggcagcacgctttcaatntgcagctgtactatgctggtgttccctatagggaaagatgaaattgaagtctaagaaaggatggaaatctattgtaccacttcatttgaaaggaaaatccgcaagccgtttttctttatttcgcaaagtcaattctgctggctatggacctggcaaaacaccagtttatctgaatgtgtatgacttgaca

SEQ ID NO: 48180 - DNA, 251 bp, Glycine max
  Clone ID: 701135152H1
tggaatagcgttcgccctcttccagtgggtcctcgtctctaaggtcaagctctccgctgccagagacgcttcctccaacgccggcggggcaaaaatggctacaacgattacctcatcgaagaagaggaaggcctcaacgaccacaacgtcgtcctcaaatgcgccgaaatccaaaacgccatttccgaaggagcaacctctttccttttcactgagtataagtacgtgggaatcttcatggtggcttttgc

SEQ ID NO: 48181 - DNA, 252 bp, Glycine max
  unsure (1)..(252): unsure at all n locations; Clone ID: 701135153H1
gaataccgcttttcacatcagaacccaccattcggtccaagacaacatagtctncccaacccatcaaccacagggtccaggcttccaaatcaacggacacantattagttgggccaactggaagttccatattggatttgatccacgtgccggaattgtaatatcactggcatccatttatgatttggagaagcacaaatctcgtagagtgttatacaaaggttacatttctgagctgtttgtgccatacca

SEQ ID NO: 48182 - DNA, 243 bp, Glycine max
  Clone ID: 701135154H1
ctttgatgcccaatgcaacgacgacgcccaaatccctaaaatgtggaaaccctaaacctaaacatttcatctcctaaaagcttcaatttaataaatccggcgatgaagctcctcgaatcgaagaaaagagccgaggcatggccagagtcatcggaaaacccttcagacaccggtccaccgcacaagaaaactagggatttgcttaacatgaccgaatgccacgtgtgtggcttcaaggttgac

SEQ ID NO: 48183 - DNA, 251 bp, Glycine max
  unsure (1)..(251): unsure at all n locations; Clone ID: 701135155H1
ctctgctctttgtcttctctgacacatttggggccttgttgagtgtgtttttgcaanncnggtatggcgaaggacgttgaggttgctgagcgtggctccttctctgggaaggactaccaggaccctccaccagcaccactcattgatgctgaggagctcacaaagtggtccttttacagggctcttattgctgagttcattgccactttgctcttcctctacattactgtgctcacagttatagggtacaa

SEQ ID NO: 48184 - DNA, 251 bp, Glycine max
  unsure (1)..(251): unsure at all n locations; Clone ID: 701135156H1
cttttccattcttcttttnctctctgtactcaaactcacttccccacttatttatacaatgtcggcttacaaagaccaggatacccgtcttcatggcatcaaaactaagattcgtgtcgtccccaatttccccaaatccggtattatgttccaagacattactactctattgcttgatcccaaagcatttaaggacacaatagatttgttcgttgagcggtacaagggcaaaaacatttctgttgttgcag

SEQ ID NO: 48185 - DNA, 251 bp, Glycine max
  Clone ID: 701135157H1
ctctaaaccactgccaagtatggtagtttcttcgtgctctttgagctggatttcaccttgcttatcccataagctaaacttgccacatacaaattgtttgcctcgcaacattgcaacttcatcttccaacactgtcttttgtgaattggacacaacccccagcggagaaagtcattgccggagaagaccgctactgttaggcattggagcattaactgcaaatttacaaccaacaaatttggtctttgctc

SEQ ID NO: 48186 - DNA, 252 bp, Glycine max
  Clone ID: 701135158H1
atactctcccctcacacttttcgtgttctccgccaccctctttcctttctccattttttcttcagcgcctttgctacttcgcaacacaccacaatggccaccaatgcactcgctggcacatctctctccatgcgatctctccttcctcaaacacaggcatttacctcaatttctggcctgagatctgcttcaatttccagctttgggagaaagaatgtttcttttagcttgcagccacgctcgattcgcctt

SEQ ID NO: 48187 - DNA, 251 bp, Glycine max
  unsure (1)..(251): unsure at all n locations; Clone ID: 701135160H1
caaaaccgtgcatgctattagtattagaaacaacaaaaggcaantgcctgaaacttctcaagagtctgtttccatttccaaggcctcacctgaccagcatgtggagagtgatccagcccctccagccaaggcaaagatagtggggtggccaccaatcagatcttacaggaaacaaagcctgcaggagggtgatcagggggatgggatctatgtgaaagtgatcatggatggagcaccttacctcagaaaga

SEQ ID NO: 48188 - DNA, 250 bp, Glycine max
  Clone ID: 701135161H1
ggcgtcgaattctctgatgcagagcctgaagcggttcataaagaagccatgggagatcacgggcccgtgcgcggaccctgagtacaaatccgcattgcccttggccgtggagtaccgcctcagctgccccgccaccgtcaaggagaagcccatcatccccaactccctcccggagaccgtctacgacatcaagtacttcacccgcgaccagcgccgcaaccgccctcccatacgacgcaccgtcttgaag

SEQ ID NO: 48189 - DNA, 240 bp, Glycine max
  Clone ID: 701135162H1
caaaatcctaccattctgatcgcattttctttgccaacaatacatatcttccaagcgagacaccggctccacttgtcaagtacagagaagaagaattgaagaatgtaagaggggatggaactggtgagcgcaaggaatgggataggatctatgattatgatgtctacaatgacttgggcgatccagataagggtgaaaagtatgcacgccccgttcttggaggttctgccttaccttacc

SEQ ID NO: 48190 - DNA, 250 bp, Glycine max
  unsure (1)..(250): unsure at all n locations; Clone ID: 701135163H1
tgttttctttgttgctgcagtagttttggtagnatggccatgccatggcgcaggctaccaaaggttccctctccgaatgaaaactggctatggtgagcgttcttcggaggtaaaatgcgcaagttttaggcttgctgtggaagcacacaacatccgagcctttaaaaccattcctgaagagtgcgttgaaccaacaaaggactacattaatggcgaacaatttagatcagactctaaaacagttaaccaa

SEQ ID NO: 48191 - DNA, 258 bp, Glycine max
  Clone ID: 701135165H1
acagcgggggcgacattccttgtgtgggctcactgtggtggggcggcaacgtcggtgacagaatgggagctagcgatggcaccgtgggaggaagaaatgatttgtgggtaagtgagtgagaggcaattagggttggggtctttatgtttgggaaaatttttaaattccgacggatgcatattccattcaaataatctgccagaaaggtatcaaattttcgacgaatagatctccgtgggtaaccatctgtgggtaagt

SEQ ID NO: 48192 - DNA, 215 bp, Glycine max
  unsure (1)..(215): unsure at all n locations; Clone ID: 701135167H1
agagactcttccttccttcaatttcttcaaccaccaccagcatgcaagactccggctccatgaagatctcccctctggatctcatgtccgccatcatcaagggcaagctcgaccnnnnnnnnnnnnnnnnnnnnnnnnnnnnnnnnnnagctgccgtcctcctcgagaaccgccagttcctcatgctcctcaccacctccgtcgccgtcctcgtc

SEQ ID NO: 48193 - DNA, 252 bp, Glycine max
  unsure (1)..(252): unsure at all n locations; Clone ID: 701135168H1
ctccttcttctttctttcgctccgttcctcatncttacaattctgagttcatcagctattatttatccaggtctttgcctangggtactaaatcggctgttgacttaatggagtctttatctgaggttcatttttctggatttcacattgatggcttagagcaaagaaaggctggcacagagcaaccaaccacttcancaactgacntgtataaacaaccttttgtgataggtgttgctggtggagcagcat

SEQ ID NO: 48194 - DNA, 250 bp, Glycine max
  Clone ID: 701135169H1
attggagcaggaatcagtggccttggtgcctgcaaataccttctagagtttggatttaacccaattgtctttgaagttgatgatggtgttggaggactatggagacataccatggactccaccaagctccaaaacaataaacaaatgttccagtttatggattttccatggccttcttctgtgaaagaagataatccaagtcacaagcaagtgctagattatgttaactcctatgctgaacatttttccc

SEQ ID NO: 48195 - DNA, 249 bp, Glycine max
  unsure (1)..(249): unsure at all n locations; Clone ID: 701135170H1
ctcgtttcaaaaaaagggccgttattgttnttaccatccaaaaaatggccggtcttgttgtttcttcccaatgctttctcaaactcttgcttgtagtttcagtctttcatgtttcctttgctgctaggaggttgaatgagctggttcaggaccagtctcagttgctacattaccacaatggtcctcttctatacggcaaaatcgccgtcaacctcatctggtatggtaacttcaaaccatcccaaaagg

SEQ ID NO: 48196 - DNA, 249 bp, Glycine max
  Clone ID: 701135171H1
caacaacccagttgagtaactaagatggcgcaagtgaggaacaagcaagtgcttctaaaggactatgttaccggttttcccaaagaatccgacatgaatattgtcgaaagtaccataacattgaagcttccacaaggttccaatgatgtcttgctcaaaaatttgtacttgtcttgtgatccgtatatgaggaatctcatgaacaagcccgaaggccctcccaatagtcgtgcttacactcctggctct

SEQ ID NO: 48197 - DNA, 249 bp, Glycine max
  Clone ID: 701135173H1
caactttaaccctgcttgtcgaatctgtgcattgcttgaacgattgaaccctaatggctgctctcttgaggaggtttgcgagcgccactccgatcccatccaattcctctcacaccaatctccgccttcccttcaccgccatcgccgccatttccggcggagtctccttccttttctaccattcctctcccaacttcgctcattcacaagaagcagaacaagtggaaagtaaaaacatcgcactcgttc

SEQ ID NO: 48198 - DNA, 248 bp, Glycine max
  Clone ID: 701135174H1
atcacattttggaagtgaaaaagatagtgcaagactcggactacaaaaatacatagaccttcaaaatactgttttaaagaaaggggcaaaaaacactcaacatttaatttgctcttggggttgcccattcaactctaaggatgagattgtcatagccataaccattgagcttgccgatggctctttgtgcatcttccctgttgacaaagttaacaaagccaaaccctctgctcatgccagtcttctga

SEQ ID NO: 48199 - DNA, 242 bp, Glycine max
  unsure (1)..(242): unsure at all n locations; Clone ID: 701135175H1
ggaaaataaagaaattagcgtcaaaatgttgggtgtgttcagcagctccatagtgttcgccgccggacgagctcgtggccgccggcgnccgtactccgtcgccgaagatgacggcggcggcgctgcggaagcggttcgaggagaagaacccctccgccgtgtcggtggaggtcggagagcatgtccagctcgcttatacccaccacaacgagtcgccgtttcagcccagatcctttgctgtt

SEQ ID NO: 48200 - DNA, 249 bp, Glycine max
  unsure (1)..(249): unsure at all n locations; Clone ID: 701135176H1
aatggataatacaatgtacaaggtctaccttgaacccaactcacaatattgaagggaagaaagatatatgatatttgacaataacatctatcaaacatacgagcntttcagaataaggttaattctagaaaagttctttaacttgagattgttttgtgcaccttaattgtacaaaggccacattgtcatgtagccttagaaatcataatatgtagaaganttcacaagagggcaatgtatgacactaac

SEQ ID NO: 48201 - DNA, 239 bp, Glycine max
  Clone ID: 701135177H1
ctttggcagtggggtgcctgccagcagtgcaaacagtcagcctgcaaatggtgctcgcactcaaaatgctagtgctccttcaccaccagtcgataagcaaagtccagcaccagcaccagcaccagcaccagcacctgcatcatcaccaattgataagcaaattccagctggaattcctggaagtctcaaaaacaattaccatcgtgctgatgggcaaaactgtggcaactttcttactg

SEQ ID NO: 48202 - DNA, 239 bp, Glycine max
  Clone ID: 701135178H1
cagaaatccgatggggtggtgcaaagcatgaggctggagaaaaagatgatagtacggaggatgcatccaagatcatcattcaaggctttccttgaagttgtgaaggcaaggagtttaccttggaaggaatatgaaatggatgctattcattccttgcagataatactgagaaatgcattcaaagaagataccgagagtttggatttaaacgcaaaagcaattaatacaagactaagtga

SEQ ID NO: 48203 - DNA, 249 bp, Glycine max
  unsure (1)..(249): unsure at all n locations; Clone ID: 701135179H1
agagctctttacctangaaagttgcaaggcagttctggcagcttaagttttcctcttggcaccagaaaatcagaaggaagagtttcctaggcttcctcctgtaaagataaagtcagaagataagccttttacttttaattggggggagaagtttgagtgtgatggacttgctgtganactcgctggtgctgacaacaccttacttattgggtcatatctggatgtccctattggacaagaaattaaaaa

SEQ ID NO: 48204 - DNA, 223 bp, Glycine max
  Clone ID: 701135180H1
gagtttctgttacctctacagcactgaatgtttgttgttgccttttaattcagattttttttctctcttttgggggtttccaatttccatcaccgaatggaattggatcttctttcatctcagatcaattcattcttgctgggttttgattgttttgagtggttttctgattccatttgggaaagttttgacttttcatggttcaatccctcctcagttgttg

SEQ ID NO: 48205 - DNA, 258 bp, Glycine max
  unsure (1)..(258): unsure at all n locations; Clone ID: 701135181H1
ggctacctccatggtgaagcttatgcttttctctgctctcatactcttgtccttgcaagcagttgtgtctgtaacaccactgcattttcaacatccactagaccctttaaccaaacaagagataagtcttgtccaaaccatagtccaaaacaagtacccaagctcaagtaacaggttgagcttccactacagtggactcgncgaacctgaaaaggatgccatcctcaaatgggaatccatcaaaccaactgttataac

SEQ ID NO: 48206 - DNA, 252 bp, Glycine max
  Clone ID: 701135182H1
agagctactttaccataattcagaactttgtcctttgaatatcttgccaccttgtcgtagcagactcttcaaaatagtgaagaataaaaggttctacagagggtcatctctctcccctattcgttgagtttctgcccgcgtgtatagtgtgaatttattcatatgcttggttagcaatggggcggggtttgttattttttttgtcatgtaatttgcggatctaacagccaaagcatcattgtgattgatgca

SEQ ID NO: 48207 - DNA, 253 bp, Glycine max
  Clone ID: 701135183H1
cttctattcactctgttacggtgcaacctagcagcctccaaatccaatggcttcagagaagaaactttcgaacccaatgagggagataaaagtgcagaagctcgtcctcaatatctctgttggcgagagtggagatcgtctcaccagagccgccaaggtgttggaacaacttagtggccaaaccccagtgttttccaaagcaaggtacactgttcgttcctttgggattagaagaaatgagaagattgcatgc

SEQ ID NO: 48208 - DNA, 249 bp, Glycine max
  unsure (1)..(249): unsure at all n locations; Clone ID: 701135184H1
gttgcttggtgatgtccctttctgttctcttcactcttggtcttgcgagagaaagccatgccagagacgaagatttttggcatgctgtttggccaaacactcccattccaagttcattgcgagatcttctaaagcctggccctgcaagtgttgaaatcgatgatcaccctatgnaaattgaagaaacacagtacccgaaaaccttcttctatnaagaagaccttcatccaggcaaaacaatgnggtaca

SEQ ID NO: 48209 - DNA, 250 bp, Glycine max
  unsure (1)..(250): unsure at all n locations; Clone ID: 701135185H1
ggaatatccactagcttcgtggaggtgacggatcttgacatggttgatgctnccatagtagaagggaaaacaaaagtggctttacttcgaatctgtttccaaccccacccttacggttgcgaacatacctgaactgtgccacatggcacaccggaagggagtgacggtggtggtggacaacacgttcgcgcccatggtgctttcgccagcgcgtcttggtgctgatgttgtcgttcacagtatctccaag

SEQ ID NO: 48210 - DNA, 251 bp, Glycine max
  unsure (1)..(251): unsure at all n locations; Clone ID: 701135186H1
gcaagttgagcagaggaaaaacaagcgaaaagagaaagannagaagaanaaatggtgggagnagangtagtacnaatggacgacanagcgnanangntgcgagatctgctanngagtttctactcccctganccttccatctccaacaacacctccataacacgcttctctcgacgacatcaattcnncttccntcgnncccgatcagtacntgnncatcctggnnnacnngtccaatttggaaggcntgc

SEQ ID NO: 48211 - DNA, 249 bp, Glycine max
  unsure (1)..(249): unsure at all n locations; Clone ID: 701135187H1
aaaaataaactaagggcattggaacttgaacgcagtgnaggggttacaaacaagannaagagtcagaagaatatggacaagaaaacagaggaagaccttagtaaagaactcgatctgcagataaccggagctgaaatggcctctgtatggaaacttcttggcgtccgctttgttctattaccatataccttaggcaagctgctgttgtggactgcctgttggttttggagatacaaagtgaaaaagtac

SEQ ID NO: 48212 - DNA, 250 bp, Glycine max
  Clone ID: 701135188H1
gcttgcagttgcagcacaagacagcagtgttgatttagcgggttcggtgaaaatcggaatcgaaaacaatggagaaagagaaaggaattgaaaactggagcgaagggtgggaagacctggtagacgccggcgacgttgaatccgcgatctcactccttgaatccgtcgtcgaaaccctaaacccttccgattcggcttcgcagcttcccttggcctctgctctctccgacttggccaacctttactcctc

SEQ ID NO: 48213 - DNA, 238 bp, Glycine max
  unsure (1)..(238): unsure at all n locations; Clone ID: 701135189H1
cataaatccagctccaattcctaatcacctggttaatttcttcacatagagctatcnngatccaacgttaacatgaagaatgttttagtaaggtcagctgcgcgagctctgcttggcggcggtgggcggagtactaccgccagctctcaacggcggcgatcgtggaacagagacaccagcacggtggcggcgcgtttggaagcttccacttgcggaggatgtccactcttccagaggt

SEQ ID NO: 48214 - DNA, 249 bp, Glycine max
  unsure (1)..(249): unsure at all n locations; Clone ID: 701135190H1
ggcgactcttgattccgacgtgcctatggttcccgccggcgagccctcgagcagcgccggtccttcttccaagaagcccaagcgcttcgagatcaagaagtgnaacgccgnccgctctctgggcttgggacatcgttgtcgataactgtgctatctgccggaaccacatcatggatctctgcatcgagtgccaagccaaccaggctagcgccactagcgaggagtgcactgtggcttggggagtttgta

SEQ ID NO: 48215 - DNA, 249 bp, Glycine max
  Clone ID: 701135191H1
gcaacttgtgagaaatggcttccaaggctgcacttctcttgtgtctcaatgttctctttttcactgtggttagttccacatatgtgccatgtaatccaccccccaaaactcccaaacacccacctgtcccaaagccaccatccccaaagcaagcaagctgccccaaagacactattaagttcggtgtgtgtgctgatgtgttaggtttgattaatgtgcaacttgggaagccaccaaagaccccatgct

SEQ ID NO: 48216 - DNA, 248 bp, Glycine max
  Clone ID: 701135192H1
accagatcgtgttctcttcttccattggcaaacatggcaactcaaatgagcaagaagagaaagtttgtggcggatggagtgttcttcgccgaactgaacgaggttctgacacgtgagttggcggaggacggttactccggcgtggaggttagggttacgccgatgcgcaccgagattatcatcagagccaccagaacccaagccgttctcggtgagaagggaaggagaattagggaacttacctcagt

SEQ ID NO: 48217 - DNA, 248 bp, Glycine max
  Clone ID: 701135193H1
aatttcttcacatttacaatgaagcaatccactctattcctgttcctattcctattccccctcgttcatgctctttcttacgaagctgcttatattagagatggcctcaaatcctattcccagcttgatctccctcactccgtttttggttctgaaagtgtagccttcgattgccatgggaaaggaccatatgttggagtgtctgatggtagaattctcaagtggcaagagacaaagagagagtggat

SEQ ID NO: 48218 - DNA, 248 bp, Glycine max
  Clone ID: 701135194H1
ctcattctccttctgttcaaacactctctctcatggcatcagataagaagattaggatcggcatcaacgggtttggaaggattggccgtttggtggccagggttgcccttcaaaggaatgatgttgaacttgttgctgtcaacgatcctttcatcaccactgattacatgacatacatgttcaagtacgacaccgttcatggccagtggaagcattttgatgtgaaggtgaaggactctaagaccctt

SEQ ID NO: 48219 - DNA, 251 bp, Glycine max
  unsure (1)..(251): unsure at all n locations; Clone ID: 701135195H1
cgaattcctattcccacacacatctcaaatncgnattaagggtttaacaaagcttttagcggacaatgccccgaagnnccatgaaggagaacaaattcgagagctactttggtcgcaagatcgctattgacgctagcatgagcatttaccagttccttattgtcgtgggaagaagtggaactgaaatgctcactaatgaggctggtgaagttaccagtcatttgcaagggatgttttcgcggacaatcaga

SEQ ID NO: 48220 - DNA, 253 bp, Glycine max
  unsure (1)..(253): unsure at all n locations; Clone ID: 701135202H1
gggactaatgatggtgatgacgatggcattcaccgatggagatttcaacggcagcaccatcagcgtgttggggaggaacatgatcatgagttaacctgttagggaaatggctattgttggcggcactggggcttttcgttttgcacgtggctacgctcaagccagattttactctgttgatttcaccaaagganccgctatcgtggaatacgacgtattcgtgaaccattattgagatttactccttccgttt

SEQ ID NO: 48221 - DNA, 253 bp, Glycine max
  Clone ID: 701135203H1
gtccctccttcctctgccttataattcttgtgacccttttggctggtagcattgaaagtgcaccagcaaacgtgaagccaagccattatgctgcacccttcaataggagtgtttttccttctggttttctatttggaataggctctgcagcttaccagatagaaggagcagcagctatagatggcagaggaccaagtatatgggacacctatactaaacagcaaccagggaagatttgggatcatagtgatgg

SEQ ID NO: 48222 - DNA, 254 bp, Glycine max
  Clone ID: 701135204H1
caactccaacctctgttcatcgtctaccgcgctttcttttcaaccagaactatgattaagctttttaaagtaaaggaaaagcagagagaacttgcagaaaatgcaagtggcggaccacctgttaagaagcaaagtgctggagagttgcgtcttcacaaagatataagtgagctgaatctaccaaaatcatgtaccatgcaattccccaatggcaaagatgatctgatgaactttgaagtttcaattcgacctga

SEQ ID NO: 48223 - DNA, 254 bp, Glycine max
  Clone ID: 701135205H1
ctcaatcttcattgtcctgttctttcccttggtgacaaaccaagactaacacacacagaacatagcttgtgttggtgaggtgagaagataaagaaagaatggcatttgcaggaacaacacagaagtgtatggcctgtgacaaaaccgtttatctggttgataagttgaccgcggataaccgagttttccacaaagcttgcttcagatgccatcactgcaaaggaaccctcaagctgagcaactacaactctttt

SEQ ID NO: 48224 - DNA, 254 bp, Glycine max
  unsure (1)..(254): unsure at all n locations; Clone ID: 701135206H1
ttacactccaaaaccgcacatcttcactcccctgaagaccctcctactgccttgccagactccaaaaaacccgatncagggaatggtggtgatgatgttgatcaagagtgtcaggttcaagcattcaaagagtatggtctgattgagcttagaagggccacaaatgagttcagcacagattacattgtttctgagagtggtgagaaagctcccaatgtggtctacagagggaagcttgagaacaatcggttagt

SEQ ID NO: 48225 - DNA, 254 bp, Glycine max
  Clone ID: 701135207H1
gggaatcatagcgggaatgctctgcgtcatgggaaacgctcagtattacattcacaaatccgcgcatggcagacctaagcacatcgggaacgatatgtgggacgtggccatggaacgaagggacaagaagcttgtcgagcaagcctctccctccaattaacatcgttgttttgccaatgacattgtgaagaaaataaactgctcacctggatttacgactgtgttctagggaagcagggttaatcacaagaatc

SEQ ID NO: 48226 - DNA, 255 bp, Glycine max
  unsure (1)..(255): unsure at all n locations; Clone ID: 701135208H1
caagccttatgtgaagaaaatggccaagagccaagactatttcttcaaggngttctctagagccattaccttgctctcagagaacaaccctctcactggcacaaagggtgaggtcagaaagcagtgcaatgttgccaacaagcaccatgatcaggacccttgaattttcctccccttgtctatgatcgaggaagaaaatctgtaatatattatgcaaaaaataattaaggtcttttcctttaaatgggctggttc

SEQ ID NO: 48227 - DNA, 256 bp, Glycine max
  unsure (1)..(256): unsure at all n locations; Clone ID: 701135209H1
gtgccccctgtgttaaattcgttctctgaccaagatagcaaagttcgttattatgcttgcgaanactttataacatagcaaaggttgtgagaggggattttattattttcttcaaccagatctttgatgccttatgcaagctttctgctgactcagatgccaatgtacaaagtgctgctcacctcttagataggcttgtgaaggatattgtgactganagtgatcagttcaggtactaggtaaagagatctctgaa

SEQ ID NO: 48228 - DNA, 255 bp, Glycine max
  Clone ID: 701135210H1
ggggtgatcattgtttttaccctattcttatgatgggtgactcagagatgacaaaattcggcttaaaagtcgggaagaatgggtttccaaggggactagatcctgcaatatccaagttttttgtgcagctccaaattgttgttaagtcacagctgagtagattagcaaaacaggatggaatgagtttgatgagatccgtccaaagaaaaggggggtctttcagttactctgaagctgaactgaatgagcaactgc

SEQ ID NO: 48229 - DNA, 255 bp, Glycine max
  unsure (1)..(255): unsure at all n locations; Clone ID: 701135211H1
gcaagaatggcgacggagatggaagaactcgtctcctttctttcttccacgtcgcctcagatcacaaaanccgccgttgacatagtccgcggcttaaccggctccatggagggcttgcagtccctggcaaattactcaaacgccctcttacccgctttgtctcgcctcttaacgttacccaaggaggtttcggaggctgctgcggaggcgctggtgaacctgtcgcagaattcgagcctcgcggaaggatggttg

SEQ ID NO: 48230 - DNA, 255 bp, Glycine max
  Clone ID: 701135212H1
gctatccagtggctagacagcaaccagctcgcagaagcagatgaatttgaggacaaaatgaaggaattggaaagcatctgcaatcctatcattgccaagatgtaccaaggtggtgctggtcctgacatgggtggtgctggtgctggggcagccgaggatgattatgctgctccttctggtggaagtggtgctggccccaagattgaggaagtggactaaatgtgtagttgctttcatccatttatctgtttaaaa

SEQ ID NO: 48231 - DNA, 255 bp, Glycine max
  Clone ID: 701135213H1
aaggaccacccttttagtttgaggcctttgttgctagtcacacttgatccaagtgtgattaagtcatggtgtcaattctctacttggctcacaagtgaagaccgtacaccgtttcaaacggagaatggggtgacatattttgattatgctaagcgtgaccccaaattcggtcacttttacaatgatgcaatggctaaggacactcgattcgcttctagtgtggtgattgaaaactacaaggaagtgttcgaggga

SEQ ID NO: 48232 - DNA, 261 bp, Glycine max
  unsure (1)..(261): unsure at all n locations; Clone ID: 701135214H1
gntggggtatgacccacatgggagattcttggggatactctggggagaacttgctggtgagaaggctggcatcttcaagaatcggattccagcttttacagtgcctcaacctgatgaagcaatgcatgtacttgaagagaaggcttctctattaaatgtacctcttcaagtggtaactccattagatgccaaattgctaaatggtttgagactggtcttgaaggtgagcaccaatatttaaatgctggtcttgccatcgca

SEQ ID NO: 48233 - DNA, 260 bp, Glycine max
  Clone ID: 701135215H1
caaacctcgtcaaaggttttagtttgagtttgattcatcgtagtatctaagcatgactctctcccaatcttgccggaaaacaagccttcgaaaacggtgctatctggttgcaaagcagcagaagacgcgcttctacatcttcggacgctgcatagccatgctcctctgctggcacgaccacactgtttccgattagatccttcactcgcgtttcagctatgaaaacattgaaatttcgatttttctccatatgggtaccc

SEQ ID NO: 48234 - DNA, 260 bp, Glycine max
  unsure (1)..(260): unsure at all n locations; Clone ID: 701135216H1
gctcgcttgccaaatggtcgtccatttccccctctatttaacttcaaacaggaattatctggagcatcttccgagcttgttaataagttgatacctgaccatgtgaagcggcaaatggggatncagtttatgcatctgggaggatcgtgacgataaagcttaggggacatagtgtatactagctgataagttaaaaaaaagtggcaccattattttttgtcttaataccatgttctgtgacctggcgaatgtagtttcaa

SEQ ID NO: 48235 - DNA, 255 bp, Glycine max
  Clone ID: 701135217H1
caaattctcagtgaaaccaattcagttcagtccaaatcccaaatccgaagtgagatttgcgatggagaggcttcagcgaatgttcgcaggtgcaggtggagctctagggcaccctcccccagattccccaactctcgattcctccgagcaggtctacatctcctcactcgctctcctcaagatgctgaagcacggaagggctggggttcccatggaagtgatgggtttgatgcttggagaattcgtggacgagta

SEQ ID NO: 48236 - DNA, 253 bp, Glycine max
  unsure (1)..(253): unsure at all n locations; Clone ID: 701135219H1
ggaatttcgatgctcagtcatctcttttaccattctcttctctcttgctcttgcaggagagagccatgtccatgcatcgctacctgaggaagattattgggaagctgtttggccaaacactcccattcccactgcactgcgagagcttctaaagcctcnccctgcaggtgttgaaatcgatgaactccctaagcaaattgatgatacacagtacccaaaaacattcttctataaagaagaccttcatccaggg

SEQ ID NO: 48237 - DNA, 253 bp, Glycine max
  unsure (1)..(253): unsure at all n locations; Clone ID: 701135220H1
ggcatctcctggcatagagagagtgacacatgaagtcctgaaagaatttcttgccactgttgaaaatgcaccaacatccaatgcaaaagtctattacggatatatcgataagatatgcaaggctggaaatctttcagttgccagtaaaatgctagaaattttaaatgataagaacattgttgttacccttgatgtgtataatctcatattagtggaggcnagtcagaagaatgacattgncctttcttgtcaa

SEQ ID NO: 48238 - DNA, 255 bp, Glycine max
  unsure (1)..(255): unsure at all n locations; Clone ID: 701135221H1
gcaantccagcagatggtgcagttcatccgccaggaagctgaggaaaaggccaacgagatctctgtactccgccgaagaggaattcaatatcgagaagctgcagttggtcgaagccgacaagaagaagatcaggcaagaatacgancgcaaagagcgccaagttgaaattcgcaagaagattgagtactcgatgcagctaaatgcttctcggattaaagttcttcaagctcnagatgacgtgatcagttccatga

SEQ ID NO: 48239 - DNA, 253 bp, Glycine max
  Clone ID: 701135222H1
ggtgtttccatctcacagtgactagtctgtgctttgtagtggttgtggttggagtgcttccactctccttagatgcacaactagatccctcgttttacagagacacgtgtcccaaggttcactccattgttcgcgaagtggtgaggaacgtttccaagaaagatccccgcatgcttgccagtctcattagacttcactttcatgactgttttgttcaaggatgtgacgcatcagttttgttgaacaacactgc

SEQ ID NO: 48240 - DNA, 244 bp, Glycine max
  Clone ID: 701135223H1
aaacaaaccctttctttctggcttcagtttttgcagtgaaaatggcggtgactttaacatcaaccctctttatggctttgctatttgctgcttcagcttttgctgctcttcagcctagagtacctgaagcttaccttcaaaatggaaactttgaggagcagccaaaccccaaaaacctccagaaaacaaagctcatggggaaatattctttgcccaaatgggaagtcaatggtctggttgagta

SEQ ID NO: 48241 - DNA, 257 bp, Glycine max
  unsure (1)..(257): unsure at all n locations; Clone ID: 701135224H1
aaagatgtttcctttcnggcaaaagggnccaaaagataaaggggactatggtggttatgcagaagaatgtgttggntatcaacnccnnnccccagtgttggagggatcgttgaccaaggcttaggcttcataggcagtgcagtcgatgcacttacttttgcagccaccaaaatctccatccagttgattagtgctaccaaggctgatggngggaaaggaaaaattggaaagagtacaaatttaagaggaaagataac

SEQ ID NO: 48242 - DNA, 257 bp, Glycine max
  Clone ID: 701135225H1
caacatcatgcatagcattgttctgtttggtgagtggggaattccctgctgcagagaaatcagtctccacaataagtagcctcattagcagcatcattagccccatcttcagcaaacttggggtcacctttctgcagagcctcagtggcttgtggaacatcagcaattaaaaccgctttgtatttatcagcacaagaactcaaggctcttctttgcttaggccccgatgctcccaccctctgcaactcttggattct

SEQ ID NO: 48243 - DNA, 254 bp, Glycine max
  Clone ID: 701135226H1
gctttcgatccctgtaactgcgttcgactatttagggttttttcggagacaatggcggatgaatcggagcacacggcggcgcggctgccggcgaatcgctgctcgacaagatcgccgagaagattcacggccacgacgactcttcctcttcctccgattccgattcggataaaaaggaatcttcgtcgattaaggagaaggttttccgcctctttggaagggagaagccagttcactccgtcctcggcggcgga

SEQ ID NO: 48244 - DNA, 256 bp, Glycine max
  unsure (1)..(256): unsure at all n locations; Clone ID: 701135227H1
gcaatttttgttctactcctttcttcgttaacccatttcagcatcaccgcaaatgcaacaagaacaccccaaganaacagcctccatttccaagtagcaaactccacatgcgagggaacactctactccgacctctgtgtctcaacccttgcctcattcccagatctcacctcaaaaaccctcccacaaatgatacgctctgtcgtgaaccacacaatatacgagtccacattgtcggcctccaactgcagcggcc

SEQ ID NO: 48245 - DNA, 146 bp, Glycine max
  unsure (1)..(146): unsure at all n locations; Clone ID: 701135228H1
ccagttgtgtagatatatatgtgacaattgcaactggatcatcagggaagtcatcacggctttcttttcaacttgattcaatgtattgctgacctgggntctgggaagtgggttttcagagacctcaatgtatatatttttagttt

SEQ ID NO: 48246 - DNA, 217 bp, Glycine max
  unsure (1)..(217): unsure at all n locations; Clone ID: 701135229H1
ctccatttgacacagtcctagtggtgtactactacntatggccacacacgcatccatcactaatgtcactgtgganttccttcaattccccgcactggtgacacctcctggctctaccaaatcctatttccttggcggcgcaggggtgagagggttgaatattcaagaagaatttgtgaagttcacgggaataggtgtttatttggaagacaaggcc

SEQ ID NO: 48247 - DNA, 259 bp, Glycine max
  Clone ID: 701135230H1
ctgagtttccacactgcataccttaggtcttccgaattcgaagttaatttgcaagatggctaaggaaaaggctcagatcaacattgtggtggttggtcatgtggaccctgaggaggcaaccaccattaacgagctgaagaagcctgttgtggagaaagaagctccagggcatgccatatgagggcatgcacgtacggcctcggaggggaaccagaaaattatgttaacaaaataatctggaaccctaatgtatcagtgt

SEQ ID NO: 48248 - DNA, 228 bp, Glycine max
  unsure (1)..(228): unsure at all n locations; Clone ID: 701135231H1
gcgcagcaggagccttattgattaatagatcnccagcttcnccgtggtagcaggatgcatgtggtagaatcacncaagtcctggagaacatactaacaattcccagctccaaccaaaaatgattgatcaaagcaacatcaatcttcagctaaattcataatgacccaagacttgaggacttcaataatatccacttcatctaatatacatagattgtttcagaatttt

SEQ ID NO: 48249 - DNA, 186 bp, Glycine max
  unsure (1)..(186): unsure at all n locations; Clone ID: 701135232H1
gcatcanccctcaaaaatagtactagtaaaactggcaatgaagttgttcatgaacagtataaaaatcgncaaagaaaaattacagggtcgncatatatccacacaacncacganaggcnnaaagacttgcngcagcataaagtaggagangatatttgagcaagngaacagaaattaanagacttc

SEQ ID NO: 48250 - DNA, 253 bp, Glycine max
  unsure (1)..(253): unsure at all n locations; Clone ID: 701135233H1
ggcaccagctggcccaatgtatcaggctgggaccttgagtgggaaccctttggccatgactgcaggaatacagaccctgcagcgtattaaggagccaggaacttatgagtacttggacaaaatcaccggtgagcttgttcagggcattattgaagctgggaagagggcaggccatgcaatatgtggtggtcatatangggggatgtttgggtttttcttcacagaaggaccagtgtataattttgcagatgcc

SEQ ID NO: 48251 - DNA, 254 bp, Glycine max
  unsure (1)..(254): unsure at all n locations; Clone ID: 701135234H1
tgtctctcttctcttttgttctcgtcaatatcaccactcatctccacccacaacctagattcncatntctgctaaatttctcatcttctcctctgcccccatcaccttgatctgtctgtctatacactcattgtttgacaaaaaacaaaatataacactgggaagttttgtcatagctgagagctgactctagctagaggataataagattacaagagagaggaattgtttttgattggatccacaaaattcna

SEQ ID NO: 48252 - DNA, 252 bp, Glycine max
  unsure (1)..(252): unsure at all n locations; Clone ID: 701135235H1
atttaatggcaatnnnncctcaaatgcaagangcccaacagtgtagagcacaaaaggaagcctcttgcatttgagcccaattgccattaaatgcaagaaattatggatatatcatatttcaagttattttaagttatatgatagagctgtgncnntctctaatttgccttctttctggccttgttttgtttgtcttcatttttatttgtggttttgcgtttgtaggctctgggcttgaattgatcatacaca

SEQ ID NO: 48253 - DNA, 230 bp, Glycine max
  unsure (1)..(230): unsure at all n locations; Clone ID: 701135236H1
atggattttcgcaaattcagcgtacaacgtcagtgtttaccgtggcagctccaactcgtcatctctattcttctgttcttagcagttagttcacttggatcacctattganactcgcaaaantggcagatcatctgtattctcactttttaatctcaaagaaaagagtcgattttggagtgaggatgttatacacaatgattttgatgatttanagttttcnagccatgg

SEQ ID NO: 48254 - DNA, 251 bp, Glycine max
  unsure (1)..(251): unsure at all n locations; Clone ID: 701135237H1
aagatgtttcctttcgggcaaaagggtcaaaagataaaggggactatggtggttatgcagaagaatgtgttggatatcaacagcatcaccagtgttggagggatcgttgaccaaggcttaggcttcataggcagtgcagtcgatgcacttacttttgcagccaccaaaatctccatccagttgattagtgctaccaaggctgatggtgggaaaggaaaaattggaaagagtacaaatttaagaggnaagat

SEQ ID NO: 48255 - DNA, 252 bp, Glycine max
  Clone ID: 701135238H1
ttggtctttcctctttcgttctctctctttcactcgcgtcttcgagtttcacagcgaagtcgtaggagggtttcaaaagatggagaacatgcagagcttctggcaattgggcgatgaactccgtggacactcaaaagcatcggaggatcacaaatggttaatggttgcttcgaaattggcggaacagacaagattgaagggggagcgtgtgaacaaccttgatctttcaaagggccccattgaaacaaggtc

SEQ ID NO: 48256 - DNA, 253 bp, Glycine max
  unsure (1)..(253): unsure at all n locations; Clone ID: 701135239H1
gcttcctcttctatttgctttcttgaagttagctgccactacggaatcaagaaaagatccaggggaatattggaaaatgatcatgaaagatcaggaaatgccagaaggacttcaaggtcttgtttcatttcaatctgnaaataaccctaagactcaagagcagcttggtaaaggttccaaaaaccattgtgaagagtctctagttacaaatacacaagttaacagtgacttcgaacccataccaagtgttacc

SEQ ID NO: 48257 - DNA, 235 bp, Glycine max
  unsure (1)..(235): unsure at all n locations; Clone ID: 701135241H1
gctcgccattgggtcgaccggatacnagactacaatgtgcctggaggaaagttgaaccggangactgtcagtcattgacagctacagattgttgaaagaaggacaggcattaaatgatgacgaaattttccttgctagtgctcttggttggtgtattgaatggcttcaggcatattttcttgttcttgatgacattatggataactctcacacacgccgcggccagccatgctgg

SEQ ID NO: 48258 - DNA, 253 bp, Glycine max
  Clone ID: 701135242H1
attcatgacaccgtctgcatttatatttctatatgagaatcaattattcctgacatttcgaaaccaaactgtggcggtgtggaacttccgtggagaacttgtaacttcttttgaggatcacctcctgtggcatcctgattgcaatacaaacaacatatatataaccagtgaccaggatcttatcatatcatactgcaaggctgattctgatgattcattgtccgaaggaaatggttctattaatgtcagcaac

SEQ ID NO: 48259 - DNA, 255 bp, Glycine max
  unsure (1)..(255): unsure at all n locations; Clone ID: 701135243H1
gcgctcttctctttgctctttntctctttctctcttcgcctggtcttggcatctccgcagcaccaccaccnnncnncctgcttagaccaggtcctctctctctctagagagnnnnnnnnnnnnnnnnnnnnnnnnnnnnnnncnttaagcttttaatagtaagacatggctcaacccagttccaacggggatctgaataataaccnncagcagggtcaggttcagcaacaacagcagcagggtcagtnggcggcg

SEQ ID NO: 48260 - DNA, 253 bp, Glycine max
  Clone ID: 701135245H1
gttaacgtacctagttgttggtctttatatttagttattgacatcaacaaagtcatggaggaagttaatgtggttcaaaccaagaatggaactgtttcagtagcttctgcgtttgctggccataaggaagctatacagcaaagggaccacaaatttttaagaattgctgttgaagaagcgtataaaggggtagactgtgaagatgggggtccctttggtgctattatagtttgtaatgatgaaattgttgcta

SEQ ID NO: 48261 - DNA, 256 bp, Glycine max
  Clone ID: 701135246H1
gaagaactctcgaaaatggatgtgcattgccatcattatactgttgataatagtagctatcatagttgtgggtgttctcaaaccttggaagagtagctagggtgcttgagtgtggcccctttaccttttgtccataatcataagagttgacttggttgcgaaagcatatgcaatttatgcatgtgtgtcaacgggacatcttagagaaggatttttttttaagcttttattttgtatgattgagatgcttgttttg

SEQ ID NO: 48262 - DNA, 257 bp, Glycine max
  Clone ID: 701135247H1
aactttccagttgttgacatggggaaacttaacaccgaagagagagcagcagccatggagattataaaagatgcctgtgagaactggggtttctttgagttggtgaaccatgggatatccattgagttgatggacactgtggagaggctcacaaaagagcactacaagaagactatggagcaaaggttcaaagaaatggtggccagcaaagggcttgagtcagttcaatcagaaatcaatgacttggactgggaaag

SEQ ID NO: 48263 - DNA, 264 bp, Glycine max
  unsure (1)..(264): unsure at all n locations; Clone ID: 701135248H1
ggntcgcttgtcnnnatnnncnncgnctcncgtaatcatgcctngtcaaatccncgngattaangatttccttntcactngccagaaggaaggatgcgaggtcagtgaanatcaagaggngcagagatgtggttaagttcaaggtcagatgctccaagtacctctacacactttgtgtgtttgacccagagaaagctgataaattgaagcaatctcttcctccaggtttgagtgttcaagacctgtaaaggtactgggcgagag

SEQ ID NO: 48264 - DNA, 251 bp, Glycine max
  Clone ID: 701135249H1
cagagtcaaagcattttgtgttgataaattcggtgaagttgtggaatggactcacccactatccaccattcccatgcattggcagagatagcagttcccactgctgctcactggtcagagaagtacaaccatgtgatcaaggccatgactcaaaagggttatagtttcgtcgggtatctacctttgattcccattgaagagatagccaaggcattcaagcagggagaggcgaacttaaaaggagataatgc

SEQ ID NO: 48265 - DNA, 231 bp, Glycine max
  unsure (1)..(231): unsure at all n locations; Clone ID: 701135250H1
accggatttcatcgtcaccgacatnntccacccttggagtgtcgatgctgctgctaaactacggcattccgaggatcatgttccacggcgcaagttatatgcgctcgctccgttgcgcactccgttgaacagtacgcaccccacttggaagcnaaattcgacaccgacaagttcgtnttacctgggttacccgntaacttggagatgacgcgcttgcagttgccggattgg

SEQ ID NO: 48266 - DNA, 249 bp, Glycine max
  unsure (1)..(249): unsure at all n locations; Clone ID: 701135251H1
gaagctctgcaaaaagatgctatattcattgatgcggatagaattaaaacaaccaaaagtaannatcntgcttgcattcaagctaaagatcgtacaactggaagaacagngattgcttcttgtgtcaaggttgctgaggtgactcaaattagaatagccagtaaggnngttctgctcaatataattaaccttgccgttggtgcagaacttgntcttccaacaagcttttangatgctctaggaaatcct

SEQ ID NO: 48267 - DNA, 250 bp, Glycine max
  unsure (1)..(250): unsure at all n locations; Clone ID: 701135252H1
gtggcagttagagcattgggacacttagctacatatgccagcacttttcctgccatnccaagtcatggtgaaattcttgagctctccatccaattggcaatgagttccctggaaatagtttattcacacttttaccaatatgttgatagaaggctcagttatcattgtgatcttcttacacgtggcatgggtggcgttgaaatggagtccaggaaggctgaggaatgggctagtcagttgcngtgttggt

SEQ ID NO: 48268 - DNA, 208 bp, Glycine max
  unsure (1)..(208): unsure at all n locations; Clone ID: 701135253H1
caaaataaccgagaaaaganaattagatncngagaagaagaaagcgtatctggaattttcgtttcgttggtgtgtcgtgtgcgtgtggaggttcttttctttgagactttccttcaaattctagattgcttccctttcttttctttcccttataaccaccaacctctccctttcccccttttcatttcttcctcgattttccatttcc

SEQ ID NO: 48269 - DNA, 251 bp, Glycine max
  Clone ID: 701135254H1
ctcccctcacttgtgcctagccttatgtcatagtattatcattcattctcatctttctctcttctctctccacccaaaccctaactcccgaccctgttcccctctcgtatccgtcatgaaaggaggaaagtccaagaccgaatctaagagagccgatcccaaacttgctgtgaataagaagggagccgccaccaaggctaggaaacccgccggcaaggggaaggcagcgaaagaccctaacaagccaaaga

SEQ ID NO: 48270 - DNA, 251 bp, Glycine max
  Clone ID: 701135255H1
cccgagcaccgtgtggtcgggtattgtattgtattgagagagtgatttgtaggttctttctgatcactgtggtgcgtccattgaagaggaaacatcaaacatgggttggattccctgttctggatattctggcactaagaacaaggttgagaagatggaagttcaggatagtctcgttggtcagatcaaagccaccccaggaaagttgaaaaggaattcatccacgaaatccaaagatacatctaaaaatg

SEQ ID NO: 48271 - DNA, 237 bp, Glycine max
  Clone ID: 701135257H1
ggggatactcgctatgccaatccctatggcatgaacatgaatcacaaaccccacaaatttcagtggacagcaaagggggtctaaatctataatgaacccacctacacctattaatttcctctgcacttgcttcttcctatcaaatatctatcaataaaacagtaataaaattatgtgtgctttgttgttttgttttcttcttggaataattaagaccactccaattgtatttggacc

SEQ ID NO: 48272 - DNA, 254 bp, Glycine max
  Clone ID: 701135258H1
aaagccttgcagttggatcccaataatgagtctgtcaaagaaaatatacgggtggctgagcgtaaattactagaagagcaacaccgtgcatatcccaaccagaatacaagatcatctcaagaattcccaaaccaatctgcacaaggaggatcaagaagccatggcgagccacctccattttcctctatgccgtttaacccccgtgatattgcaagcatgttcatgaacttcacgaacgctacaaatgcacagca

SEQ ID NO: 48273 - DNA, 252 bp, Glycine max
  Clone ID: 701135259H1
atcccaggcgaggagaaagatggaggggaaggagcaggatgtgtcgttgggagcgaacaagttccccgagagacagccgattgggacggcggcgcagagccaagacgacggcaaggactaccaggagccggcgccggcgccgctggttgacccgacggagtttacgtcatggtcgttttacagagcagggatagcagagtttgtggccacttttctgtttctctacatcaccgtcttaaccgttatgggagt

SEQ ID NO: 48274 - DNA, 252 bp, Glycine max
  unsure (1)..(252): unsure at all n locations; Clone ID: 701135260H1
ctctctctcacctcaacaaactcctctgcatgccgccgctcaactcttcaccctctacttcgccaccgcgcagcagcgtcggagtttcgaccaaatctgtcggaaggccgaggatggtcgccgatttcgcgaggccggtggggcgtgtccgagcggtgacgagcgacgacgagtggggcccnnnnnnnnnnnnnnnnncatacggcggaggagtggcggtggaggagaaaccgacggagacggaaacggaga

SEQ ID NO: 48275 - DNA, 247 bp, Glycine max
  Clone ID: 701135261H1
ttttttttgaacactacaaatagaaagttgacatttaataaaccaaagcaacacaacgcagcaaagtcctgaaactcgctgcgcttaacaaaaatgtaatcaggggttccgacaaacacaacacattaaaacacagataaataaaagcaattttgccaccgtcgatcaagaacccagttctgggaacaacagttgcgagatgatggtggagacttcaaactttgtccgaaaaacaagctacctagaa

SEQ ID NO: 48276 - DNA, 258 bp, Glycine max
  unsure (1)..(258): unsure at all n locations; Clone ID: 701135262H1
gncatctgatcaaacttttcttgattctctctctcagtttttgctattctgagtgatgggtatgccctgccgctgttcccacacctncccacatcactgaaatcatcatcaccagcttcttccgccacaagtcttaaattacaacaatttccctcaattattcatcaaccaaccaccttaatagccttttccaatggttccttaaagatccaacttggtcggagtaaacatggcggctagtggaagttccttttccaa

SEQ ID NO: 48277 - DNA, 258 bp, Glycine max
  unsure (1)..(258): unsure at all n locations; Clone ID: 701135263H1
gagaaatttggcgccgcaattgtcatgacccaaaattatatttttctatcgagtaacctttacaaccttgtgtcgtcaaccaccctccaccgcatcgtcgaacnccccgtatgtcgtcgtcgtctcaccaccacagcgcctcgcattagagcaccgggccgtcggagcaggttttaaggtcagacctctgaaggctgatctgtcttttttgttatttattttgtttttgtggttctgttttgggtaatccttattgat

SEQ ID NO: 48278 - DNA, 257 bp, Glycine max
  unsure (1)..(257): unsure at all n locations; Clone ID: 701135264H1
canntggtgtccctnttccccttttgtgctcgtagttgaccgtcgaataaaatctaatcccccaaataaataaagaagcgaaaccaaaccaaaccatcgagtgcgttgcacncccaccgtaagcacagctatgtcgttgcgcaggcgaaccttgctcaaggtcattgttctcggcgatagggggttggaaagacctcgttgatgaatcaatacgtgcacaagaagtttagtcagcaatataaggctaccattggggc

SEQ ID NO: 48279 - DNA, 251 bp, Glycine max
  Clone ID: 701135265H1
gcaaaataacaataacagaggaagaaagaaaatcacacagtttcagtttcagtttcagcttcgctttgtagaaatggctactctatcaagcttcattgctacgccgaagaatcccaagacccactttctctcaggttcctcattcatgtcgatggacaaatgcttcttgaaaatcagcaccagcggacactttacagatttctctttaagggctaaagcaacatgtaaccaaccacttgttattcaagctg

SEQ ID NO: 48280 - DNA, 248 bp, Glycine max
  unsure (1)..(248): unsure at all n locations; Clone ID: 701135266H1
ctctttctctagtcctgttatttctcagcgcgtaaagcatggctntgttggtggagaaaaccacgagtggtcgcgngtacaaggtcaaggacctttcccaggccgacttcggccgcctcgagatcgagctggccgaggttgagatgcccggcctcatggcctgtcggaccgagttcggcccctcccagcccttcaagggggcccgcatcaccggctccctccacatgaccatccagancgccgttctc

SEQ ID NO: 48281 - DNA, 227 bp, Glycine max
  unsure (1)..(227): unsure at all n locations; Clone ID: 701135267H1
gttgaactggatccatcgacgagtntcaaatttggtattgacgatagaattttgtgttcanctggaaaagttacatataatagaaggcatgactacattctttctctcaatatcccattacatgaggcaactaacaaagaagaattagaatcctttcacaaactgaaagcagagaaacttgcagaaggaaaggaaataaatgccaatgagattgtgcgtccaagggt

SEQ ID NO: 48282 - DNA, 248 bp, Glycine max
  Clone ID: 701135268H1
gcggagaagaactccgcaacgagatcgatgagcttcttcgccaacagcgcgagatttcggaaaggcttcgagatcctcgaggtcttcgcagaggtgccttgccgggtcctcctgctctccgcactaacggtgttcgccaacgaccctttattcgccctggagacaggaacgattctgaagatcaacctccttccaagcgtcgactttcatctgccgtcgttaaggtggatgatggggattgcctgaag

SEQ ID NO: 48283 - DNA, 249 bp, Glycine max
  unsure (1)..(249): unsure at all n locations; Clone ID: 701135269H1
gttcaatggcctttatntcttctaagcagtangatcctgttngcgnttgatttngctttggactgcnacnntactcagactgatctgtggaacaggntatgtagggatgagtatatggcctatgcagttaaggantgctattacagtgttgaaaaaatattatattcattanttgacaacganggangactttgggtgganagaatttttcgngcnatcnataacagtattatagagggttcgcttgtt

SEQ ID NO: 48284 - DNA, 248 bp, Glycine max
  Clone ID: 701135270H1
gggtagctgagatcggagaaccctctctttcttctccttcttcagttgaaaataaaaaatggcagatggtgaggatattcaaccactcgtctgcgataatgggacaggaatggtgaaagctggatttgctggggatgatgctccgagggctgtgtttcccagcattgttggtcgtccccgtcacacgggagtgatggttggcatgggccaaaaagatgcatatgttggggatgaagctcagtccaaga

SEQ ID NO: 48285 - DNA, 249 bp, Glycine max
  Clone ID: 701135271H1
ctcttgcaatgaatggctcaccatctgtacctcaggtacctggaggagctgtcagttctagtaacttagttgcctctaccagaaacagcgtgccttctgtgacgggccagaccactcatcaactacctagaggtaatgtggtgcctgttctgccccaacctaataattttacaaatggggtgccagtttctaatcaaccatcacaagccaagacccaagtttctctagggagtggagtggttgctgctc

SEQ ID NO: 48286 - DNA, 231 bp, Glycine max
  unsure (1)..(231): unsure at all n locations; Clone ID: 701135272H1
gccaganaaagcttcttcntttnactctcaggntcaacttcgcagatgttgcnatngcacnnacncatggatggttttcatctttaccgatctgaactagacgaaatggagaatcccgaggaagcacatgcnagaaggggagctccctggacattcaatccattgcgactacttcantgtctcaagaatctgagaatgcatgtaaggtttatgaaattttttaagatttaa

SEQ ID NO: 48287 - DNA, 252 bp, Glycine max
  Clone ID: 701135273H1
cacccttcatcctctatcttcttctctcactccttcttctaaaggctctgttcatctttgtccatgctcttccacacgttctcgctctcttccccaattcccttccaaactacgacgcaaagccaccatcaagccgaggctgttgacgatcatcgaccccattttgctcttcaacggcgtcgccaccactttctatttcgacacgcaaacacttatcgtcactgtcagtgttttggccgccattgctctttc

SEQ ID NO: 48288 - DNA, 228 bp, Glycine max
  Clone ID: 701135274H1
gaaagggaaagtgaaacgaacatgatggtgggacagttgacggcgacgaagccgagccggagcgatgaggttttggatgctgaggagcaactgagaatcgctaatgagatcagagcccaattcgatgccttggaacccaagcgacccatcaagcccaacagaagcgaacccgacgccgttttgcaataccccgtcgcagccgcttctgtgaacaatatacctgagctt

SEQ ID NO: 48289 - DNA, 254 bp, Glycine max
  unsure (1)..(254): unsure at all n locations; Clone ID: 701135275H1
cttttgtctgcattacacctgagcctcagatctcatctcttatccacaaaaccatgggctgaaaaggtgaccatcatgaaactcaaggttgatcttgagtgtgagaaatgctacaagaaggttaagaaacttctcggcaagtaccctcaaattcgggaccagaagttcgatgagaaggaaaacattgtgttcatcacagtggtgtgttgcagcccagagaagntaagagacaagctttgctacaaaggtggagg

SEQ ID NO: 48290 - DNA, 250 bp, Glycine max
  unsure (1)..(250): unsure at all n locations; Clone ID: 701135276H1
ctccagtgatcctaacgccgataggatcaatcgtctcaaaggtgaaatgtctcaggtacggaatgtcatgatagaaaatattgacaaagttttaganagaggtgatcggttggaattgctggtcgataaaactgctaatatgcaaggaaacacatttcgcttcaggaaacaagctcgtcgcttcagaagcactgtttggtggagaaatgtcaagcttacgattgcacttatagtcgtcctactagtgata

SEQ ID NO: 48291 - DNA, 252 bp, Glycine max
  Clone ID: 701135277H1
ctttgaacccagaccaagtgttaccaaatatgatgattttgaactcaggtcaagcgttaccgagaatgatgattttgaaccgagaccaaatattagtaagtatgatgactttgaactcaggtcaagcgttaccgagaatgatgattttgaatcaagaccaagtgttaccaaatatgatgatttagaactcaaatcaagcattaccaaaagcgatgattttgaaccgagaccaaatattagcaagtatgatga

SEQ ID NO: 48292 - DNA, 255 bp, Glycine max
  Clone ID: 701135278H1
caaatatggataaagcaattcaaagacagagagtcctgcttgatcatcttcaacccatttcttcaagttcaaatttttcttctcaaacccatcaatctacggatctctcagcttcattatgttttgccaagaattcttcgcacggtcaaataggtggatcagatgacgacgtggtgattgtagctgcatatcgtactgccatctgcaaagcaaagcgtgggggctttaaggatacccttccagatgacctgcttg

SEQ ID NO: 48293 - DNA, 255 bp, Glycine max
  Clone ID: 701135279H1
ttttgcccttgttgcaaagcaaccaacctttcatcagctacgatcagttgagcagctggggtacattactgtgctcatgcagaggaatgattgtggcatacgtggactacagtttattatccaatccacagtaaagtctcctggtaacattgagcaaagggtcgaggcatttctccaaatgtttgagaccaaactccacgagatgacaattgatgaattcaagagtaatgtaaatgctttgatagatgtgaagct

SEQ ID NO: 48294 - DNA, 245 bp, Glycine max
  Clone ID: 701135283H1
ggcttttgcagttacgcccaagataataacggtgtcattcgataagcaaaaccaaaggaggagtttcgaaggattgtttgggaaaaggtatcgggtaagggtgaagcgaagtcaagatcattcagtgaagtgtggtattgagcgaacagcagcgatggaaagaaagggggcggaggaggaggcgtgtcaaattcgaactacgtggtgccgctggacaacatggcgaactcatcctgcataacacg

SEQ ID NO: 48295 - DNA, 247 bp, Glycine max
  unsure (1)..(247): unsure at all n locations; Clone ID: 701135284H1
cacaacttccgaactggaagtgattgtgatgttattgcacacctgtacgaggnnccatggagaagactttgtggacatgctggatggtatcttctcatttnttctactggacacccgtgacaacagttttatagtggctcgggatgctattggggtcacttccttgtacattggatgggggttagatggctctgtttggatttcatcagaaatgaaaggcctgaatgatgattgtgaacactttgag

SEQ ID NO: 48296 - DNA, 237 bp, Glycine max
  unsure (1)..(237): unsure at all n locations; Clone ID: 701135285H1
gaaaaggttgtgctgcttctctctctgtctcctcgttcgcttctttctctctctaggntcccnggggttctgagtaaacgttgtaaaacatgcagctgacacttgaattcggagggggattggaacttctttgtgactccaagaagattcataatgtcaatattgagcaacacaatggagaagacaagaccaacttgattaaggagaggcctgaaatgtttatgaaaggagatactg

SEQ ID NO: 48297 - DNA, 247 bp, Glycine max
  Clone ID: 701135286H1
gtttaaagtgagagaaaaagaaagaagaaaatggcaaactttccagttgttgacatggggaaacttaacaccgaagagagagcagcagccatggagattataaaagatgcctgtgagaactggggtttctttgagttggtgaaccatgggatatccattgagttgatggacactgtggagaggctcacaaaagagcactacaagaagactatggagcaaaggttcaaagaaatggtggccagcaaag

SEQ ID NO: 48298 - DNA, 237 bp, Glycine max
  unsure (1)..(237): unsure at all n locations; Clone ID: 701135287H1
gttcatttctacacatccctagctctgtcgttccgtcgttgacgatggcgtttcgggtgcgaancctgacctccgctctctctttcttctctctctcttgtccatcgcttccgccaatgtcttcttcgaagagcgtttcgatgacgggtgggaaaatcgatgggttaaatcagattggaaaaaagatgagaacgtggctggggagtggaaccacacctctggtcaatggaatggaga

SEQ ID NO: 48299 - DNA, 250 bp, Glycine max
  unsure (1)..(250): unsure at all n locations; Clone ID: 701135289H1
gcagtgaagaaaatgccttctacagaagaagaggcaatatctcggagtcaatatcaacaaggagttagcgcgtggnattttgatattgatgatttgaaagctcaagcttcattggtgagggatgatgatgatattgcagagatgagggaagaagctgaaaagaaattttttactaattacaaggccattgcaattgattcccagtctggtactgtcaaaatgaattcagagaaatcaccacagaataaaa

SEQ ID NO: 48300 - DNA, 250 bp, Glycine max
  Clone ID: 701135290H1
tagcagtggagctcataaaaaagggtcatgcttatgttgatcatcagacacctgatgagataaaggagcatagggagaagaaattgaacagtccttggagagacaggccaatttcagagtcattgaagctctttgaggatatgaaaaatggcagtatagaagaaggaaaagccacacttagaatgaagcaagacatgcagagtgataactacaatatgtatgaccttattgcatatagaattaagtttac

SEQ ID NO: 48301 - DNA, 77 bp, Glycine max
  Clone ID: 701135292H1
ctaatttgggtttgatatttggaaaaaccttggtaaattcactgcatctgtttaatccgttcttgtgctgttttatc

SEQ ID NO: 48302 - DNA, 252 bp, Glycine max
  unsure (1)..(252): unsure at all n locations; Clone ID: 701135293H1
ttcattcctattccttctttctcttccaattccaaatcacaacccttcgttttccctctctagaatcttcttctccattcaattcctactccttttttcnnnnnnnnnnnnnnnnnnnnnnnnnnnnnatggcttccgatctcgaagcaaaagccaaagangccttcgtcgaagaccacttcgaactcgccgtggaccttctctctcaggccattcatctcgaacccaacaaagccgaattctacgccgacc

SEQ ID NO: 48303 - DNA, 254 bp, Glycine max
  unsure (1)..(254): unsure at all n locations; Clone ID: 701135294H1
gcggttgcaattgcatagagaagtgcagagagagcgcagnnanacgactcagtcaaacagtcggtaactctttcttttcttttctttctttctccgatcgcatcgctcgcaaccacaatcatgccttcccgaagaagaactctcttgaaggtcatcattctcggtgacagcggggtggggaagacgtctttgatgaaccagtatgtgaataagaagtttagtaatcagtacaaggcaaccattggagcggattt

SEQ ID NO: 48304 - DNA, 254 bp, Glycine max
  Clone ID: 701135295H1
cggcaacctctcttccggcgccgccgctatctcggccgcgcaccaatcttcaatttgattacttgggtcaacgatttctgtcattctcaatcatggcaactagacttcagtttgaaaataattgtgaagttggagtcttctctaaacttaccaatgcctactgtttggttgccattggtggttctgaaagcttctacagtgtatttgaagccgagttagcaggtgttatccctgtggtcaagacatccattggc

SEQ ID NO: 48305 - DNA, 257 bp, Glycine max
  unsure (1)..(257): unsure at all n locations; Clone ID: 701135296H1
ctttctttcttcaccatgtcacttgctgggaaaatcaccactgaaatcggggttcatgcaaccgctacaaagtggttcaacctcttcgcaacacaactccatcatgttcaaaacctaactgatagagtgcatggaaccaagctgcatcaaggtgaagactggcatcacaacgagacagtcaagcactggacttataccatagatggtaaggttacaacatgtctggagagnattgaatccattgatgaacagagcaa

SEQ ID NO: 48306 - DNA, 200 bp, Glycine max
  Clone ID: 701135301H1
cctctatcttgggaagggcttctcccatcgcaaattgtctcccagttatcacattcacaaaaccattgacgaatcctatgcagttatcttcgatgctggtagcacgggaagccgtgtacatgtctatcgttttaaccaacaattagatctccttcgcattggccaagaccttgagttgtttgtcaagactatgccaggtt

SEQ ID NO: 48307 - DNA, 254 bp, Glycine max
  unsure (1)..(254): unsure at all n locations; Clone ID: 701135303H1
tanaaactcaacaaaagtgttcgcataacaacattttatagtatggtatgattcaaactctgaatatgtttacttttacgtggcttacagctgncatataattccttataacntaataattcacgtaaatgcaatgccactttgggctccttncattaaggacatcaagttcatgggttcggtctcactatatttacccaattcaaaagcagagtngataggtggcgggctgctcccagtaaaataataagcac

SEQ ID NO: 48308 - DNA, 261 bp, Glycine max
  unsure (1)..(261): unsure at all n locations; Clone ID: 701135304H1
gtgaacgttaataccacatcctgctgcaattattacacactatttttnttgnggcagatactcaattagtatttcataattttcaggtaagcgtgtatttgtagttttcttttttattggttcatagaaaatgatgaacaatgatgaaagagaagaggttaatccacccttttcgattctccagagattggatcgccttgagcatcaggtaaattaatattttcttcttcaagtttcattcatgcttcaatccatagaata

SEQ ID NO: 48309 - DNA, 196 bp, Glycine max
  Clone ID: 701135305H1
gttccttcactctccgctctctctgccactgagccaagaagatggcctcacaggtttgcaaatctgcttccagagccgcgaggtcccttctatcctctcgttttcactctcaaggacgtgcgcttggggctgctgcggctgtttcattgagcagcaaagtgcctcttttttacggaaagaacggttctggaaatgg

SEQ ID NO: 48310 - DNA, 226 bp, Glycine max
  Clone ID: 701135306H1
gcgctttctgcaaaccgaacatttcatctccaaagggatcaacaggtcgaaggagaaatggggctgacattcacgaagcttttcagccggcttttcgcgaagaaggaaatgcgaattctgatggttggtcttgatgctgctggtaagaccactatcctctacaagctcaagctcggagagatcgttactacaattcctaccattgggttcaatgttgagactgtgg

SEQ ID NO: 48311 - DNA, 239 bp, Glycine max
  Clone ID: 701135307H1
gcttttcacaaaggaggttcacagtggatggaactataaggcttcggaccaggcttcattcccctcaaaagtacttccttcatttgtttatacttcaaacttcaaaccacaagatcataggtgtagctacgtacctagctagcttctctctttattttgaaggatctctctacacacacgtcatgtgtgtggttgagaacttgagatgtttccttgcaaaggtgaggttgagaggaatg

SEQ ID NO: 48312 - DNA, 262 bp, Glycine max
  Clone ID: 701135308H1
agaagcttggatagggatatagtggagagtagacttacttttgcaggttttgtggtatttaattgtcccataagatcagattcagccactgttttatctgaattgaaagaatcctcacatgacttagtgatgattaccggtgaccaagctttgacagcttgccatgttgctagccaagttcatattatatcaaaaccaacattaatccttggcccgacacgaaatggtgagggatataattgggtgtcccctgatgagactg

SEQ ID NO: 48313 - DNA, 265 bp, Glycine max
  Clone ID: 701135309H1
cgatgatgcgttggtagatcgtgatctggtgcgggcgcgatcattgtaggatcggtgcgttcgaatttcgcaatgacgtttgggagttgagtgaaggaatcgctattatgtctgaattggtggcccgtacgggcgggcatcagcagcggtacgagaacggttaccgtcttgtttccgggtgtgttccatttagatataaaagttctaatgattgtggagaccctagttctgagaagattgttgaagtgcttatgattaattcacc

SEQ ID NO: 48314 - DNA, 265 bp, Glycine max
  unsure (1)..(265): unsure at all n locations; Clone ID: 701135310H1
gtatactaaatgtcttagtcttaagangggggaaaaactggaattccaatncattcttaatttcttacaatccaatactgcaaactgagtgagatatataacttgtttttgatttcttcctcatcattttgcatanacaaagattaanatggaagggttttttggaaattgcttcaatatgattttnctgatgttgtgcttcaccaacttgagcatagctttgctcaaagtcntatgaatggatttggagagcagccactggccc

SEQ ID NO: 48315 - DNA, 266 bp, Glycine max
  Clone ID: 701135311H1
gatctgcctatggataaaattaagaaatgcatgggtgatcctgaagcagatgtggagaatgaagtgctaaagaatgagcaacaagtccagatcggtagaggatctcgcggtgatgtcaccatcttgccaacgttggttataaacaatgtccagtatagaggaaaattggagagaactgctgtactcaaggctgtatgttctggatttaaggagactactgaaccttcagtttgtttaagtggagatgttgagactaatgagtgtct

SEQ ID NO: 48316 - DNA, 272 bp, Glycine max
  unsure (1)..(272): unsure at all n locations; Clone ID: 701135314H1
attcactttcctaatcctanncaccaacgaacganccgaagacactgcaatctagnaaaaagttttgnactttgatgcacggaaagccttcatgcccgaccatgacatgtaccattttgatcacatggacgaagncgattttnntgacgaaattgatgaccaaaaccatggtaggggtgttggggatgctgctcttgatgaatatganatgcttactaaggtgactgatacaacagctgctcaagcnaganngggaaaggacattcagggaa

SEQ ID NO: 48317 - DNA, 269 bp, Glycine max
  unsure (1)..(269): unsure at all n locations; Clone ID: 701135315H1
gcaaaatggatccgtctgcggcattgctgtttaaccacctcaaaggtgcagacccgttcttcctgctagcgggtcctaatgtgattgaatcagaggagcacattctgcggatggctaagaacatcaagactattgcatctgaagttggaataccgttggttttcaagtcaagctttgacaaagctaaccgaacatcatcaaaatcatttcgtggcccggggatggttgagggatgaagatactcgaganggttaaaatagcttatgaca

SEQ ID NO: 48318 - DNA, 273 bp, Glycine max
  unsure (1)..(273): unsure at all n locations; Clone ID: 701135316H1
gganagtnggggaagttgtaggggtttcagggcacgcattctatcgctgtttctctgcgaatcaacaaaacgccaccgtttcattgatctacgtcctccaaggccaggtctnccaagaattggtaccaattcaagctgcaaatatacttgaacttcaacttatcccacattctccactctcnatggcttcaactctcaaatctggcggaattcatacaggggcaatcaatgatgatttntncaaggnattgtggcatgcatgtgctggtnccc

SEQ ID NO: 48319 - DNA, 265 bp, Glycine max
  unsure (1)..(265): unsure at all n locations; Clone ID: 701135317H1
tttttatttatttcactttaaaataattgagcgtgtagctcatggtcatgtttctatgatctttgatttcttctttccttgcctttgatcacatccctctacttgatatgtatacatataaactaaacataacagagcagagcaatgaatcatagttcccacatcaatatcacannaaatggctaccataaaagcttctcacactgtggttccaaatcaaccaacaccnaaaggtcgattgtggctatccaacagtgacaattcc

SEQ ID NO: 48320 - DNA, 265 bp, Glycine max
  unsure (1)..(265): unsure at all n locations; Clone ID: 701135318H1
cgaagaaccacaccgctcacaaccagtcctacanggcccacaagaatggcatcaaaaagccaaagaggcaccgccacacttccaccaaagggatggatccaaagtttctgaggaaccaaaggtacgcgaggaagcataacaagaagagcggtgaaacagccacggaagaagagtaaagtgtcactctcaaatggggctattaggatttgatttgctattcaagtcccatatgttttgtgtcaaatctatatttagtagtatagtc

SEQ ID NO: 48321 - DNA, 136 bp, Glycine max
  unsure (1)..(136): unsure at all n locations; Clone ID: 701135320H1
cganggatccggatctgcgacgaacggggtgctggctccgccgcgcaaggtggcattgataaccggaattaccggacangacggttcgtacctgacggaattcctcctggacaaggggtacgaggtgcacggcctg

SEQ ID NO: 48322 - DNA, 261 bp, Glycine max
  unsure (1)..(261): unsure at all n locations; Clone ID: 701135322H1
cttggttctgccaatcttgctaatgaattgttttgttttgctgggtcaatgtgctaggccactgaacacagaaggaggngaggatttggtcacagcaacctgcaagcacaccctccatttcgaactatgcatttctaccttgagatcagtccctgctagcaagacatcagatctaaaagtncttgctgagattgcattgantctgagcacaacatatgctgcaganactttgtnctatgttcatganctgcagtccaattc

SEQ ID NO: 48323 - DNA, 265 bp, Glycine max
  unsure (1)..(265): unsure at all n locations; Clone ID: 701135323H1
gcagacgccggtgcctccaaaacctnccctcagcaagccggtaccattcgcaaganccggctacatacgtacatcaaaggacgcccctgcaaggttgtggaagtntcgacttccaaaactggnaagcncggtcacgccaagtnccactttnttggaattgatattttcactgccaagaaacttgaggatattgtgccctcttctcacaactgtgatgttcctcatgtgaatcgtactgattaccagctcattgatagtnntgagg

SEQ ID NO: 48324 - DNA, 267 bp, Glycine max
  unsure (1)..(267): unsure at all n locations; Clone ID: 701135324H1
gggctagttatttctcacacctgaagccacagatttgtgatcagccaatacagcattatacatcagacagtatacatttggaatggtgncaaaactaatgcacaagcaacaaacctttaaattgctgcaacttatatctgaagcttgcataaatgacccagaatcatcacagctctgttgtcagctccaacaggtgcttggtaatcccatcaagtcaactagtattcattcattaaattcactagaccaacagcataaattgctgtt

SEQ ID NO: 48325 - DNA, 266 bp, Glycine max
  Clone ID: 701135325H1
cggagagatggcggagcacttggcatcgatattcgggacggagaaggacagggtgaactgtccgttctacttcaagatcggcgcgtgcaggcacggcgaccggtgctcccggcttcacaccaagccgacaattagcccaacattggttctgtcgaacatgtaccagaggcccgacatgaacatgagcattatcaccaaccccgatcagccacaaccccaatcccttgaccccgacaaggtgcaggatcacttcgacgacttctacg

SEQ ID NO: 48326 - DNA, 235 bp, Glycine max
  unsure (1)..(235): unsure at all n locations; Clone ID: 701135326H1
ggctcccaagggtttaacctttctggctgtnctaatatgantttcagcactgtcactgagtccttctnttgcgggggaagggcaaaataatggccttgttatgaacttctacaaggaatcatgccctcaggctgaagacatcatcacagaacaagtcaagcttctctacaagcgccacaagaacactgctttctcctggctcaggaacatcttccatgactgtgctgttcagagt

SEQ ID NO: 48327 - DNA, 271 bp, Glycine max
  Clone ID: 701135331H1
gaaaaagtggcacacagaagtggttcccggtttgaccttcagaacttgaaatgaaacatgaccatgcccccattgtgatgtatccatgtgacaaacaaccatagcatccaccctatccccattttcaccagcaagtgggaccctataaatcttgttctcactttcttggctgtggcagtaaaaaacagtataagggtaaggcatggtatggcaagccaccatcttggaagctgggatttctatgatgttttctaacatagtgtagttttgg

SEQ ID NO: 48328 - DNA, 53 bp, Glycine max
  unsure (1)..(53): unsure at all n locations; Clone ID: 701135333H1
gagatagcgaaggggcaaacacaattttnnnnatcttcttttttatttttngt

SEQ ID NO: 48329 - DNA, 260 bp, Glycine max
  unsure (1)..(260): unsure at all n locations; Clone ID: 701135334H1
cagcctggcagaaagtatatnatcaacaagtcactgatgttggcagagttggcttngacaatggttctggaaaatcangaagtctacagaacttgacaatgcaactcagaaaatgttgtaaccatccctacctctnngtgggtgactatgatatccataaacacaaggaggagattttcagagcntcaggnaagtttgancttcttgaccgnttgcttccacacaacatannatnngcaaanaganagngattancggga

SEQ ID NO: 48330 - DNA, 251 bp, Glycine max
  unsure (1)..(251): unsure at all n locations; Clone ID: 701135335H1
ctccttttactcacaatttattttttggttatgcaangttaccgttttgatgngatgacattagacctatgaatgaagtagtagtagtcatggaacacgcaaattattcatccacacctagcaagacatccattgaagggagtgattaacttcacaacaatcttaagcttgaggcttctcagacttgagcggctcgagtcttctctcacttgtcccttcttcaatccaataacaacaacagcccttctctc

SEQ ID NO: 48331 - DNA, 257 bp, Glycine max
  unsure (1)..(257): unsure at all n locations; Clone ID: 701135336H1
caataattacgnaaaaccaacagcgagtgttgtttttgtntggtccaggctggaccagggaatgaatagagatgagaggctttcggttgaagagaactgagttaagcggcgaacannacgcagaatcggcggcagaaattgccaccggaagcacgtcgaaganggtgaaccaaacacaaaattccatccaccacttctcttttcnatccccaactcaaatctgtgcagaactctcaatttctaaantgtaattctta

SEQ ID NO: 48332 - DNA, 261 bp, Glycine max
  unsure (1)..(261): unsure at all n locations; Clone ID: 701135337H1
angcactccatcgnataatgataggggaagangcagagcctatganaaacagagcacacaattnctattccanttagcacccaccaacagggaccccgatttgaagtatatacngtcacaaacttttcattgtagaattgctctgcagagacgggccaggtgagcatggggacccccgccgacactgcttcnagcgtggaattccatccacagtgtgtgacaaaggcncccacagcttnatggtccagaattagcattggg

SEQ ID NO: 48333 - DNA, 239 bp, Glycine max
  unsure (1)..(239): unsure at all n locations; Clone ID: 701135340H1
aaaccctagccgctcttctcttcantcttcactttggaaacaatacataatggcgttctgacataaggttggaaatgtcttgaggcagggtgctgctcgcagcacacatgcccctgttgcgtccatgcttaattacatccgctgcatgtcttcaagcaagcttttcattggaggcctttcatatggagttgatgaccagtctcttaaggatgcatttctggctttggagatgtggttga

SEQ ID NO: 48334 - DNA, 264 bp, Glycine max
  Clone ID: 701135341H1
gcaagcttcgccgtttgaaacagtgcctcaaccatggcagaacaaacagagaaggcttttctgaagcaaccaaaagtgtttctatgctctaagaaaggtgggaagggaaagaggcctgggaaaggtgggaatcgcttttggaagtcaattgggcttggattcaagactcccagagatgccattgaaggaacatatattgacaagaagtgccccttcactggcaatgtttccattcggggtcgtatcctagccggtacttgtcac

SEQ ID NO: 48335 - DNA, 265 bp, Glycine max
  Clone ID: 701135342H1
gagagaaaccctagcaaaaatgccggctggtcacggtttgagatcccgcaccagagattccttctctacgtcccttcaggaagaagggtaccatcgccctcaccacatacctcagaacctaccacgtcggcgattatgtcgacgtcaaggttaacggcgccgtccacaagggaatgcctcacaagttctaccatggccgcaccggtcgcgtctggaatgtcaccaaacgtgctgttggggtcgaagtcaacaagcaggtcggcaa

SEQ ID NO: 48336 - DNA, 268 bp, Glycine max
  unsure (1)..(268): unsure at all n locations; Clone ID: 701135344H1
tantatgcgtttcagcantgtcactgagtccttctgttgcgnnggnagggcaaaataanggccttgttatgancttctagcaaggaatcatgccctcaggctgaagacatcatcacagnacaagtcaagnttctcnacaagcgccacaagaacactgctttctcctggctcangaacatcttccatgactgtgctgttcngagttgtgatggcttcattgttgctggactccacagaaggaagcttgnctgaaaagggaacagataga

SEQ ID NO: 48337 - DNA, 230 bp, Glycine max
  unsure (1)..(230): unsure at all n locations; Clone ID: 701135348H1
cctctatcttgggaagggcntctacccatcgcaaattgtactcccagttatcacattcacaaaaccattgacgaatcctatgcagttatcttcgatgctggtagcacgggaagccgtgtacatgtctatcgttttaaccaacaattagatctccttcgcattggccaagaccttgagttgtttgtcaagactatgccaggtttaagtgcttacgctgagaatccacaaga

SEQ ID NO: 48338 - DNA, 262 bp, Glycine max
  unsure (1)..(262): unsure at all n locations; Clone ID: 701135349H1
gtccctccttcctctgccttataattcttgtgacccttttngctggtagcattgaaagtgcaccagcaaacgtgaagccaagccattatgctgcacccttcaataggagtgtttttccttctggttttctatttggaataggctctgcagcttaccagatagaaggagcagcagctatagatggcagaggaccaagtatatgggacacctatactaaacagcaaccagggaagatntgggatcatagtgatggaagtctagc

SEQ ID NO: 48339 - DNA, 259 bp, Glycine max
  unsure (1)..(259): unsure at all n locations; Clone ID: 701135351H1
agatctgtcttccgaagcaggaatcanatatggctgacttgttggaatggtcaaagcaagataagaaacgaatgcttcatgtcgtctaccgtgttggtgaccttgatcgcaccatcaaattttacacagaatgtttaggaatgaagcttttgaggcaaagagatatcccagaggagaaatatgctaatgcttttctnggatttggccctgaagaatcccattttgttgttgaattaacatataattatggggttacctc

SEQ ID NO: 48340 - DNA, 257 bp, Glycine max
  Clone ID: 701135352H1
gttcgtttatcctttttaatagggcattttaggtgtaatgagcttgcggggaaaagcagtgtagagacggttcacttgtcctcatgaggagatcattatcttggtattcctaataaaaatgtattttgcatctgggacaggcacccttttttgaccaacaactcgcaggatgtggtggctgcacaagatgattctgcaaaaaccctttccgaagagcttgcagacattgaatcccagctcaagttctttgagacccc

SEQ ID NO: 48341 - DNA, 258 bp, Glycine max
  unsure (1)..(258): unsure at all n locations; Clone ID: 701135354H1
gggttgtcctccttgagcttgtaactggaaggaaacccgttgatcaaactacagcctttgggagatgagagtttggttgagtgggctcgtccacttctccttcgtgcaattgagacacgtgattttagtgatctaatagatccaagactcaaaaaacactttgtggagaatgaaatgctcagaatggttgangtggccgccgcttgtgttcgccactcagctcctagacggcctcgtatggttcaggtggtaagatcc

SEQ ID NO: 48342 - DNA, 239 bp, Glycine max
  Clone ID: 701135355H1
gggagtggctatggaggagatgttgtttatggatatcaaaggcatcatccaatgcaagcacaatacaaacagattgattatactgatggatcgtggtgacaaatcaaaaccatttgttctaagatgtaataaaaaatgttgaagatgtaaagcttgtctgtgttgtaataaaatgtaagtatgtaacatttgaatttgaagatgtgcaatgaagaaaatttcttgcttggttttctgcc

SEQ ID NO: 48343 - DNA, 263 bp, Glycine max
  Clone ID: 701135356H1
gtgggccaaaggcaattattttgccttggaagagccttgctgaagagaagcagcatattagtactagatgaagcaacagcctcagtggattctgcaactgatggggtgatacagaacatcataagccaagagttcaaagataggactgttgtcacaatagctcatagaatccacacagttattgatagcgatttggttttggttctcagtgatggaagagttgctgagtatgatgaaccatcaaagttacttgagagagaaga

SEQ ID NO: 48344 - DNA, 262 bp, Glycine max
  unsure (1)..(262): unsure at all n locations; Clone ID: 701135357H1
ggggtgatgagttggcagcagaactgtcaaatgctcttcaacactgtctctngggtggtaaaagtggagaaggtgctggaattgacctctcatcgcttattgttgtcgaaggaaaaatttgttgggatctttacatagatgggcttgttgttagttcagatggaaatttgttggatgctctaggcgctgccattaaggctgctttgagcaatacaggtattccaagagtcgaagttgctgctggaacgtcaaatgatgagca

SEQ ID NO: 48345 - DNA, 263 bp, Glycine max
  unsure (1)..(263): unsure at all n locations; Clone ID: 701135358H1
taattagtnacgcgcatgaatggatnaacgagattcccactgtccctgtctactatccagcgaaaccacagccaagggaacgggcttggcggaatcagcggggaaagaagatcctgttgagcttgactctagtccgactttgtgaaatgacttgaganntcncaggataagtgggagctggaaacagcgaaagtgaaataccactacttttaacgttattttactattccgtgaatcggaagcggggcatgcnccctcttttt

SEQ ID NO: 48346 - DNA, 266 bp, Glycine max
  unsure (1)..(266): unsure at all n locations; Clone ID: 701135361H1
cagggagantgactaacgcagcatcgaggatcttgggcggaaacggcgtcgtttatcgatccgtagcttcctctcttcggctccgctccggcatgggcctccccgtcggcaaacactacgttcccgacaaaccccttcccatgaatgaagaactcttgtgggacaatggcactgcatttccagaaccgtgcatagatcgtattgctgacactgtcggaaagtatgaagcattggcctggctatgtgggggattgagttttttcgcg

SEQ ID NO: 48347 - DNA, 112 bp, Glycine max
  unsure (1)..(112): unsure at all n locations; Clone ID: 701135362H1
ctggatggttgtgaaaggcgaaacaatagtgtttcctggtggaggaacccacttccataatggtgctgatanatacattgcttcaattgctaatatgcttaattttccacac

SEQ ID NO: 48348 - DNA, 261 bp, Glycine max
  Clone ID: 701135365H1
ccttatcgcaattctgtttctaattaacgtcttcttgcgtttgtgttcattatatatcttatttttctttattatttttgtatttttgctgaatctttccacgaatcgtatgagatcacggtgatgactccataaaattcaagctcaacagaccggaatgcagagctttctctctttcgggagattgccttgcgtgtcgataaccccgctgaactgagtgatctcttctgttttttgtttctgttttgtttttattattat

SEQ ID NO: 48349 - DNA, 257 bp, Glycine max
  unsure (1)..(257): unsure at all n locations; Clone ID: 701135366H1
gggaacaacaacaaatggcangaaccttatctccttccaacttggtgcatttatccctggatacccaatccagcctgtaattgtacgctatcctcatgtgcactttgaccaatcctggggtcatgtntctttgggaaagcttatgttcagaatgttcactcaatttcacaacttttttgaggtagaatatcttcctgtcatttatcccctggatgataaggaaactgctgtancttntcgggagaggactagccggg

SEQ ID NO: 48350 - DNA, 87 bp, Glycine max
  unsure (1)..(87): unsure at all n locations; Clone ID: 701135369H1
ggattagaatgncaatatcataataactcagtagctactcagttgtagttacaacctccttccacacaacatacgaannnntgnnna

SEQ ID NO: 48351 - DNA, 257 bp, Glycine max
  unsure (1)..(257): unsure at all n locations; Clone ID: 701135370H1
ccgaagcaaagcttatgcaaacgtaattctcacccttttctggttcacctttcccntcccaacaacacccatcntctccaatctcatatgcacacacagctacttgcagtttcaactaaacccctctatctctcccaataaactaaagaaaaaaagaaaactgtaagtaacagatccatttctctctccacctcactttcaaaaatctcgcttctcttcaattttcggccaatatccttcaaaaccctaatcctcta

SEQ ID NO: 48352 - DNA, 259 bp, Glycine max
  unsure (1)..(259): unsure at all n locations; Clone ID: 701135371H1
aaatgatgaagccatcgatgctcagatctctccactccgccgccacncgcggcgcctactcatctacttccgccgtgggtacgcctccgagccggtgccggagcgcaaggtagccgttctcggcgccgccggcgggatcgggcagcctctctcccttctcatgaagctcaatcccctcgtttcgagcctctccctttacgatatcgccggaactcccggcgtcgccgccgatatcagccacataaacaccagatctgag

SEQ ID NO: 48353 - DNA, 258 bp, Glycine max
  Clone ID: 701135372H1
gggtgttcctgctcttcccctgacatacgtggctcacgttctggcacttgttgccagcatcttggtcgtgctctgggtcctcaattttaggggtggcttggcttgggattctgataacaaggccctcatcttcaatcttcatccagttcttattgtcattggcttactagtccttgggggtgaagctattataagctacaaagcattacccctgaagaaggaagtgaagaaattgatacaccttgttttccatgccat

SEQ ID NO: 48354 - DNA, 261 bp, Glycine max
  Clone ID: 701135373H1
cgacattcattcatctatggctacccttattgctcccagcaaccactctccccaagaagacgctgaggctctcagaaaggcttttgaaggatgggggactgatgagaaaactgtcatagtaatattgggtcatagaactgtttatcagaggcagcaaatcagaagagtctatgaggaaattttccaggaggatcttgtgaaacgcctagagtctgagatcaaaggagactttgagaaagccgtgtaccgatggatactaga

SEQ ID NO: 48355 - DNA, 262 bp, Glycine max
  Clone ID: 701135374H1
gaatatcaacaaggtaaagtagattccttactagacatggcgttgaaggacacattctacatatctacatggatcaccaactttgtccatagatgaatccattcaggccaggaagttccttcagtcatggaagaaggacgtgtttcctcaaagaccctcttcaattcttgtcatctctggtcattgggaaaccgcagttcccacggtcaacgtcgttgactccatcaacgacaccatctacgatttctatggcttccccaaa

SEQ ID NO: 48356 - DNA, 261 bp, Glycine max
  Clone ID: 701135375H1
ggaagaaggagagggcgctcgccggcggcggcgagggttccgagactgcgacgacgagggaggcggcgttgcaagagcgggatttggccgcgaaggaggtggacaggctgaggaaagtcgtgaggaggcagaagaaggatttgagagcgaggatgctcgaggtttccagagaggaggctgagaggaagagaatgctcgatgaacgagccaattacaggcataagcaagtgatgttggaggcctatgatcgacaatgtgatg

SEQ ID NO: 48357 - DNA, 266 bp, Glycine max
  unsure (1)..(266): unsure at all n locations; Clone ID: 701135376H1
ccgcngacntcacnaaccccttttagctcagcctctcagtctcagccaccgcacgccgccntctccggcagccactnncccgtnntcacttgtaatttgtcaactcagcataanangngtgggttaggnttngcaaccattggaagttccaanaatggnaggcangcannatagttngagatctatggaggaaaaatcaanacttgagntctggattgcactcctctcatgcttttcagtcttccagtgcctgtttttctggntct

SEQ ID NO: 48358 - DNA, 263 bp, Glycine max
  Clone ID: 701135377H1
gcaatatgtcttcctcaacgagtcagtcctgcgacgttgagcttaattcttgattattgtcattttcatcaagtaccaggtcgctcaaacaaggaacgaaagtcttatgatgagaaattcattaggatggacacaaagcggctatgtgagttgacatctgctgcagacagccttcagttaaagccattggttgatcttacaagtcgtgcacttgctcggataattgaaggaaaatctccagaggagatacgcgagatatttca

SEQ ID NO: 48359 - DNA, 266 bp, Glycine max
  Clone ID: 701135378H1
ctttctctctgttttctggtaattcatcaattgattcaaaatgcagagtctcaaactgcaactagtgctattcctctcaatctcaacttctcacgctgttttctccttcacagatgggttgttgccaaatgggaacttcgagcagggcccaaagccatcacaattgaaagggtccgtagtgactggccacgatgccattccgaattggacgatttcggggttcgttgaatacataaaatcaggacaaaaacagggtgacatgttac

SEQ ID NO: 48360 - DNA, 265 bp, Glycine max
  unsure (1)..(265): unsure at all n locations; Clone ID: 701135379H1
atttcaaagtttatacnaggnactgttgctgatggtgcaccagtagtacctatttcagcacagttgaagtataatattgatgttgtgtgcgaatatattgtgaagaagatcccaatccctgaaaggnactttgtttctccacctaacatgattgtnattcggtcatttgatgtcaataaacctggttatgaggttgatgaaattaaaggaggtgtagctggtggaagcattctgaggggtgttttgaaggtcaatcaattcattg

SEQ ID NO: 48361 - DNA, 267 bp, Glycine max
  Clone ID: 701135380H1
tttgcgctaacaacaactaacgtgcaagttccaaggcggagaaaacaataatggccaccaacgaggagagggatatggagaacaagaagagtgaggaagaactgaagcatctcgggtttgtgaagattgcggcaatgaaagccttagtgtgtgtgtcgaatctctacggcttcgcaaagcaaaactcgggacttttgagatctgctgttggaaccgtggaagacactgtaaccaccgttctgggtcccgtctaccacaaattcaacg

SEQ ID NO: 48362 - DNA, 262 bp, Glycine max
  unsure (1)..(262): unsure at all n locations; Clone ID: 701135381H1
agnccctaacggttttgttggagtganntcaagganacagagaaaaaatggcatcctgcaagagcttgtaccaaacccatcatcttcctctctgccttcaccaagtcaaagttctctcatcaatatcatgtctccttcatcaacaccacctcccacatacccatctacccaaagctctctcagcaacgttccttggtggtcaacaacgtattgaaaacagttgagccgacagaangctctttgcggagtccaactccgagga

SEQ ID NO: 48363 - DNA, 259 bp, Glycine max
  unsure (1)..(259): unsure at all n locations; Clone ID: 701135382H1
agagcttgtgaaagcaaggcttgcngaantggatccagncaactccgntganccacgnacngctctcaaatgtttatgccgtngcagggaaatggaaggatgnttccagcataagaagaacgatgactgaacatagcangaaaaaaactcctggttggagcatgattgaaattgacaaggtcatttatggttttgttgctggtgaaaagcctaatgaggttacggaggaggctcatgaaaaactgagggaaatnatgtt

SEQ ID NO: 48364 - DNA, 256 bp, Glycine max
  unsure (1)..(256): unsure at all n locations; Clone ID: 701135383H1
ggaaggttgcgacgagtgatgatatacatattgtggcggtagtgaaatcgaggaaaaagaggtagcaatcgtgagttgcaatgagtagcgaaaagtctccttcatcagcttctgcttcagcttcttcttcgagtagctacgagttgagcaaaggcatcaatggcctcgacaaggttattcttcgcgacccacgtggtagctccgctgaggtgtacttgtacggtgctcacgtgacttcatggaagantgaacaggc

SEQ ID NO: 48365 - DNA, 255 bp, Glycine max
  unsure (1)..(255): unsure at all n locations; Clone ID: 701135385H1
ggaccgtnttccgatcctctttctcctcgccaccctcatcaccctcgcctccggtgcccgccacgatattctccggttaccctccgaagcatccacttttttcaaagcacccggtggcgatcaaaacgatgagggcacgaggtgggcnntttaattgccggttccaatggctactgganttacaggcaccagtctgatgtttgccatgcgtatcaactactgaggaaaggtggtctcaaagaagaaaatattgtt

SEQ ID NO: 48366 - DNA, 260 bp, Glycine max
  unsure (1)..(260): unsure at all n locations; Clone ID: 701135387H1
ggaagaattggccgtttggtggccagggnggctctgcagagagacgatgttgaactcgttgccgttaacgatacctttacattaccaccgattacatgacatacatgtttnaatacgacagtgttcacgggcactggaagcatcacgatgtcaccgttaaggatgagaagacccttctcttcggtgacaagccagtcactgtttttggacacaggaaccctgaagagatcccatggaagtcgactggagctgacatcatt

SEQ ID NO: 48367 - DNA, 262 bp, Glycine max
  unsure (1)..(262): unsure at all n locations; Clone ID: 701135388H1
ctttctttctggcttcagtttttgcagtgaaaatggcggtgacttncnacatcaaccctctttatggctttgctatttgctgcttcagcttttgctgctcttcagcctagagtacctgaagcttaccttcaaaatggaaactttgaggagcagccaaaccccaaaaacctccagaaaacaaagctcatggggaaatattctttgcccaaatgggaagtcaatggtctggttgagtatgtctctgggggtccccaacctggag

SEQ ID NO: 48368 - DNA, 261 bp, Glycine max
  Clone ID: 701135389H1
cctaaacagagggtaacaaaacaagcaaacaccatggtgattaagtctgtgttgttcagcttcattttccccccgccaccttctctggtggtttgggggttgactgtgacaagcttcctgatactggctaatgctttcttgtcagaaattagagggaagcatttgaactattcaaagttttggaatgctaatccctctgcagaaaagcaggtcaagttgtctagcaaagctggcatgcttttgctgtacactcctgctttt

SEQ ID NO: 48369 - DNA, 190 bp, Glycine max
  unsure (1)..(190): unsure at all n locations; Clone ID: 701135390H1
gagcttgtttaagcttttcttccattaacatattatcatcaatgtgtggtattcttgctgttcttggttgttctgatgactctcganccaaaagggtccgcgtgcttgagctctctcgcagattgaagcaccgtggccctgactggagtgggctccatcaacatggtgactgctttttggcacatcaacg

SEQ ID NO: 48370 - DNA, 264 bp, Glycine max
  unsure (1)..(264): unsure at all n locations; Clone ID: 701135392H1
ccaatcttcaccttcgcccacaacaaatcccattcctgcatctcctccttcagcatcgctgcaaactttactttccatttttgtccttcctccccgagaaaaaaatggcgaacgcagcatctggtatggccgtccatgatgactgcaagctaaagtttttggagctcaaggcgaagaggacgtaccggtttatcgtttttaagattgaggagaagcagaagcaagttattgtggagaagctgggtgancctgcaaatggttatg

SEQ ID NO: 48371 - DNA, 223 bp, Glycine max
  unsure (1)..(223): unsure at all n locations; Clone ID: 701135393H1
caccatgtcacttgctggganaatcaccactgaaatcggggttcatgcaaccgctacaaagtggttcaacctcttcgcaacacaactccatcatgttcaaaacctaactgatagagtgcatggaatcaagctgcatcaaggtgaagactggcatcacaacgagacagtcaagcactggacttataccatagatggtaaggttacaacatgtctggagagtatt

SEQ ID NO: 48372 - DNA, 266 bp, Glycine max
  unsure (1)..(266): unsure at all n locations; Clone ID: 701135394H1
gcagccgccacactccctttctgaacgagatctcagatctctggttgatgcttcaaagaaccctaatctcatggctattgtttcctgcacttccatcattgcttccannnnnnnnnnnnnnnnnnnnnnnnnnnnnnnnnnnnnnnnnnnnnnnnnnnnnnnnnnnnnnnnnnnnnnnnactcgctatgccatgcttcttgctatgatatgtttctttctttttctttttatgcgacctctggggtccttcactcgctctcttatc

SEQ ID NO: 48373 - DNA, 266 bp, Glycine max
  Clone ID: 701135395H1
gttttcttcatcttccaccttcacctggtttacttccttcgataattaactttatcaaaatcaaactttgatgttcttgcttgtcttaattacttctctgtcgtttgacgaatagtattacactattgtctgggaattttgttcctttcctcttttctgaattccgtttctctgaaaagaagtttatcataaacacgttggaatggcaaggaactacttcaaacaagaacatgatcttgagaagagaagagctgaggctgctagga

SEQ ID NO: 48374 - DNA, 268 bp, Glycine max
  Clone ID: 701135396H1
gggatgtttggtgctgagatgtcctgatccctcttgtggtgctgctgttggtcaagatatgattaaccttttagcatctgatgaagataaagagaagtatgaccgttaccttctcagatcttatattgaagacaacaagaagaccaagtggtgtcctgctccaggttgtgaatatgcagttacttttgatgctggcagtggaaattatgatgtatcttgcctctgttcatatagcttttgctggaattgcacagaggaggctcaccgt

SEQ ID NO: 48375 - DNA, 242 bp, Glycine max
  Clone ID: 701135401H1
ttctttgttgctgcagtagttttggtagcatggccatgccatggcgcaggctaccaaaggttccctctccgaatgaaaactggctatggtgagcgttcttcggaggtaaaatgcgcaagttttaggcttgctgtggaagcacacaacatccgagcctttaaaaccattcctgaagagtgcgttgaaccaacaaaggactacattaatggcgaacaatttagatcagactctaaaacagttaa

SEQ ID NO: 48376 - DNA, 241 bp, Glycine max
  Clone ID: 701135402H1
caaatcttgaaacgcagtaaagaacaataataaatcttaccgaggaaagtggactgatcatgttacaacatgctggaacaagtcgtttctttttcaataaaattaaaataaagccaacgacaacaggtgtgcatatcagcaaaacataaaaggactttcaatactaattacactatgtttggggaaggtgagataggggagggggcgaagatgaattaattcattttagtttcgtgaaggt

SEQ ID NO: 48377 - DNA, 239 bp, Glycine max
  Clone ID: 701135403H1
aaaacttgctatagcagtaagctataactcatttgaggctctgtgagaattgagaaatggctaaagatgttgaggttcaagagcaaggaggagagtactctgccaaagactaccatgaccctcctccagcacctttgttcgacccagaggagctcacacagtggtccttctatagagccctcatcgctgagttcatagcaacccttctcttcctttatgtcactgtgctcaccattatt

SEQ ID NO: 48378 - DNA, 236 bp, Glycine max
  Clone ID: 701135404H1
ggagatcatcatcttcacttcaattcagtttactcatcgtgtgatttcatccaaagttagcaacatgagcttcttgaggccttctgcgttgtacaactttctgatcagttatcctgcgctgcgatggctgccatgtcagagttggggcttccttcgatggcccggccttgatgggttcttcaggcttttcgtggttgtgcttctgtggtctacactatccgagcttcgcttcatac

SEQ ID NO: 48379 - DNA, 238 bp, Glycine max
  Clone ID: 701135405H1
attcagtgaagatcaacctcaatggcatctcttggcgtgcgaccagttcttccccctccattaacttccatctccgacccacctcctcttttcgatggcaccaccaggttgtacatcagttattcttgcccctatgcacaacgtgtgtggatcgctaggaactacaaggggctacaagataagatcaatttggtccctattaaccttcaagacaggccagcttggtataaggagaaag

SEQ ID NO: 48380 - DNA, 184 bp, Glycine max
  unsure (1)..(184): unsure at all n locations; Clone ID: 701135406H1
tttcatcacagcacaacacantaagagagtgaaattggaaaaatgccaatgctgaaaggactctctctctctctgatttgttcttcgttcgatggcgtgtgaggaagtggctcattcgaggcctctgttcctcacgatctacactagcngtcatcgttggcatcgtcttttccncactctangt

SEQ ID NO: 48381 - DNA, 240 bp, Glycine max
  Clone ID: 701135407H1
gcctgcacttgttccacccttcaacataccccctcctcctcttccccaattctcttatccgtaatctggcactcttcagagaagactttgtaagataaaaagagaaatggccttagaccagtattttgatgaggctgtgccccagttggattccttggaagataaatcgtctctcgaaacatggaaatgtggcagtgacgatattgcagattcggatagaaatgcctctggtggctttga

SEQ ID NO: 48382 - DNA, 239 bp, Glycine max
  Clone ID: 701135408H1
tgaaggtaccacgacttaagtcactgactgcaaatttgcatcgcatgggtgtatctaacactgtagtgtgtaactatgatggaaaggagcttccaaaggttttaggtgtaaatgctgttgatagagtattattggatgccccttgcagtggaactggggttatttccaaagatgagtctgttaaaacctctaaaagtctggaagatatacagaaatgtgcgcatctacagaaggagctc

SEQ ID NO: 48383 - DNA, 240 bp, Glycine max
  Clone ID: 701135409H1
gaaaatactttttcgctgaagctctgaataacagaccatcatcgacagatggggtctgaaggtcctccagcagctgtggcaacagttcatgtaacaggtttcaggaaattccatggagtttctgagaatccaacggagacaattgtcaataatttgaatgaatatttgaacaagaagaagggtttgccaaaaggcttagttattgggagttgcagcattcttgagactgcaggtcaagga

SEQ ID NO: 48384 - DNA, 239 bp, Glycine max
  unsure (1)..(239): unsure at all n locations; Clone ID: 701135410H1
ggggactaaagaagcatttgaaaaggctcaatgctcctaagcattggatgcttgacaaactgggtggtgcatttgcgcctaaaccctcatctggaccacacaaatcgagggantgcctccccctcattcttattctgcgaaaccggctgaagtatgctctgacataccgtgaagtcattgctattctgatgcagcgccatgttcttgttgatggcnaagtcaggactgacaagacttac

SEQ ID NO: 48385 - DNA, 238 bp, Glycine max
  unsure (1)..(238): unsure at all n locations; Clone ID: 701135412H1
cactctcgcgctctctctttcacaaccttcactttactctctctgctaaaatgcaaggnggatttcaatcatttttgtcacacgggaatgtcattagaaatgctgttctacaacgggtgcgcatggtgaaccccctgttacagccaattgtctcttcgcggtttgaatctgttacacctgctcgcattgaggagcatggttttnagagcaccacaatttcagacatcttgaatgataa

SEQ ID NO: 48386 - DNA, 209 bp, Glycine max
  unsure (1)..(209): unsure at all n locations; Clone ID: 701135413H1
gggaggaanctcggaaacgtgaagatgctgaaaggaaaaagaaggaagaggaggagcgcctgcgtaaattggaggagatagctgaaaagcagaggcagagagagagggagcttgaagagaaagagaaacaaaggagagaagcattgttgggtagagctgctgctgaaccagctcctcctgcccgtccattggaatcgggatctgctgct

SEQ ID NO: 48387 - DNA, 241 bp, Glycine max
  unsure (1)..(241): unsure at all n locations; Clone ID: 701135414H1
ggggaaatttcaatggcgtcaagggtttctctgaaggcgaagggtaagagttcaaagggatcgaaggccgcggaagatncgatctgcgagcgagtgcctgaaggagtggacgacatgggcaatgcgaaaagcgaaggtcatcactcactatggtttcatccctttggtcatcatcatcggtatgaactnctgaccccaagcccccactttcccagcttctcagccccgtctgatctacctc

SEQ ID NO: 48388 - DNA, 242 bp, Glycine max
  unsure (1)..(242): unsure at all n locations; Clone ID: 701135416H1
gctagcatagcatttntcttttacaaagcaagacacccttttccttttcattccatcatctctttagctttgtccaaagaccatgtctgtggtggctgataattctgcaaacaatggaagccaccaagtggttttaaatgtaaacggtgatgcccccaagaagtgtgatgactcagccaaccaagactgtgtacctcttctgcagaagttggtagcagaggtggtggggacgtacttcttga

SEQ ID NO: 48389 - DNA, 240 bp, Glycine max
  unsure (1)..(240): unsure at all n locations; Clone ID: 701135417H1
gcgatgcaacccacatccggcggcggcgggctggcaaggttccgttcagctccggcgagctggttagaatcagttctgttgannnnnnnnnnnnnnnnnnnnnnccccttaagcttcactcaactgctttccactatcgatgatgctccctctcattctcaacaccaactctatggtgccgctctctcaaacaaggataaaacacctgaaatcttcatgttagaagattccgttccttgc

SEQ ID NO: 48390 - DNA, 215 bp, Glycine max
  unsure (1)..(215): unsure at all n locations; Clone ID: 701135418H1
tggaagttctttggtaatttaaacggatgctggattatgancagtctgtggtgaagaaanttttgggactggttctgaccatattcgtgagaaagatggaatctgggcagttttggcctggctatctatacttgcatataaaaataaagataaacttgaagacaagcttgtcactgttgaagacatagttcgccagcattgggctacttatgggc

SEQ ID NO: 48391 - DNA, 236 bp, Glycine max
  Clone ID: 701135419H1
atttgtttgatatggataaacttgaattctgcatttggtgggaatgatgatacaggatttgacatgaataaatatgcagaaagaatgaaagaggatgaaaataagattctttctttctggacacaggccaagtctgtgtcttaaataaagctccttttccttagattcaatcagggaagatgcaaactctgatgcttcttacaatacatcttggtttctcaaagggggagaaatta

SEQ ID NO: 48392 - DNA, 236 bp, Glycine max
  Clone ID: 701135420H1
caacaacacactcacacactcaccagtcaccaccgacatcatgtccgattcgaaggtcgaaaccatcgccagattagcccaatggaaaatcgacaacttcggaccctgctccttcaagagatcagatcctttcaagctcggaatttggaactggttcatgtccatagagaggaacaggtacctctacatacacatctttccagagccttctcggctttctaaggaacagccacccg

SEQ ID NO: 48393 - DNA, 236 bp, Glycine max
  unsure (1)..(236): unsure at all n locations; Clone ID: 701135421H1
acgcagcatcgctatactcttcattccatggctttgcccaatcagcaaaccgtggattaccctagtttcaaactcgttatcgtcggtgatggtggcacaggaaanacaacctttgtgaaaaggcatctcaccggagaattcgagaagaaatatgagccaaccatcggtgtggaggttcacccattggattttttcacaaactgtggaaagattcgattctactgctgggatactgc

SEQ ID NO: 48394 - DNA, 236 bp, Glycine max
  unsure (1)..(236): unsure at all n locations; Clone ID: 701135422H1
ggagaatatgaagttgtttgtnttctttgttgctgcagtagttttggtagcatggccatgccatggcgcaggctaccaaaggttccctctccgaatganaactggctatggtgagcgttcttcggaggtaaaatgcgcaagttttaggcttgctgtggaagcacacaacatccgagcccttaaaaccattcctgaagagtgcgttgaaccaacaaaggactacattaatggcgaac

SEQ ID NO: 48395 - DNA, 236 bp, Glycine max
  Clone ID: 701135423H1
ggcacgggatgcaattggggtcacttccttgtacattggttggggtttagatggctctgtctggatttcctctgaattgaaggggttgaatgatgattgcgaacattttgagtcttttccacctggtcacttgtattctagcaaagagagagcgttccgcagatggtacaatcctccatggttctctgaggctattccatctgccccttatgatcctcttgctttgaggcatgcct

SEQ ID NO: 48396 - DNA, 223 bp, Glycine max
  unsure (1)..(223): unsure at all n locations; Clone ID: 701135424H1
tgcacctcagcacagtttcccatcgaaaactagcccatctttntccctcgtacncttttgcttcagcaacaacaacatcgtcgtcacnnnnnnnnnnnnnnnnnnnnnnnnnnnnnnnnncggttgaattgaagatgaaaatcactgtcatgactgctgatgaacaaatcatcacgttagatgtggatccccacgaatctgtggaaaacgtcaaaggcattgc

SEQ ID NO: 48397 - DNA, 237 bp, Glycine max
  Clone ID: 701135425H1
gaacactccaattctccacctccacaacatacccttttgagttttgattctctctcctcacatagctaggtggtattgaatattgggagggtcaaagtttgtgaaggaacttgaagaagtaaatgcatggatcgaggggaccaaatgacatttcctggctctgcatcttactatatgcagagaggaatacctggtgctggaaatcaacctgaactgcacaattcacctaatattcga

SEQ ID NO: 48398 - DNA, 238 bp, Glycine max
  Clone ID: 701135426H1
ctcagccatattctatctccacgccgctaactctctctcacactcagtctctgtgtctctctgctctttcacacccttcactttactctctctctctgacagctaaaatgcaaggaggaatgagatcatttttgtcacatgggaatgtcattagaaatgctgttctacaacgcgtgcgcatggtgaaccccctgctacagacaattgcctcttcgcggtttgaatctgttacgcctgc

SEQ ID NO: 48399 - DNA, 236 bp, Glycine max
  unsure (1)..(236): unsure at all n locations; Clone ID: 701135427H1
gttttgttcttccttgcgctcctcctcgttcgttcgttctccctcgcgtagatcggcaatggcggagaccgagacgtttgctttccaggcngagatcaaccagctcctcagtctcatcatcaacaccttctactccaacaaggaatgaannnttcgtgaactcatcancaacgcctctgatnctttggacaagattagatttnagagtttgacggacaagagcaagctcgatgctc

SEQ ID NO: 48400 - DNA, 201 bp, Glycine max
  unsure (1)..(201): unsure at all n locations; Clone ID: 701135428H1
ggacgcatcacagcacctcgtctaattgcggcaattcagaagaaagaaaaagaaaagagagagacagagacatttgcgccttctttcttgcaatcgcgtntgaataaaaacaaaagaaattcctcttcttattctccctcgcgcgattcatttcattttctctttggaataacctgcagggttgcttccacacaacatacg

SEQ ID NO: 48401 - DNA, 237 bp, Glycine max
  unsure (1)..(237): unsure at all n locations; Clone ID: 701135430H1
ccgcgacgttgtgagaagtccactgaaccttancatttagaggaagtagctgtcaagaggctttcaagaaagtctagccaaggtttagaggagttcaagaatgaaatggtgctcatagccaaactgcaacatagaaatctggttagactattggggtgttgcattcaaggggaagaaaagatactggtatatgagtacttgccaaacaaaagcttggactgcttttnatttgatccg

SEQ ID NO: 48402 - DNA, 243 bp, Glycine max
  unsure (1)..(243): unsure at all n locations; Clone ID: 701135432H1
ggaagttctcaaatgctaaatctatttcttcatctcaattttttggagatcagaacaaagctgcagatgtggattctcaagctactttgtctaagttttcgggttcaagtgccatctccagcgctgatcnttttggtgactcaagagacaacaacatcgatccttacggctggtganctcaatcaattnaataatctttcnagnacnacnnggnntcttcctncntnaanaattncangaggg

SEQ ID NO: 48403 - DNA, 174 bp, Glycine max
  unsure (1)..(174): unsure at all n locations; Clone ID: 701135435H1
gtgttgtgcaagtactaccttctctagctagattgctagagctagaatttcaacctacctatgtgtactgataagatctgcttccctacttaaagagagcatcatcctgtgatcagtgtncttcgtattctctctctctatatatatatggtaaaaagtggttatctcgtgcct

SEQ ID NO: 48404 - DNA, 234 bp, Glycine max
  unsure (1)..(234): unsure at all n locations; Clone ID: 701135438H1
agaggccgtgcatgaccgcatttgcgcccaggaacaaaagatgagtttttcattctcaagcgcaaataacaactaagaagtcctttcttctttgtttttttgtttttctttttcttttaccttaatatgaaaaaaatccaaaataggatgttctaaagtatgatatttttttatcttttgtaggatccggatggttacaggatatagactctcatatangttaattatctttat

SEQ ID NO: 48405 - DNA, 237 bp, Glycine max
  unsure (1)..(237): unsure at all n locations; Clone ID: 701135439H1
caagacctngttgncacaatcancgaaacnaacnngagtganagaataatccagtctgcaatttgtgactccatcatggagattgaggaatcaacacccataaaaaattccttagaattgaaggatgaagagaagagcaagtncaacaaggtcaatanccagttgagcagaagcttgggtggcctctactccgcagagccaattcaggaatgtcacaaaccctgcntcatacaaggg

SEQ ID NO: 48406 - DNA, 197 bp, Glycine max
  unsure (1)..(197): unsure at all n locations; Clone ID: 701135441H1
aagccaagcacaacaatggcactcaaaagggcatcgtggttgctgctgctgccactgttatnnnnnnnnnnnnnnnnnnncaccaacaccaacagtgtgtaccatccttgttctgatgccaggattcagagatctgatggcttcacttttggcattgccttcagttccagggactctttcttctacaaccagaacca

SEQ ID NO: 48407 - DNA, 106 bp, Glycine max
  unsure (1)..(106): unsure at all n locations; Clone ID: 701135443H1
cttcaattcanaacanncactctctnnggtgtnggtgttgttnagggatctaaggcaaaggtgttgatgntatgggagcgtgtgtntcaactccacaagggtnngt

SEQ ID NO: 48408 - DNA, 235 bp, Glycine max
  Clone ID: 701135444H1
gttcttactaactcactcactcacaactcagtgaaagagaatccgaggcgaagagaagagaaaaattaagatggaggggaaggagcaggatgtgtcgctgggagcgaacaagttcccggagagacagccgattgggacggcggcgcagagccaagacgacggcaaggactaccaggagccggcgccggcgccactggttgacccgacggagtttacgtcatggtccttttacaga

SEQ ID NO: 48409 - DNA, 233 bp, Glycine max
  unsure (1)..(233): unsure at all n locations; Clone ID: 701135445H1
caggttcctattgatgcagtgttccagaaggatgagatgattgacatcattggtgtgaccaagggtaaaggttatgagggtgttntcactcgttggggtgttacccgccttccccgtaagactcacagaggtttgaggaaggttgcttgtattggtgcctggcatcctgcaagagtttcattcactgttgccagggctggtcagaatggataccaccaccgaactgagttgaa

SEQ ID NO: 48410 - DNA, 237 bp, Glycine max
  unsure (1)..(237): unsure at all n locations; Clone ID: 701135446H1
gcaccacattcacctgagctntttgtgangattccaaagcatggcttcccttgcagcatccactgctgctgcttncnttggcatgtcagaaatgcntgganaccccatcaanctcagtggtgccacaaggccagctccatctgcctcncagcccngcctncttcaagactgtgggcgttttctccaaaaagaaggctgcacctccaaaaaaagctgcagctgnctgctcctgccaat

SEQ ID NO: 48411 - DNA, 234 bp, Glycine max
  unsure (1)..(234): unsure at all n locations; Clone ID: 701135447H1
tttcctccttggagtaattggtgagtgaggcagacttacagcgcantttgtggatataaaggacttaaatacacttcgcccactcttgcttctgctcttagcaaccttataccggctttcacctcatactagcacncattttcagaatggaaaaggtagctttgagaagcccaagcactatggccaaaatcttgggttcgttagtatccatatcaggtgcactcatagttgttc

SEQ ID NO: 48412 - DNA, 238 bp, Glycine max
  Clone ID: 701135448H1
atgaagagccctaccattttcattctctttctactttctgccttctacacctcactcctaccttcagccaccgctcaagtcgtggttgacatggaaggtaatgatcttcaaaatggtgggaaatattatgtgttgccagtaatagagtcatcatatggtggaataagagtagccgcaactggaaaagaaagatgccctctcactgttgtacaatctgccgatccgtatgataagggga

SEQ ID NO: 48413 - DNA, 224 bp, Glycine max
  unsure (1)..(224): unsure at all n locations; Clone ID: 701135449H1
aggtcataacaggtgctcgagtttctaatgatgaaatcttaggatttgccaaattatttaatgatgagctcaccctngataacattagcaggcctcgcttggtaaatatgtgtaaatatatgggcatcagcccatatggaactgatgcatatttgcgttacatgctccgcaaaagattacaggagatcaagaatgatgataaactgattcaagttgagggtgtc

SEQ ID NO: 48414 - DNA, 231 bp, Glycine max
  Clone ID: 701135450H1
gcgacagtcacttctccgacaacaacacttccgcggcgaaaaatgtctctggtggcgaacgaggatttccagcacattctgcgtgtgctgaacaccaacgtggatgggaagcagaagataatgttcgctatgacctccatcaagggtattggaaggagattcgccaacatcgcttgcaagaaggccgatgttgacatgaacaaaagggctggtgagttgagtgctgcagag

SEQ ID NO: 48415 - DNA, 229 bp, Glycine max
  unsure (1)..(229): unsure at all n locations; Clone ID: 701135451H1
tgaattgcngcttngactgcctggaaanngaggcactgaagaagtgatcatcatgaagangggtttctctganactganacnngtcatgaagatgagtctgccaccactgtggatttgatgcttaatcnttcttctaangaggccgnaaccannnnnnnnnnnnnnnnnnnnnnnnnngataagcacaagactttgcctaaggagaagacccttctgccagcagatcct

SEQ ID NO: 48416 - DNA, 232 bp, Glycine max
  unsure (1)..(232): unsure at all n locations; Clone ID: 701135453H1
agagcatnnccaatacgccaagaatgacttttttattacaggagaatcatatgctggacactatattcctgcctttgcaactcgtatccatcgaggaaacaaagctaaagaaggaattcatataaacctgaagggattggccattggtaatggacttactaaccctgcaattcagnataaagcttaccctgattatgcactggaaatgggcataattaagaaggctacacgt

SEQ ID NO: 48417 - DNA, 233 bp, Glycine max
  Clone ID: 701135456H1
ctgaaattctcagttatgtcgtggcaagcgtatgtggatgatcacctactgtgtgaaatcgaaggtaaccacctcactcacgccgctatcatcggccaagacggaagcgtttgggctcagagcaccaacttccctcagttcaaacctgaggaaataactgccatcaataatgactttaatgagcctggatcacttgctccaactggattgtatatcggtggcaccaaatacat

SEQ ID NO: 48418 - DNA, 232 bp, Glycine max
  Clone ID: 701135457H1
gaccgaaacaacacaccagaaggtcgctggtcattcacagattttgggaacttatttttgaaatggaagacaatggaattaagcagcagtcaagtgcttcagcagcaggggtttatgaattacctggagaacctgctattgtaattaatggggtgcctgacataatccctggtggctgcaccattgctcccggtaatgcttcaagcaaggttgaaatgcatgcgccttcagg

SEQ ID NO: 48419 - DNA, 232 bp, Glycine max
  Clone ID: 701135458H1
gaccctttgttgcgctcttccctctcaaccacttcacttttccaatcatcgtattctatcatcaccagcgtttggaacccacgctccattaacaaaccaaattcatagatttcggttcggaaacccctcaaaatgtttaaaatgggtgattaaagagacttcacttttgggattgagcgaatccaagaagcttctagtacatgcttctgattccaatttaaatggtggcttg

SEQ ID NO: 48420 - DNA, 232 bp, Glycine max
  Clone ID: 701135462H1
gaacaagcctcaggtaagccaaaaccatggttaagcataacaatgttatcccaaacggacacttccgtaagcactggcagaactatgtgaagacttggttcaatcagccagcacggaagacaaagagacgattggctcgtcagaagaaagctgtgaagatattccccagacctacggctggacctctcaggcccattgtacatggtcaaactttgaaatacaacatgaaagt

SEQ ID NO: 48421 - DNA, 233 bp, Glycine max
  Clone ID: 701135465H1
cttcccttcacatacataaaagcctcgttccatagcaaatatagccccaacaaaacaaacacaactttgcccccttgtaaaacttcttattgtgatgtctaaaagcgaagacttgaagcttttgggaggctggttcagcccatttgccctgagggtgcagattgcccttaacctcaagggtctagaatatgaggttgttgaagagaccttgaatcccaaaagtgacctgcttc

SEQ ID NO: 48422 - DNA, 94 bp, Glycine max
  Clone ID: 701135469H1
gccatttccgttattgatgaatgggaattacacagcaagcaccattccttggaggctcccttccgacgatccaagcatttccacacaacatacg

SEQ ID NO: 48423 - DNA, 229 bp, Glycine max
  unsure (1)..(229): unsure at all n locations; Clone ID: 701135471H1
atctttttctgctctttgaagaaagaagggtctttgcttgattntggagatggnnntgctctcagatctcatcaaccttgancntcnccgataccancgagaaggtgatcgnagagtacatatngatcggtggatcaggaatggacctgaggngcnaagnaaggactcncccaggacnagttagngnccctncagagcttnncaagtggaatatgatggttccagcana

SEQ ID NO: 48424 - DNA, 230 bp, Glycine max
  unsure (1)..(230): unsure at all n locations; Clone ID: 701135472H1
aataagtccctccttcctctgccttataattcntgtgacccttttngctggtagcattgaaagtgcaccagcaaacgtgaagccaagccattntgctgcacccttcaataggagtgtttttccttctggttttctatttggaataggctctgcagcttaccagatagaaggagcagcagctatagatggcagaggaccaagtatatgggacacctatactaaacagcaac

SEQ ID NO: 48425 - DNA, 229 bp, Glycine max
  unsure (1)..(229): unsure at all n locations; Clone ID: 701135474H1
ggggaagacattttgcagcaccagcaatcaagtggtatccattcagatgccaatacattaggtggttctcaagttgtcaaagaattcgaatcaggcacgagactatcattcccttttgacacgcaagcatgtgaacccaaagacaacagcaactcttcgcaaccatgcattggcggaagagatcattcaggagtgatcataagnnntagtgagaccaacattgttggta

SEQ ID NO: 48426 - DNA, 228 bp, Glycine max
  Clone ID: 701135475H1
atggaggttagatacactgatgttgactaccttgtcttttctgatgctgctgctttaatggctgtgggcgattccccttataagagaaccacttatcgctattctcctttgcttgcctttcttctcattccaaattcgttcatccatcgctcctggggaaagtttcttttctcggcttcagatctacttgtgggatatttcatctattatattttaaagctacggaag

SEQ ID NO: 48427 - DNA, 227 bp, Glycine max
  unsure (1)..(227): unsure at all n locations; Clone ID: 701135476H1
aaacacgaggcaatacatttctgtgctggttcctacaaggtaagttcttccggggtaagtgatttcgaaaggnttataaagttacatggtgcctctaaagctgtgttatttcgtagctgctacgagattgaaggagaatatctgaatgcatttcagaaactagttgagaagccgtgattccaattggtttattgcctgtagagagacaagttgttgatgggtgtagt

SEQ ID NO: 48428 - DNA, 228 bp, Glycine max
  Clone ID: 701135477H1
tcaggctttagctttacatgtgatttgagtgataacattgctgcgccctggccttcttcatcatcttcatttgcatctatgtcactctgtgcacctgagatgtcattacctgctctcccaacatcttctcagacactaaaaaataatggttgtaattctggtggagtgggattgcttctgcttattttttcatttttcatcttcagtacactgttgtattgaagatat

SEQ ID NO: 48429 - DNA, 231 bp, Glycine max
  unsure (1)..(231): unsure at all n locations; Clone ID: 701135479H1
gcacactattttcactgcagcagcaacaatggcggagaccgagatcgagaanataacgacaatagacccagagacggagtttctggcgtcgaagataaggaacgggaacgagtgggagaccttcaaggagancgtgaggccgctcaagagaggccgcaacgtcaacctcttgaaccacgccctcaactcccacaccgntaacnaannaagaaatccctcatggaacaacga

SEQ ID NO: 48430 - DNA, 232 bp, Glycine max
  unsure (1)..(232): unsure at all n locations; Clone ID: 701135480H1
tggcctcacaggtttgcnaagctgcttccagagccgcgaggtcccttctctccgcttccagagcctcccatggacgtgcggttggggctgctacggctgtttcattgagctgcaaagtgcctcttttctacggaaagaacggttctggaagtggtnnnnnnnnnnnnnnnnnnnnnnnnnggatttcaggagcacttgctcttcctgccgcagcttacatgttccaagatca

SEQ ID NO: 48431 - DNA, 229 bp, Glycine max
  Clone ID: 701135481H1
gttgattgagaggcaatcatttattcaacttcgcatttctctcgcatccactgaaccaagattcctattccaaaatgaccgctcctacttcttccagcctgtggctggctccaaaccccagcaaaagatggggcgaactcttcttccttctctacacccccttctggctcaccctttgtctcggcattgttattcccttcaatctttacgagaaattcacagagctgga

SEQ ID NO: 48432 - DNA, 225 bp, Glycine max
  Clone ID: 701135483H1
tttcttctcttaaggaaaaatggcatcctctcctttgaactcaaaatctggctcccatggtcgctcaaatagcttgccctctagaccacaccctctcattctcaaatgcaatgaacacttggaaagcttaagggcttccaatgaaacctcttcttccttatcaaatcttagacataaggtaggaggattgcaagatctgattgagtgtgttgaaaaattgattca

SEQ ID NO: 48433 - DNA, 226 bp, Glycine max
  unsure (1)..(226): unsure at all n locations; Clone ID: 701135484H1
catctaaccccaaacaaaaccctagcacacttttatcgcttagtggcagcagcagtggcggcaagcaactccatccgcaatgggaatcgatttgaaggcaggaggtaagtccaagangaccaagcnaaccgcccccaaatccgatgatatctacctcangcttctngtcaagctgtaccgttttcttgttcggaggactgggagtaacttcaatgctgttgtcctc

SEQ ID NO: 48434 - DNA, 226 bp, Glycine max
  unsure (1)..(226): unsure at all n locations; Clone ID: 701135485H1
atgccaagtatactaaatgtcttagtcttaagaggggggaaaaactggaattccaatgattcttaatttcttacaatccaatctgcaaactgagtgagntatatancttgtttttgatttcttcctcatcattttgcatanacaaagattaaaatggaagggttttttggaaattgcttcaatatgatnttnctgatgttgtgcttcaccaacttgagcatagctt

SEQ ID NO: 48435 - DNA, 226 bp, Glycine max
  unsure (1)..(226): unsure at all n locations; Clone ID: 701135486H1
tgggaaatctaccaccccagataatgaggcttataagcttgcaccatgtgcctcagcagcacaagatgagaatgctagtgtttctcagngttgctgtgctcaggtgaagaaaattgggcagaacccaagctgcctctgtgcagttctgctctccaacacagccaaaatggctggtgtcaaccctcaagttgctgtcaccatccccaagcgttgcaacctggctaat

SEQ ID NO: 48436 - DNA, 228 bp, Glycine max
  unsure (1)..(228): unsure at all n locations; Clone ID: 701135487H1
gttcctggctatagtagcactgctatctcacccttcaccttagattgggtgaacactcctggctatgatgggtttaaaggatgtggaaagagaccttcctcagtgagacccattgagcatgaaaggnagaaaggagtgccttggactgaagaggaacataaattgtttctattgggtctgaagaagtatgggaaaggcgattggagaaatatttctcgcaatttcgtg

SEQ ID NO: 48437 - DNA, 227 bp, Glycine max
  unsure (1)..(227): unsure at all n locations; Clone ID: 701135488H1
gtcctcaatacacttgaaatggatgaggagtatgaaggaaatgttgannctactggagaggattattccgtggaacctgctgagagcaggaggccattccgtgctctccttgatgttggtcttattaggactacaaccggtaaccgtgtgtttggtgcccttaagggagctctggatggggggttggatattcctcacagtgataagaggtttgctgggtttgataa

SEQ ID NO: 48438 - DNA, 228 bp, Glycine max
  unsure (1)..(228): unsure at all n locations; Clone ID: 701135489H1
ctactgcactctctctctcctcctctgtgctcttgctcttctgtcacccaccgctcttttaattccacatgaaaccgttgancgtttttcaactctcactaccttcataagggaacactccaattctccanctccacaacatacccttttgagttttgattctctctcctcacatagctaggtggtattgaatattgggagggtcaaagtttgtgaaggaacttgaag

SEQ ID NO: 48439 - DNA, 226 bp, Glycine max
  Clone ID: 701135490H1
ctctcccttagtcaaagggattcatcgttcttcttcccaggttatttagaaaagcaaaatggtgaagatttgctgcattggtgctggatatgtggggggtcctactatggcagtcattgcacttaagtgcccatccattgaagtcgctgttgttgatatctctaaatcccgcattgcagcctggaacagcgaccagcttcctatctatgaacctggccttgatggt

SEQ ID NO: 48440 - DNA, 227 bp, Glycine max
  unsure (1)..(227): unsure at all n locations; Clone ID: 701135493H1
ggaagaacaaccccatcttgccttctgatccttaccaaagagccttggctcgtttctggtccanattcattgatgataaggtttttggtgctgcatggaaatccgttttcacagctgatgagaaagagcgtgagaagaatgttgaggaagcaattgaggctctgcagtttcttgagaatgagataaaggacaagaagttctttggaggagaggagattgggttggta

SEQ ID NO: 48441 - DNA, 228 bp, Glycine max
  unsure (1)..(228): unsure at all n locations; Clone ID: 701135494H1
tgaaagtgcttgtnttgtttgttgctacagttttggtagcatatgaatgccatggctcagactaccagaagttccctctccaaatgaaaactgggtttggtgggcaatacagcaatgaggtggcatgtgccagttggaggcttggcgtggaagcaaacaacgtagtccaagtggcaaactgttcctgcagcttgcggagagtacatagctgactacgttctaggagac

SEQ ID NO: 48442 - DNA, 231 bp, Glycine max
  Clone ID: 701135495H1
gggaggtccaactggtgttgagcttgcagcagagattgctgttgattttcctgataagaaggtcaccatagtgcataaaggaacgaggttgcttgaatacattgggacaaaagcttcaagcaagactttaaagtggctcaaatcaaagaaaattgatgtgaaactagaacaatcggtcgatttgagctcctcttctgaagaaaataagacatatcaaacttcaaatggaga

SEQ ID NO: 48443 - DNA, 231 bp, Glycine max
  Clone ID: 701135496H1
gaaagacactcggagaccttgcaagacttcatcaatggctgtcaaagtttatattgtgtactactccatgtatgggcatgttgagaaactagcagaagaaataaagaaaggggcttcctctgtggaaggtgttgaggccaaattatggcaggtacctgagacgctgcaggatgaggtgctcggtaagatgagtgcaccacccaagagcgatgtaccagtcattaccccgaa

SEQ ID NO: 48444 - DNA, 278 bp, Glycine max
  Clone ID: 701135501H1
atcaaaatcaccaaggaccacatcaagggtcttgttgtcgactttttctcggcaggaacagactccacagcggtggcaacagagtgggcattggcagaactcatcaacaatcctaaggtgttggaaaaggctcgtgaggaggtctacagtgttgtgggaaaggacagacttgtggacgaagttgacactcaaaaccttccttacattagagcaatcgtgaaggagacattccgcatgcacccgccactcccagtggtcaaaagaaagtgcacagaaga

SEQ ID NO: 48445 - DNA, 273 bp, Glycine max
  Clone ID: 701135503H1
cttcactggcaccagaaaggctttcaaccatctactccacttcttcacactctgtgtgtgaaaataacaatctcttcttaatggaaataagtattgcaaggtctcatctcgaaacacagggaatattcttttcaaatgtttcaagaacgataggatgggaaagcaccaagaaacttccatgtaatgtggcttcccagagttcaagatgggactttcacagattggcctcttcccatcaagcttttactgcagtgtatcctagaaggcctttta

SEQ ID NO: 48446 - DNA, 274 bp, Glycine max
  unsure (1)..(274): unsure at all n locations; Clone ID: 701135504H1
tttcactttcgtttctcagttttattcgaatccctctctcaatctcctttccaaatggccagcgttgaggttgcacagcaaacaccaacaacagttccagaaaatgaaacaaccgaggtaagcaagacccaggaaacaaccccagtcactgaggctcctgcaacagaacaaccagcagctgaggttcctgcaacagaacaaccagccgctgaggctcctgccccagantcaaccaccgaagcaccaaaggnagaaaccaccgngnaacaaanag

SEQ ID NO: 48447 - DNA, 269 bp, Glycine max
  unsure (1)..(269): unsure at all n locations; Clone ID: 701135505H1
ggagatgtctctgctctcagatctcatcaaccttaacctctccgataccaccgagaaggtgattcgcagagtacatatngatcggtggatcaggaatggacctgaggagcaaagcaaggactctcccaggaccagttagcgacccttcagagcttcccaagtggaactatgatggttccagcacaggtcaagctcctggtgaagacagtgaagtgnnctatacccacaagccattttcagggatccattcagaaggggtaacaatatct

SEQ ID NO: 48448 - DNA, 265 bp, Glycine max
  Clone ID: 701135506H1
ggagttttggggtgttgaggtgaaaagtggagaatctctcaaggttgatccgggagatgacaagattatccacctttcaaatgcatgcctgggggatgtcactaaggataaagaaggtctaccagtagccctgtatgtcaagtttggtaaccaaaagcttgtacttggaacgctttcttctgaagcttttcctcagatatcttatgatttggtatttgagaaggaatttgagctatcccataactggaaacatggaagtgtctct

SEQ ID NO: 48449 - DNA, 266 bp, Glycine max
  unsure (1)..(266): unsure at all n locations; Clone ID: 701135507H1
gcgcaatcggcttctgcttcaaggaaggagagcttgttattctctatcaacaagtaaaatgtcaggtgaagagggtgtcattgcagttgagcnnnnnnnnnnnnnnnnnnncatcccaggcgagccaatggatatcatgactgccttacaacttgtgctcagaaaatctctggcttatggtggtttgtcgcgtggccttcatgaaggtgcaaaagtgattgagaagcatgctgcacaactctgtgttcttgcagaagactgtgacc

SEQ ID NO: 48450 - DNA, 267 bp, Glycine max
  Clone ID: 701135508H1
caagaatggcacttcgttgcttggtgatgtccctttctgttctcttcactcttggtcttgcgagagaaagccatgccagagacgaagatttttggcatgctgtttggccaaacactcccattccaagttcattgcgagatcttctaaagcctggccctgcaagtgttgaaatcgatgatcaccctatgcaaattgaagaaacacagtacccgaaaaccttcttctataaagaagaccttcatccaggcaaaacaatgaaagtacaat

SEQ ID NO: 48451 - DNA, 250 bp, Glycine max
  unsure (1)..(250): unsure at all n locations; Clone ID: 701135509H1
tgcgcttctctcactcactcactcttnttcttcctcttcgtgncgttttctacctcgaactcgaacgaagatgcgtgagattcttcacatccagggagggcaatgcgggaaccagatcggagccaagttctgggaggtggtgtgcgcggagnacgggatcgattcaacggggaggtaccaaggggacaacgagttgcaactcgagcgagtcaacgtctactacaatgaagcgagttgcggaaggttcgtg

SEQ ID NO: 48452 - DNA, 267 bp, Glycine max
  Clone ID: 701135510H1
gaaaaaagaagaaggaagaaaagttagcagtagtttggcgtggtaattggtagagcgagaaacagagaaatggacgattacacgagggaaatgatggacctgaagacactggtcactcgcactctcgagaagaaaggcgtcctcgccaggatccgtgccgaactcagggcgagtgtgttcgaagccatcgaagaggaagatgcgtgtgattgagaaggaacaaggtctacctcctgcattgctaggtagttgcaacgatcgagctaa

SEQ ID NO: 48453 - DNA, 87 bp, Glycine max
  unsure (1)..(87): unsure at all n locations; Clone ID: 701135511H1
gcaactggaagtncttgcttcttnntcttcntcnctctatcttgggaaagggnttnntcncatcgcaaattgtctcccagttatgca

SEQ ID NO: 48454 - DNA, 267 bp, Glycine max
  unsure (1)..(267): unsure at all n locations; Clone ID: 701135512H1
actaagaatccatggcgacaccaacgacgacgaagagaaaaccggtgttcgtgaaggtggatcagctaaaacctggcaccaacggccacacgctgacggtgaaggtggtcagctccaagccggtgaagacggtgaccactcgcggcggtcgatcgtcggtgctcgcngcgcgcccgtcgcgcatcgccgagtgcctcgtcggagangaaaccggaaccataatcttcacagcacgcaacgaacaggtggaccatatgaatgctggcg

SEQ ID NO: 48455 - DNA, 265 bp, Glycine max
  Clone ID: 701135513H1
ggaaggggcagagttttggagtttgaaagagaaaatattgattgcagttgagttctaatgagtaacgaatacgattacctgttcaagcttctcctaatcggagactcttccgttggaaaatcctgcttgcttctcagattcgctgatgactcctatgtcgacagctacataagtaccattggagttgatttcaaaatcagaacggtggagctggaagggaaaaccgtcaagctgcagatttgggatacagctggacaggagcgat

SEQ ID NO: 48456 - DNA, 267 bp, Glycine max
  Clone ID: 701135515H1
ctctcatctatcgttataatttactttgatacgaagctctctcgatctaattttccgactaacactaacaatgacggatgcagctgaagacgctacacgacgccgtaatgcggtggccgagtaccgcaagaaacttcttcaacacaaggaattggaactccagagtacgatccgtcagagaaaatttgcgtgcctcgaagaaagagttcaacaaaactgaagatgatttgaagtctcttcaaagcgttggacagatcattggcgaat

SEQ ID NO: 48457 - DNA, 250 bp, Glycine max
  Clone ID: 701135518H1
ggcactctcttctgcagctttcgcacgacagcttcattcaacatggctgagcaaaccgagaaggcttttttgaaacaaccaaaagtgtttctcagctcgaagaaaactgggaagggaaagagacccggaaagggtgggaaccgcttttggaaatccattgggcttggatttaagactcccagggaagccatcgaaggaacctacattgacaagaagtgccccttcactggcaatgtttccatccgtggcc

SEQ ID NO: 48458 - DNA, 269 bp, Glycine max
  unsure (1)..(269): unsure at all n locations; Clone ID: 701135519H1
gattgacgttggcacgacagtccacgncagaaacagaaaaangtggtgggnnnnnnnnnnnnnnnnnnnnngctccaaaaaccttcattgggcaggtctcatggagagtaatgggaactcggtgaaggatgctgagaaacaaatcacccgtgttttgttttgtggaccccgtttccctgnttctcatgaatatacaattgagtatttgcaaaatcattcacatatcaaggttgatgttctccctttagaagatgtgccaaaggatttgc

SEQ ID NO: 48459 - DNA, 238 bp, Glycine max
  unsure (1)..(238): unsure at all n locations; Clone ID: 701135520H1
attgcggcgacgtgagcggttcgctgcccgcnacgttgtgagaagnccactgaaccttatccatttagaagaaggagaacatggggtttgaggaaactgagttaaggcttggactgcctggaaacggaggcactgaagaagtgctcatcaggaagaggggtttctctgagactgaaactggtcatgaagatgagtctgccaccactgtggatttgatgcttaatcttcttctaaggag

SEQ ID NO: 48460 - DNA, 265 bp, Glycine max
  unsure (1)..(265): unsure at all n locations; Clone ID: 701135522H1
atagccaccaacacaaccttcataaacttccccttccaactctcaccactcgcatctcgcgcgtgccaccaacgcgccactctctccctctctttccctcctcttcctctctccaaacccgccatgtcctccgccgctccggtcaccgaactcagcgacgagtccgacttcgaatctctcctctctcccgacggccacatctccatctgcngcttcggctctctcctctccgagagaagcgcccgaagcactttccccgacttgg

SEQ ID NO: 48461 - DNA, 267 bp, Glycine max
  unsure (1)..(267): unsure at all n locations; Clone ID: 701135523H1
anagttagtaagtctgggtggatgactgatgaggaatttgctagagaggtgattgccggtgtaaacccaaatgtgatccgtcgtcttcaagaattcccaacaaagaacaagangatcncacantctatggtgacaananccagtaccntaananaagaacaattggagattaacatgggaggggtcacagtagaagaggcacttagtnnctcaggagattatncatattagatgaccaagatgcattcatcccatatttgacgaggg

SEQ ID NO: 48462 - DNA, 265 bp, Glycine max
  unsure (1)..(265): unsure at all n locations; Clone ID: 701135524H1
gcgacacgcggcggcgatggaggggaggcgattcttgcgtcgtctccgagtgctgacaactcgggaaccctgcaactgaaaccattgatgttcaggaacaggtttctgaactttgcgcgattgggttctgtgattaacggcgccgcggaatcgtttttcaanagcgagattcggaggaggctgttcgtaacggctgtgttaattgtgattagtcgcgttggctattttattcctcttccggggtttgacagaaggttgataccgg

SEQ ID NO: 48463 - DNA, 264 bp, Glycine max
  Clone ID: 701135525H1
ttgaatcaagggtgagggccttccatggcttccgcttgtgcttcctctgcaattacagctgttgccatctctacgccgagttccgggcagaagaatggatcaggaggttgttttcttagtggaaggaaattgagggtgaaaaaggagagagcagcaattggaggacgatcgatgggcactacagtgtgcgcagttgctgagcctgacagacctctatggttcccaggcagcacccctcctccatggcttgatggcactctacct

SEQ ID NO: 48464 - DNA, 266 bp, Glycine max
  unsure (1)..(266): unsure at all n locations; Clone ID: 701135527H1
ctttttttgatataacagatcaaactgaagacgctggtcacaatangtgaataaagctcagatcgagtttcatcagagtcacaataatgaagcaagaagtggttccaaggtnnnnnnnnnnnnnnnnnnnnnnnnnnnnnnnnnnnnnnnnaaaattcagggtcttctcaagaccaagagcagaagagagtgtcacaaaccgagaaatcgccaagttttggaggcaaaagaggatcgtggaggaggaccacctccttgctgctatg

SEQ ID NO: 48465 - DNA, 267 bp, Glycine max
  unsure (1)..(267): unsure at all n locations; Clone ID: 701135528H1
acaaaatgaactggatacttcagctgatataaagccttcaacaacagaagccgaacattcttttgctaagcaggacaaggagggaagccctgaagaaactaagcctgtgcaaatggattccagtcggtcacctgagaagacaaatgaccagtttattatcggaactgctgaatcagttactgacaacttgtccatccaagtggngaatccatgctcttagtnctacatggagcaggatactcttgaggatcttgctgatggctccgg

SEQ ID NO: 48466 - DNA, 265 bp, Glycine max
  unsure (1)..(265): unsure at all n locations; Clone ID: 701135529H1
caactcgangagtaagatgcatgcagtgcggaaggcccctgctagtgccaattgaagttgcctatagcattcctttgatgtgttatggatgccaagctagcagacccaattatcattttgcaaacaatgttacacctccatttgtnaattatcaccctgctcctggctatgcacataggatacgacgtaaccanttcaattatccttcggccattgccactgacgccgccaccaactccattgaaccctccttcttcctatggca

SEQ ID NO: 48467 - DNA, 265 bp, Glycine max
  unsure (1)..(265): unsure at all n locations; Clone ID: 701135532H1
cgntctttcttctccttgctttgaccttttnccggttgttgtgttgcattggtgcaaatggcgttcttcagaagcgttnctncactttctngacttcnntctcgcgtgcnccagcantctantcttgcgaantcagttanatggctccanactccgagctgcagtaacactgatgcntattctgagttgaaggaactagttccanagtancaggaacgtgttaagaagctgaagaaagatcatggaagtgttgaattggganaaa

SEQ ID NO: 48468 - DNA, 270 bp, Glycine max
  Clone ID: 701135533H1
gctatctagcatggagaggagcttttgttatgtacccttggtctcttgttaagcgtgtaaaaaggtgctgggatagaataaaaacctggttgaccaataattttcctgaagcggaggccactctttgtaaaggtgcaactgaagctgacattcaggagttggagaatgtattaaaggtgaaattgcctcttcctacaaggatccttatcgctttcacaatgggcaagaatttgcaaaggcagatccagaaactagtacatttggcagatc

SEQ ID NO: 48469 - DNA, 235 bp, Glycine max
  unsure (1)..(235): unsure at all n locations; Clone ID: 701135534H1
ccatgcttttcnggtncacanttaatgngacatggngaagccatntangggnttaaaccatttgntgcanttcaaanttggtgcaatcattgtctaacatgngtgcatttcnctactcttnaactataangcatttacaattggttttnatatcatctgngtagctatccacctggnccaaaaaaacatcctacacataancngncttctaatttgcngctgatctcactagggg

SEQ ID NO: 48470 - DNA, 268 bp, Glycine max
  unsure (1)..(268): unsure at all n locations; Clone ID: 701135535H1
agagcattncatattggctagaaatccacctgggggcagcagcttgctccctatatggtattcttctccaccttncaanaatccatcatcaagctaagcgnagaatggaacttgagtgggataatgaatatggtagtggtagctcaaagatcatgaagcttaccatcacttatcagcctgatgggagatacctaattgagacagaacaaaatgggatctcctgttttagaagtgaaatcaacatatgtaaaagataactattttagag

SEQ ID NO: 48471 - DNA, 256 bp, Glycine max
  Clone ID: 701135536H1
tatgggtcctgctgatagtccttatgctggaggtgtattcctagtcactattcactttcctccggattatcctttcaaacctcccaaggttgcctttaggactaaggtgtttcatccgaacatcaacagcaatggtagcatttgtcttgatatccttaaggagcagtggagccctgcactcaccatctctaaggtactgctttctatctgctcattgctgactgatccaaatcctgatgatccacttgttccggaa

SEQ ID NO: 48472 - DNA, 224 bp, Glycine max
  unsure (1)..(224): unsure at all n locations; Clone ID: 701135537H1
gcggaaaccggaatatctcagttctctgatcagatccatcngangtcgncncacgngataatggctccgtncagcggcgatgagacggcaccgtttttcggcttccttggagccgcagctgccctcgtcttctcctgtatgggagntgcctatngcacagcgaagagtggcgttggcgtggcttcgatgggtgtgatgagaccagagctggtgatgaagtctat

SEQ ID NO: 48473 - DNA, 263 bp, Glycine max
  unsure (1)..(263): unsure at all n locations; Clone ID: 701135538H1
ttgagggcatcagagatagcgaagaagttgaatctgcaaccttcacccagaaggtgggttttacgtggagacattccgagaccattccgtccagctttcgacctctcagctcccccccgaatacaaantggatcgccctgtatcgacctccatctattttctcgttccttctgggagtgtgtctcgcctccatcgcataccctgcgccgaaacctggcatcattacatcggcgaccctctcaccgtagtggaattgaatgaga

SEQ ID NO: 48474 - DNA, 261 bp, Glycine max
  Clone ID: 701135539H1
gggttcctctttgtggacttgtctgattttgttatcacttgcttctgcttccttcgccgccaacccaagaacaccaattgatgtgccatttggcagaaactatgtgcctacttgggcctttgatcacatcaaatacctcaatggtggttctgagattcagcttcatcttgataagtacactggtactggcttccaatccaaaggatcctacctgtttggtcacttcagcatgtacataaaattggttcctggtgattcagc

SEQ ID NO: 48475 - DNA, 260 bp, Glycine max
  unsure (1)..(260): unsure at all n locations; Clone ID: 701135540H1
ctgaaattggctaatgaaacactagcaggactacttaaaggatgtntctgttcggcaccatgaaatgaaagcacctaaagttcgagattctttgtcttggggaaagcgaaagagccaacaagtggtagctgagggtgccggggtcatctctgctgcagtatctagcctaaataagtttgccaatgatggaagctttatgcatgattttggtancaagatgagtaataattctgacggctctgttttggatagtagtgaat

SEQ ID NO: 48476 - DNA, 265 bp, Glycine max
  unsure (1)..(265): unsure at all n locations; Clone ID: 701135541H1
gnngtgcactagttngcagcanaattngcaaatgcgtcnncaacacngcgctctngggtcngnaanantgganaangtnagggaattgacctntcatcgcttattnttgtcgaanganaaatttnnngggatctnnacatagatgggcttgttgttagttcagatgganatttgttngatgctctaggcgcngccattaaggntgctttgagnaatacaggtattccaagagtcgaagttgctgctggaacgtcaaatgatgagc

SEQ ID NO: 48477 - DNA, 262 bp, Glycine max
  unsure (1)..(262): unsure at all n locations; Clone ID: 701135546H1
ctttgagaaagttactaattcctanatagaggcaaaantgttgggaattttcaaggagaagttggttaaagcacccaaagagctgaacagtccagcttcgttgaattcatgcantaagcctaagctaagtcacgaaatccttcaggatttcatgtcctgcaattcctccaatgctttctcaactgtgcttgggaatgaagctttgctagcctattccccttcaaacaagccctccattcatcaaaggttgtttagtggtttg

SEQ ID NO: 48478 - DNA, 262 bp, Glycine max
  unsure (1)..(262): unsure at all n locations; Clone ID: 701135548H1
cgaatttgcagttacagcttcactctcctccaccatcatccctcttatcatcttcatcatcaccatcatcactatactcttcttcttctcttaagctattcccaaaccaccctttttccacaaagtcccttcctttcaacaatcataaacatttctccctaagatgccgccacactgacctcttcgaccagaacaccatagcctccacaccacgaccaacgngaccctctgcttcagttggagtttgccgctagggtttatg

SEQ ID NO: 48479 - DNA, 267 bp, Glycine max
  unsure (1)..(267): unsure at all n locations; Clone ID: 701135549H1
tctaaatccaattaangctgccattcacatttaacacctctggcagcatctagcattcattcattgagcttgtgactaagtttttttaagcctttcactcttttcatatattttctctagtttncatcttctgatctatctaacttcaccagattgtgcacttaaaagttcatcactttatcatcaagaacgatgcaagactcaattgggattcctgcttgcttttcttcttcagcagagaagcagcatagccatgatgatcaggga

SEQ ID NO: 48480 - DNA, 263 bp, Glycine max
  unsure (1)..(263): unsure at all n locations; Clone ID: 701135550H1
ggagaatatgaagttgtttgtnttctttgttgctgcagtagttttggtagcatggccatgccatggcgcaggctaccaaaggttccctctccgaatgaaaactggctatggtgagcgttcttcggaggtaaaatgcgcaagttttaggcttgctgtggaagcacacaacatccgagctcntaaaaccattcctgaagagtgcgttgaaccaacaaaggactacattaatggcgaacaatttagatcagactctaaaacagtta

SEQ ID NO: 48481 - DNA, 235 bp, Glycine max
  Clone ID: 701135552H1
tctgccacaactttaggggtgcattgcaaatggcttccgttgttgcaagcttgccgccaccattgctgctccctgctagaaaatcacatatgggcaacttcccaagttcccctgtttctcttctttcagggagatggaatcgtgtttcttttgttgtgaaggcttctggagaaagttctgaatctcaactacccttactgtttttaagtctgttcagaatatttgggatcaacct

SEQ ID NO: 48482 - DNA, 261 bp, Glycine max
  Clone ID: 701135553H1
aaacaatgaaggtttccattgccaagttccactcccttcccctatgttttttccttctcttggccttcaacacaaaacccctcctagcagcagaaccagagccagtggttgataagcaagggaaccctttggagccaggagtagggtactacgtgtggccactttgggctgatgaaggaggcctcacactaggccaaacaaggaacaagacatgccctctttatgttatccgtgacccttcattcattggcaccccagttt

SEQ ID NO: 48483 - DNA, 257 bp, Glycine max
  unsure (1)..(257): unsure at all n locations; Clone ID: 701135554H1
caaagccctaaaatggaggggactgtcttcactcctggcactgcaaganattgagcatgtaaagtctgatcaaggagaaattctgagcaagccttcttggatgcgtgcaaacacatattgcctgtaatagatangtttggngctgctatggcccttgttaaatctgacataggtggtaacatatcgagattggaaactatgtattcntgccatccaaccagatttaactacctgnacagtttggtacaggtagaggt

SEQ ID NO: 48484 - DNA, 259 bp, Glycine max
  unsure (1)..(259): unsure at all n locations; Clone ID: 701135555H1
tgtcaatgtacaaactggagaggaggtggctgttaagctggaacctgtgaagaccaggcatccacagcttcactatgantcaaaactgtatatgcttcttcaaggagnaacggggattccccacctcaagtggttnggagttgagggagactacaatgtcatggttatcgaccttcttggaccaagtctggaagatttattcaattattgtaatcggaagttcacattgaagacagtgttaatgcttgcggatcaattg

SEQ ID NO: 48485 - DNA, 264 bp, Glycine max
  unsure (1)..(264): unsure at all n locations; Clone ID: 701135556H1
gcaagcacggccatctccctcgtccttcgcngcgctcttcctcttctcctnccgtccactctttctacctccctggtgtcgctcctcgcgatttccaaattggtgaccccctctttgtcaaagtgaacaagttatcatctaccaagactcaacttccatatgactactacttcttgaagtattgcaaacccaaaacgatattgaacaatgcagaaaatttgggagaggttcttagaggtgatcgtattgagaattcagtatatt

SEQ ID NO: 48486 - DNA, 250 bp, Glycine max
  Clone ID: 701135558H1
ttttcattgtgcattattcaatggccaccacagcagctctatccggaaccatggtgagcacctccttcatgaggaagcaacctatgacgaccaagagcctaaagacattccccaacgctctttttggtctgaaaggtggacgaggtggtcgtgtaacttgcatggcctcgtacaaggtgaagctcataaccccagaaggagaagtggagtttgaatgcccagatgatgttttcattgttgacaaggctga

SEQ ID NO: 48487 - DNA, 257 bp, Glycine max
  unsure (1)..(257): unsure at all n locations; Clone ID: 701135559H1
agagcttgtatacgtcgccgcttcagcgtanaacatgatcattcccgagaagaaccgtaaagagatctgcaaatacctcttccaagagggagtttgctttgcgaagaaggacttcaatctggcgaanacccggagattgatgtgccgaatctgcaggtgataaagctgatgcagagcttcaaatccagagagtacgtgagggaaacattttngtggatgcactattactggttcctcaccaacgatggaattgagtt

SEQ ID NO: 48488 - DNA, 260 bp, Glycine max
  unsure (1)..(260): unsure at all n locations; Clone ID: 701135560H1
tgcttcccaagtctctcgaagcancctttntttctcttcctgcagaagctatccgtgttacttgttcccaagtctccaacaagcaaagtacatggttgatttggaaatccaggtccccagcgcattcgacccgtttgccgaggcgagagaatcagatgcccccggggcaaaggagtatgtgcacatacgaattcagcagaggaatggaaagaagagtctgacaacagtgcaagggctgaagaaggagttcagctacgaga

SEQ ID NO: 48489 - DNA, 260 bp, Glycine max
  unsure (1)..(260): unsure at all n locations; Clone ID: 701135561H1
gataaagctctcactaaactgggtagcacttggatctccaagaaagccaaggcagagatttcccacataaccgacgaccnatcatctctctcaaatactgtacgaagagaaggcaaagcttttcatcaacaagctcaaaggtaaaacccagaaagccttgccagatctccttcgagagtacaacattcctccgggtctgttcccccgcaacataacatnctacgatttgatgcatcaaagggaaagttgatcgtgtactt

SEQ ID NO: 48490 - DNA, 259 bp, Glycine max
  unsure (1)..(259): unsure at all n locations; Clone ID: 701135562H1
agataaatatggttgagaacactcctgacgatcctcgtcagagaaaaccagacattacaaaagcaaaggaattgctgagatgggaaccaaaggtcaagttgtatgatggccttcctctcatggtngaggatttccgtcagaggcttggagttcccaagagcaactaagctccttttactccttcatttcttatcatataatcataatgaatattttgatagtaacggggatgtggatgaacctgttaagtgttaagaga

SEQ ID NO: 48491 - DNA, 274 bp, Glycine max
  unsure (1)..(274): unsure at all n locations; Clone ID: 701135564H1
cnagaaccatcaccatagtggtnaanaacaataaccaagaggatccatgctccttctgcttctncttgcttctncttgttnttccttctcttgctcttntgcttcanacaaatccatcaantctgcttcttccaccggcantcggcaccagttagacgaaggatgcnttnttctccnaatggnntctngttncatcatcctcccatcaaaaagggtgacttcanaccaccttgtctgctctcacctccaccacctaatggctccccttctcccc

SEQ ID NO: 48492 - DNA, 265 bp, Glycine max
  unsure (1)..(265): unsure at all n locations; Clone ID: 701135565H1
taaccgtagtaattctagagctaatacgtgccaacaaaccccgacttctggaagggatccatttattagataaaangncnacccgggctctgnctgttgctttnatgattcatgtaantcgtcggatcgcacggnctttttgcnggnaacgcatcatcnaaatttctgccctatcaactttcgatggtaggatantggcctaccatggtggtnacgggtgacggagaattacggtnccattccgganagggagcctganaaacgg

SEQ ID NO: 48493 - DNA, 264 bp, Glycine max
  Clone ID: 701135566H1
ggcttcctcttcgatcatcgcttcagaatgccgccgaagttcgacccctcccagatcgtcgacgtcttcgtacgcgtcaccggcggtgaggtcggcgcggcgagttccctccccccgaagatcggtcccctcggtctctcccccaagaagatcggagaagatatcgccaaggaaaccgccaaggactggaagggcctccgcgtcaccgtcaagctcaccgtgcagaaccgtcaggccaaggtcacggtggtcccatccgccgcc

SEQ ID NO: 48494 - DNA, 262 bp, Glycine max
  unsure (1)..(262): unsure at all n locations; Clone ID: 701135567H1
ctgcattgcaacactcactcaccaatggcactcagacccatcgncaacgctcttccannaancnnagaattngatanaanacancccaaagtcgctcttgcaacccaaaagcaacaataccgtgctggcgtcaatggcgaaaacatagttccattgccctcatctggggatgccactnttgactatgtctcctccgacaaccttaagcccttgtcggaccctgaagttaagattcagagcttggttgaagatttggattcga

SEQ ID NO: 48495 - DNA, 261 bp, Glycine max
  unsure (1)..(261): unsure at all n locations; Clone ID: 701135568H1
ctcacgcgcccttngcacaccaagctttgccacttctctgcaaacaacgttncctttactatccaacccttncattccagattctncnacatncnccgtttnttgcncataatcaccaattgccatggcaagctgaatagctcaggtgggggagaggcatatgcgatggatgaagcgggttttgacgagtacgatggagttgaagaggaaagcgatgacgaggatgatgcagagagtagcgtggatttgttgatcagattc

SEQ ID NO: 48496 - DNA, 237 bp, Glycine max
  unsure (1)..(237): unsure at all n locations; Clone ID: 701135571H1
ggggtcgttactaacttgtgtggnctttaaatcaggtgcgaccgccgtggcggaagtgagantgacttcggacggagcaacgtcggcggcgacgcatcggaggaaaccttcgtggagggagaganagaacaaccggaggagagagaggagaaggagagccattgcagccaagatatactccggccttagggcgcaagggaactacaatttgcccaaacactgcgacaacaatgaggt

SEQ ID NO: 48497 - DNA, 257 bp, Glycine max
  Clone ID: 701135572H1
ccaaacttcagtttcaaagatgcctcgtggaacgcttgaagttgttctgatcagcgccaaaggaatcgatgacaatgattttctctccagcattgatccttatgtgattctcacatacagggcacaggagaaaaagagcactgtgcaagaagatgctggatccaagccacaatggaatgagagctttcttttcactgtctctgacagtgcatctgaacttaatctaaagataatggataaagacaactttagtcaag

SEQ ID NO: 48498 - DNA, 258 bp, Glycine max
  unsure (1)..(258): unsure at all n locations; Clone ID: 701135573H1
agatataaaagctgttgcacatgatgttcccataccaggatataaaactaagactacaatccaacttgagactttggtctacaaaagctgcatcagaagaatttgatttatctgcttttaatgctggaaggcacactgaagcatctgaggctctagcaaatgctgaaaagatatgctatatactctaccctggggatgaaccaatagagggcaagatccttcgcctcaagcaacaatatactttatgttctncttctc

SEQ ID NO: 48499 - DNA, 255 bp, Glycine max
  Clone ID: 701135574H1
gtgacgagcatcatggcctcaagagcagtgttattgttggctatgtgtgtgcttccggcgatggttgtggccattcgcccagcaaagaaccctttttgcgtgaagggtcgtgtctactgtgacccttgccgtgctggttttgagacctcagctaccacctacattgctggtgctgagattatgttgcaatgcaagagcagggttagcaacgaggttgtgtacacgaagaaggggtacaccgactcaaccggagca

SEQ ID NO: 48500 - DNA, 256 bp, Glycine max
  unsure (1)..(256): unsure at all n locations; Clone ID: 701135575H1
tggagctgtcttccagtgcatttgtggtaatattgttggcagtcgcagctacagcagtactctcaaatgggttggatctatctttcttgcccagcgatttcctctttggcattgcttcttcctcttaccagtatgaaggagcttacaagagtnacggcaaaggactgagcaactgggataactacactcacggaccaggtagaagtgtaataatggatggaagcaatggggatatcgcgattgatcattatcatcg

SEQ ID NO: 48501 - DNA, 258 bp, Glycine max
  Clone ID: 701135577H1
ctctgacagagcatgaagacaaacaggtccatcaaattgctcgaaacttccgagacagatggtttcccagacatgccagaaaacatggctatatggacagggatgataacagagtggaatctcacagaagtttcaagtgtaacagattttcagcatcacagagttataggcatgaacaggatttaaagactacagaagcaagtgattgtagtcagcagtcgatgcttgtgacaactccagtagatgctgaagcccggg

SEQ ID NO: 48502 - DNA, 256 bp, Glycine max
  unsure (1)..(256): unsure at all n locations; Clone ID: 701135578H1
cttgaatcctagtgtttctggaactgaacaagtttctcagtgttctactcaaagagcacatggattatccacttgttcaaaagagaagatctatgaactatctgtaggttgtgtccgtgaaaaatacaaaactgacaaatcaaaagccagtaagttctcaactgttganagaacaccaagatcaagagcagttacggtttctgccactaccaaaaggcatacaatagcaacatcaaagacaacccattctggtcca

SEQ ID NO: 48503 - DNA, 258 bp, Glycine max
  Clone ID: 701135580H1
ggggtgttaaatagaaaagaggagtttgagaatggcaacgatcagcgcggttcaggtggagttcctggagtttccagcggtggttacttcaccagcctccggcaagacctatttcctcggcggcgcaggggagagaggattgacgattgaggggaagttcataaagttcacaggcataggagtatacttggaggataaggcggtgccatcactcgccgctaagtggaagggtaaaacttcagaggagttagttcacac

SEQ ID NO: 48504 - DNA, 111 bp, Glycine max
  unsure (1)..(111): unsure at all n locations; Clone ID: 701135582H1
gcgancaccttcgtcaccatcatcattattccttttcaaaattttcaccctttcnnaaaaaagaaaaaggnggnnanggaaaagagggggttttncttntgcnnanngggg

SEQ ID NO: 48505 - DNA, 254 bp, Glycine max
  unsure (1)..(254): unsure at all n locations; Clone ID: 701135586H1
cagaaggatatgagaagttagcccaggcaaattatgatatgtttgctgatgatgacgagcatgataccagtaagccatctanagatgaaaataatgcagtcagtcaatcttcttcagttgccataaattctggtcctgagggtggagcatcacaaaacgattatgtgtatgatgaatcttctgggtactattacagcagcactttgggctattattatgatccaaatacagggctttattgctcagcagcatca

SEQ ID NO: 48506 - DNA, 254 bp, Glycine max
  unsure (1)..(254): unsure at all n locations; Clone ID: 701135587H1
cgacggtattatagagaaaacattcttgtggggtaggtactctttggaaatgtctgctgttatttacaaggattgggttttcaccgatcaagcattgcctaatgatcttgtcaagagaggagttgctgttaaggatccatctgctccccatggagttcgacttttgatcgaggactanccttatgcttctgatgggctagagatatgggatgctatcaagtcttgggtggaagaatatgtctcattctactaca

SEQ ID NO: 48507 - DNA, 257 bp, Glycine max
  unsure (1)..(257): unsure at all n locations; Clone ID: 701135588H1
cccatctaaaatggntnngagttnagggtgactacaatgtcatggttatngatctccttgggccaantcttgaaganttgtnnaactattgcaatananaattatccctgaaaacagtnctgatgctggcagatcagctagtaagtatgactttcatcctcaagnganctacactttacaacagacanttgatgttntcntctatnatanggctcgcctcagatgancagngttgaatacatgcactcccggggttt

SEQ ID NO: 48508 - DNA, 254 bp, Glycine max
  Clone ID: 701135589H1
aagacatttgatcttagctactatagtcatgtgattaagagaaggggtctatttgagtcagatgctgcattgttgacaaactcagttacaaaggctcaaatcattgaattgcttgaagggtcagttgaaaatttctttgctgagtttgcaacctccatggagaaaatgggaagaattaatgtaaagacagggacagaaggagagatcaggaagcattgtgcatttgtaaatagctaagaatcttgtcttgttca

SEQ ID NO: 48509 - DNA, 256 bp, Glycine max
  unsure (1)..(256): unsure at all n locations; Clone ID: 701135590H1
cgtgttcaacccgtgccactgctccctcatttcatacaacagggcaccngtatcatcatttctggaaggcaaaaccttcgtcattcaaagagttggggctaagaacaagcgttggtgccaataaacttcaagttattaaagcagctgcacgcagtgattacagaggtagtttctgaaaccacaaaggctggtggcctacgtggaaaattgaataaggtggtgttggcttacagtggtggcttagacacatcagtca

SEQ ID NO: 48510 - DNA, 252 bp, Glycine max
  unsure (1)..(252): unsure at all n locations; Clone ID: 701135591H1
ggggtgttagggtgttgattctctgcgacgctcttcgcattgcggtaccctgcaccttcctcgcggtattgcgcgcctgtctcactcccattccgtttttccgctcccctctctgtgttgcganaataagggttcattggtttggggctaattcttcttccgatttcgagccgagtgaaatcgttaagagagaaaatgtacgctgatcgtatggagggtggagccaggaggcccgtgaaggaacgccttaat

SEQ ID NO: 48511 - DNA, 238 bp, Glycine max
  Clone ID: 701135592H1
ctgggttctgaggcatggcaagagcattcccaacgagcgaggcatcatcgtttactccatggagaacgggactcgccccgaattccaattggcctccgacggtgttcatcaagcacaactcgctgcacaatcattccaaaaggaactagaggctaataatatcccgcttgctaatgtacgcatttgctactcccccttttcaagaacaacccataccgctaacgttgtttcaactctc

SEQ ID NO: 48512 - DNA, 255 bp, Glycine max
  unsure (1)..(255): unsure at all n locations; Clone ID: 701135593H1
ctacaccttaatactgagcagcatgatgaaataaccagttcaagtggaagtgtctctgctgagggaaatgagccatcctttgaagagcggaggcttcctggaaatgacctgtttgaagaatcatctatttcatcatcagtcaatactttggtagatgagcaggttacaaatgataattatgaggttgatgaagttaaatctaaatctccaaattctggatcctttttctctgtncccggcattcccgccccatca

SEQ ID NO: 48513 - DNA, 168 bp, Glycine max
  unsure (1)..(168): unsure at all n locations; Clone ID: 701135594H1
tctctctcttctcttacacacacaagcactacnacattttctttggtctctcattttctctatagctagatgggttctggtgctttacaacttcttctgatcttgggtcttctggctagctcatgcttagcacaagccccaggtgctgcacccacacaaccacccact

SEQ ID NO: 48514 - DNA, 255 bp, Glycine max
  unsure (1)..(255): unsure at all n locations; Clone ID: 701135595H1
ctctctttcacgaactcacgctctntttcagatctgaagccacataaccctaaccatcaaacggtgcaggctaggtgtcgctgggacttcaatggcagtgactgaagctcagaatcctcttcttggagaaaacacatgtggttccttgttaaaaaagcttcaggaaatatgggatgaggttggtgagagcgacgagcaacgagacaagatgcttcttcagttagagcaggagtgcttggatgtgtacaagagaaa

SEQ ID NO: 48515 - DNA, 238 bp, Glycine max
  unsure (1)..(238): unsure at all n locations; Clone ID: 701135596H1
cgncgctgctccgtagtttcgatcgacgcattcttcacttcaaganatcacaatactctataacgcacagcctcactactccactcnnnnnnnnnnnnnnnnnnntcttagctccttcttccttcaattgcaggggacaggtttcgttgctgtgaagagcgtgagatttgcaaatgcgttgccacacccgaagctgagactgcctacaagacaggggtcaatcgcaatccaaatatgg

SEQ ID NO: 48516 - DNA, 254 bp, Glycine max
  unsure (1)..(254): unsure at all n locations; Clone ID: 701135601H1
aaaaaaaccaactttgcggctgctctgctgcaaatagcgcgttgcatctgctcccaatcattcatattttcgccaaacagccgattccgttaagtgtttctaccgtagcgctcaggaaggaggcattggctggtggtgttggttgtggtggaggtngttttgccgatcagttgtggtagagggtaggaaagaaaaaaaaagtggaaaatgagttcagacagccgcagcaggagcangagcagaagcaggagccc

SEQ ID NO: 48517 - DNA, 258 bp, Glycine max
  Clone ID: 701135602H1
ggcaagtggcttcatcacccccatttttctgtggatctccacctagcagggcttcaaaccctgtgatccaagatgagcaatttggtagtaatggtaatgagaattttggtgcattttccttggcacccccttcaccatcttcctcagcaagaggctgtgttaggatgaagtttggtcacaccccagctgcagtgaggattgaaggttttaattgccttagcagggataggcgcaactgcagcatttctgctgttgctt

SEQ ID NO: 48518 - DNA, 257 bp, Glycine max
  unsure (1)..(257): unsure at all n locations; Clone ID: 701135603H1
aaaaaaatcagcttttcccataagctaaaagtatcttatgcataagctaatttgtagaaactcttttattttaacttattcaaaagactattttattttaacttatgcacaagtttagtttnctatgggagaaacttattttanccttttcttcctattttttctcctgtaagtgcttatgaaaaagttgatctaaatagaccttagtgcatntatgtagcagttgattgtccatctaaagtttcgnggnaaaatta

SEQ ID NO: 48519 - DNA, 253 bp, Glycine max
  Clone ID: 701135604H1
ttctgtggtaaaataactacagatggtaatgccataaccaatgccgtggatgtttaccgcaatccagcgtaagaggctaaacacagaactttatctttgaaatttttgtttttggtttagttagtaactgaaccttcactttgcagtgggtcgttgagggtaatcacagcaaataatgattcccaacttcgggtttttgatgcagagaattttgcttctcttggttgtttcaagtatgattggtctgttaatg

SEQ ID NO: 48520 - DNA, 254 bp, Glycine max
  Clone ID: 701135605H1
aaatgatcccacaacaagaacccgatttcaatctcaatcacctcaaattatattacggaaagctgtttccgtttgctgatttagttagatgggtgtcgtatggcaacgatggaaagcaccctggttgtgatcaatcctacattgggcgaagagagttttccttcactctggagaatgatatatatctgcgtttccaatctttccacaatgcacttgagctccgaaaactccatcaaagaaaagacccctgttaa

SEQ ID NO: 48521 - DNA, 253 bp, Glycine max
  unsure (1)..(253): unsure at all n locations; Clone ID: 701135606H1
gtttgctgcaagtgctcgcagattatgtaaagactatgatactctcttcaagtacccttaagattctaaatgtaagtnacttaattttgcttcttccttttttacttttcatatttctaataacatgtcctgtttgccaaatttctgtccatcactcaatcttgcctttcaaattatccttcaaaatatgtctctaatccactctcattgtgtagggtctctctacttctggttcaatgataactcaaattcc

SEQ ID NO: 48522 - DNA, 235 bp, Glycine max
  unsure (1)..(235): unsure at all n locations; Clone ID: 701135607H1
cccccttctttccaaaacactcccactccctttctattcacntcccctacccttgccgtgancgatgtagatanagaataaaaagagaccagtgtgcagtgagaaanagattgctcacttcttgtgtgggtttgttttgttctttgtgttggaatttgtncatgggtgaagaaggagaagaggtgtcaagagagaaggaacaatacatgggagtttatggaaatgcagtggttgt

SEQ ID NO: 48523 - DNA, 256 bp, Glycine max
  unsure (1)..(256): unsure at all n locations; Clone ID: 701135609H1
gcttcctgcgcatctattcattctctctgctttcaattacaagcaccaaaattccgacgaatcagtcatcttccgaaacctcgcagtagcggtgaagcngaaanannganacccgcgangtcagnaggactagcccccgggtgaagaggcntagcanganggattcaaactcaccgnttctgcctcattgcaattctgatacaaaaaatgcatttcgcaagccttctggtgatgcagctaataggaattatcggcg

SEQ ID NO: 48524 - DNA, 255 bp, Glycine max
  unsure (1)..(255): unsure at all n locations; Clone ID: 701135610H1
ggtgctcagaaagcctctcttcatccagatgatatgctgctcctggccaactttgttatntcatcagaatcctttaggacttcagaagcattttctcccgcgtgccngncaagagacaacggtttggcaanggtcgtatgccgatatccacttnnttgatgatgacacatacttgatgttgctgaccactagttctgatgcattttaccatcttaaggattgcaggattcgtattgaaacggtacttttgaagtc

SEQ ID NO: 48525 - DNA, 254 bp, Glycine max
  unsure (1)..(254): unsure at all n locations; Clone ID: 701135611H1
ctctctctctctcaaccataatagtcatgggtttgaaggaggattntgagcagtatgctgagaaagcaaagactttgccaccgactcaatcaaacgaagacttgcttatcctttatggattgtacaaacaggccaccgttggacctgtcaacaccagccgtcctggaatgttcaacatgagggacagagctaaatgggatgcatggaaggctgttgaagggaaatccaaggacgaagcaatgggtgattacatc

SEQ ID NO: 48526 - DNA, 254 bp, Glycine max
  Clone ID: 701135612H1
gcacagataacagaggaggctgatacatctgaagtcattgagactgtgaagctgcgagttagagatgctaaattgccggaaattgaggtggtgcggatcttgtgggatggtttaatggatgctgttcagtggtctggaaaaaatcagcaacagaatgcaaatgcagcccttcgtcaggtaaaaacttgggcagaattgttgaatacattctgcaccagcgggaaacttgagctggagctgatgtacaaagtaca

SEQ ID NO: 48527 - DNA, 66 bp, Glycine max
  unsure (1)..(66): unsure at all n locations; Clone ID: 701135613H1
tgtttactttccattgattgagcacaanccttgtnttttctcgcgatcagttncccantggnctgg

SEQ ID NO: 48528 - DNA, 258 bp, Glycine max
  unsure (1)..(258): unsure at all n locations; Clone ID: 701135614H1
ttcccctagaaacttcgatctgaagatgggtggcattgcatttggacgctttgatgattctntgcagtttaacctcaatcaaggcctatattgctgagttccattcaaccttgctctntgtttttgccggtgttggttcagccatagcctatggtaagttgacatcagatgcagcacttgatcctgctgggttactggcagttgctatttgccacggttttgcactctttgttgcagtttctgtcggtgccaacatct

SEQ ID NO: 48529 - DNA, 264 bp, Glycine max
  unsure (1)..(264): unsure at all n locations; Clone ID: 701135615H1
aaacttcgtcgtgttactgttagctaacactttctgcaataatggcacgtactagcatccagacangcttcttcatccacgggcaaaaaaaatttgatgngncnncnacgtngncagcncaaaggacaatgcaacanccacagggagcatganagagctgacaaanatcgttgattgggttcaagaaacaggtccaagtgtgctccctgtnttctatgatgtcactccttcggaggttcganaacngagtggacagtttggaga

SEQ ID NO: 48530 - DNA, 85 bp, Glycine max
  unsure (1)..(85): unsure at all n locations; Clone ID: 701135616H1
gcagtcactgcttgcgtgtagagcagaaccagatcgtgttctcttgnttccattggacanacanggnaaanggcaaatgngcnag

SEQ ID NO: 48531 - DNA, 260 bp, Glycine max
  unsure (1)..(260): unsure at all n locations; Clone ID: 701135617H1
cagatcctccatggcctccaccaaggaacgtgaaaacttcgtctacgtcgccaagctcgccgaacaagccgaacgctatgaagaaatggtggaagcnatgaagaatgtggcgaactaaacgtggaattgacggtagaggagcggaaccttctgtcggttgggtacaagaacgtggtgggtgctcgtagggcttcgtggaggattctttcctcgattgaacagnaagangaagctatagggaacgatgtgagcgtgaagag

SEQ ID NO: 48532 - DNA, 254 bp, Glycine max
  unsure (1)..(254): unsure at all n locations; Clone ID: 701135621H1
ctctgnntctggctctggctctgccctttttggttttctctcgttaccgaanccagaagaancatttatggcggacatggatctggaccagtggatctccaaggtcaaagatggccagcatcttcttgaagacgngcntcaactnctctgcgaatntcntanaagagatccttattgaggagtccaatgtgcagcctgttcaatagtccagtgactgtttgtggtgatattcatggtcaattccatgatctaat

SEQ ID NO: 48533 - DNA, 251 bp, Glycine max
  Clone ID: 701135622H1
acttcctcaagctgttggagctgcttattcccttaaaatggatgggaaaagtgcatgtgcagtcactttttgtggggatggtgccaccagtgagggagattttcatgctgctatgaattttgcagcagtaatggaggcccctgttgtttttatctgtcgtaataatggatgggcaatcagtacacctgtggaagaccaatttcgaagtgatggtattgtagttaagggtaaagctatggcatctggagcat

SEQ ID NO: 48534 - DNA, 245 bp, Glycine max
  unsure (1)..(245): unsure at all n locations; Clone ID: 701135623H1
ttttcttgttaggttttatgtggnccactggtatgaatctcaattgttagatcctggttattgtgnattgaaaattgaaacttcaaatttgcaaccagttagattttctgcaagtgttttctcttttacccttttgttagagggtgatgattttctggtaaagttgggagaaaattgatagcttagctttcgagagagatgaattgtnttcctgnntgaggtgattgggcacatatttggttgcg

SEQ ID NO: 48535 - DNA, 255 bp, Glycine max
  unsure (1)..(255): unsure at all n locations; Clone ID: 701135624H1
gtcttttctgtttttatacaaacctcatgtaggtgggagagagagtgtctttcttggctcatagcatagcatcactatggctcttctgagtcgagcctcttcacgcttccctcagctggtttcccctcaaagagttgtttccctccacacaacgctcccatntcttaacgcatcaacatccacacccacgcccgccccatatgccccgccaccgcctccgtccgcttcccctcccgccggcgtgtcgaaggcggc

SEQ ID NO: 48536 - DNA, 254 bp, Glycine max
  unsure (1)..(254): unsure at all n locations; Clone ID: 701135625H1
agaaggaagtgttgtgggaggaaagaggcagagctgcaatcaccagagtggaagcgcgaaacggtcctccccggctttccattttttctcttctgatgaaattttagttcatcccagttgctgattgagattgaatttaaattcgaaaaagcntacttgtgccactgtacttttacagatctgcggctacgggctagcctatcgtatttttgcgtagatctagtgtccgtgaagcggttaccatttcaccactc

SEQ ID NO: 48537 - DNA, 256 bp, Glycine max
  unsure (1)..(256): unsure at all n locations; Clone ID: 701135626H1
ctctctctccaatggccaaagacctcgaaacggagattcaaagtgggttgcctcacaaggactaccacgnnccaccccccgccccattctacgaccccgccgagctccgaaagtggtccttcttccgagccctcatcgccgagttcgtcgccaccctcctcttcctctacgtcaccatcctcaccgtcatcggctacaaccaccagacagccaccgccgccgagccctgcagcggcgtcggcgtcctcggcatcgc

SEQ ID NO: 48538 - DNA, 255 bp, Glycine max
  unsure (1)..(255): unsure at all n locations; Clone ID: 701135627H1
cacaaacatccctcttgatttgaaggttgttttgtgcttatagataaaagttctgccaaatncaagaggggnnttcagatcannnnnnnnnnnnnnnnnnngaaaacaanggccaagngcgttgcngctaagaacctggcacncnttgccatttccatgcttcaaacagtggttatggctgctaatgagcaaggaggccacttgtatgacaacaagagcaaatatggaagtgggagtgtcaagagataccaatgc

SEQ ID NO: 48539 - DNA, 246 bp, Glycine max
  unsure (1)..(246): unsure at all n locations; Clone ID: 701135628H1
agaagggcgaangggcaaacacaacttttttntnnttttgtagagcgagananaaaannaatgtnngggatcttcagcagttccgtggtgtcgccgccggannagctggtggctgccggcancagaacgccgtcgccgaagacgacggcggggaagctgctgaaccggttcgtggagaacaaggcgtcggcggtntcgctgcangtggnagaacacgtgcattgggctttacacgcaccacaacna

SEQ ID NO: 48540 - DNA, 258 bp, Glycine max
  Clone ID: 701135630H1
tcttgaataagatcccgaaaggcccattgaaagggaagaagttagcttagtgtttaagcatttgtattctcaagaacaaaaataggaggctccacttgagtcttttctattttctagagcctcgtttcttttaaaccatacaccaagcattgttttggattttcttttaggcgggtgtggtattcatggttttagcttcaagatgtaacctttgattttgctacaagcatgtcgattttgctgattacattgtttgtt

SEQ ID NO: 48541 - DNA, 260 bp, Glycine max
  unsure (1)..(260): unsure at all n locations; Clone ID: 701135631H1
atcccctttctccttctaacgagtgaggnaaaatggcgcgtaagaagancagagagtatgactcaaagaggtgtgaaggagcacngtaagagacacnccggcaaggngnngccgagcaagncngcacaaannaccgcantaactgattncactgagctacaagagaaggaaccctggctttcatcttctaaattggttgttanacctgacatgttatttggaaagcgtggcaaaagtggtttggttgcntgaatttggat

SEQ ID NO: 48542 - DNA, 225 bp, Glycine max
  Clone ID: 701135632H1
ggttttctttctcgaactcgaacgaagatgcgtgagattcttcacatccagggagggcaatgcgggaaccagatcggagccaagttctgggaggtggtgtgcgcggagacgggatcgattcaacggggaggtaccaaggggacaacgagttgcaactcgagcgagtcaacgtctactacaatgaagcgagttgcggaaggttcgtgcctagggcggtgctcatgg

SEQ ID NO: 48543 - DNA, 255 bp, Glycine max
  unsure (1)..(255): unsure at all n locations; Clone ID: 701135633H1
gcgagttctataggatcgtttggtnataccgattagtgttactaaaacaacgtttttgtgatatcgngnaaaaaganaaataaaaagtgatgtcgangagaccggggaatccttatanaaggttcggtgacagtngcggtggactgttctcgaaatctaggtcgccaccggttttgtctattgcgctcgtagttctgggaggtttgtttctcgtggctatgtgtntagaggctcaggtggaatggaaaccgtata

SEQ ID NO: 48544 - DNA, 256 bp, Glycine max
  Clone ID: 701135634H1
gatggaggggaaggagcaggatgtgtcgttgggagcgaacaagttccccgagagacagccgattgggacggcggcgcagagccaagacgacggcaaggactaccaggagccggcgccggcgccgctggttgacccgacggagtttacgtcatggtcgttttacagagcagggatagcagagtttgtggccacttttctgtttctctacatcaccgtcttaaccgttatgggagtcgccggggctaagtctaagtgt

SEQ ID NO: 48545 - DNA, 117 bp, Glycine max
  unsure (1)..(117): unsure at all n locations; Clone ID: 701135635H1
ggataaccnaaaccggancagaagcaaaagcagaaacgangatgggtngttccgttttcactcacttcctggttntcccctacctcttnnactccttctctttncacacnnttnaca

SEQ ID NO: 48546 - DNA, 251 bp, Glycine max
  unsure (1)..(251): unsure at all n locations; Clone ID: 701135638H1
gaacaatttagatcagactctaaaacagttaaccaacaagctttcttttatgctagtgaacgcgaagtccatcacaacgacatatntatattcggcatagataacaccgtactctctaatatcccatactatgaaaaacatggatatggggtggaggaatttaatgaaaccttatatgatgaatgggttaacaagggcgacgcaccggcattgccagagactcttaaaaattacaacaagctgttgtctct

SEQ ID NO: 48547 - DNA, 243 bp, Glycine max
  unsure (1)..(243): unsure at all n locations; Clone ID: 701135639H1
gtttattcaacacctgtttctttctctgaaatggtggaaaagggtgaganttcaaancgctgagtntncgagttcanaacactgagctcaattgtncntaagccgtgcgtgagttgttnaggtcctcaagatgcttgcgctgacagattctcctctacttattgctaanacatttgaagcaattaaaataccaacaagtacacgaggcactgtgttatgtgctgcaaaaggtcaaagaccaag

SEQ ID NO: 48548 - DNA, 252 bp, Glycine max
  unsure (1)..(252): unsure at all n locations; Clone ID: 701135640H1
gctacaagatggtacaganccccagaactatgtggctccttcttttcaaagggaggactatttatctctgcctggnagttgatntnntctgtccttcagtacacaccagcaattgatgtatggagcattggatgcatttttgcagaggtgtngacaggaaaaccactgtntcctggtaaaagtgtcgtgcatcanttagatttgattactgatcttctcgggncaccatcacctganactattgcaggagtt

SEQ ID NO: 48549 - DNA, 254 bp, Glycine max
  unsure (1)..(254): unsure at all n locations; Clone ID: 701135641H1
acaaacacctcgtccgtcacaatgcagctagctgtggcggccaacgctgtcgtttcaccgtcgccgttccgacctcntccccttctccggtcatccnttctccggcgtctccgggaagctcactccccaatccataacgtnttcacgcttgaagcccctcaccgtcttcgccgccaccaagaaggccgtcgctgtcctcaaggggacctccgccgtcgaaggcgtcgccactctcatccaagaagacgatggcc

SEQ ID NO: 48550 - DNA, 255 bp, Glycine max
  unsure (1)..(255): unsure at all n locations; Clone ID: 701135646H1
ggagatcttttaacttgtttactgtgctaatgagttcattgctgtaatattataatactgatatgctaggggtggcagcttggaagcatatgcacacaacaagggtggcatggtacatttctagtagtataggatttggcatagctgagcatgctatgtagtaaaaaagattaatatatataatcattcaatgncatattatgaacctgaaactataaatcctaacaaggttgtaaattcattttanaatattgc

SEQ ID NO: 48551 - DNA, 239 bp, Glycine max
  unsure (1)..(239): unsure at all n locations; Clone ID: 701135649H1
tccatctcttgtntcttgctttctactcttcaccatgtcacangctgggaaaatcaccactncnattcggggttcatgcaaccgctacaaagtggttcaacctcttcgcaacacaactccatcatgttcaaaacctaactgatagagtgcatggaaccaagntgcatcaaggtgaagactggcatcacaacgagacagtcaagcactggacttataccatagatggtaaggttacaaca

SEQ ID NO: 48552 - DNA, 82 bp, Glycine max
  unsure (1)..(82): unsure at all n locations; Clone ID: 701135653H1
ggttgttggagtggtgtctttgctacttnccaccctgtanagcgtatttncncgtgaatttgccccattgctagttcctcat

SEQ ID NO: 48553 - DNA, 253 bp, Glycine max
  unsure (1)..(253): unsure at all n locations; Clone ID: 701135656H1
gacaacttgttgttagtgtcctttctttgcattgattgcnttattctttcaaaattcattgctctntttgaagagaaaaatanacccagtaagtgacattgaagtctattatttttcaagactcacgccaatctttgtggacgaagtaatttttggccaaatttattgtcagataattaccaacatctataattgcttttgaaagtacatcatactggttcaaattgtgatttagatgatgatccaactgagt

SEQ ID NO: 48554 - DNA, 252 bp, Glycine max
  Clone ID: 701135657H1
attgatgcagaaactacaagaaaaagccttgaaaaaaagttggagatttggacagctcgcttagcgcacaagatcggcccaacgcggttgcttgcttagcggtcagctcacacttagcgcgaagaaggctgacgagaaagtccaaggttgtgcttagcacaaactccgcattatgcgcatgattacattgtcactcccgctaagcccaagaatgcgcacttagtgcgaagtcagtgtagaaagtaaattacc

SEQ ID NO: 48555 - DNA, 243 bp, Glycine max
  unsure (1)..(243): unsure at all n locations; Clone ID: 701135659H1
gggtttggaagaagctgatccgagaagatggtgcagcgtctcacctaccgcaaacgccacagctatgctaccaaatccaaccagcacagagtcgtcaagactcccggtggcaagcttgtttatcagaccacgaagaagagggccagcggacccaagtgccctgtcactggaaagaggattcaagggattccacatttaaggccagcngagtataatagatcaaggttacacagaaaccgaagg

SEQ ID NO: 48556 - DNA, 255 bp, Glycine max
  unsure (1)..(255): unsure at all n locations; Clone ID: 701135661H1
caaaaagaaagaatcccaggcgatgagaaagatggaggggaaggagcaggatgtgtcgttgggagcgaacaagttccccgagagacagccgattnggacggcggcgcagagccaagacgacggcaaggnctaccaggaaccggcgccggcgccgctggttgacccgacggagtttacgtcatggtncgttttacagagcngggatagcagagtttgtggncattttctgtntctctacatcaccgtcttaaccgt

SEQ ID NO: 48557 - DNA, 261 bp, Glycine max
  unsure (1)..(261): unsure at all n locations; Clone ID: 701135662H1
cggtgcttttattaaatgggacggttgaatatganagggtttgctgaggaggttgannctnccatatggataacattngaatacctgnacaaatgcactaangatattgatgttcatcncctcaaagcatagctctncacgttatgcactaagaaataatgggcttggcctctggataagtgcttatatgtataataatcggtgtggagtttgacgagaaggatgcttatanagatccttcctttgtatggatanacttgg

SEQ ID NO: 48558 - DNA, 263 bp, Glycine max
  unsure (1)..(263): unsure at all n locations; Clone ID: 701135664H1
ggcagattcaaaatcaggattgaggaaaccagtgttcaccaaggttgatcagctttgcccggggaccagtgggcacactttaactgtgaaggtggtcaatgctaagatggtgatgcagagaggtcgctctgatggtcctcaatctcgtcaaatgcgaattgctgagtgcttggttggtgatgagactggaatgatcatattcaccgccagaaatgatcaagtggatncgatgacagagggagctactgtgatcctgcgtaacg

SEQ ID NO: 48559 - DNA, 254 bp, Glycine max
  unsure (1)..(254): unsure at all n locations; Clone ID: 701135666H1
cccaactgcaagctganaatgaattgagagaganaacaatgtttatgaggnatgatcatgaagctcagatcaaagcattgaggtgtgnncttgaagatgagtgtcggnagctggaagaggagttgcatcttcaaaaaatccaaagacgacangcaaagggctttgttgcagttgcagtgganagtgntgagtgacaagcctantagaggaccaagaagtgnattcaaaacaggttgacttgtnnntgaatctat

SEQ ID NO: 48560 - DNA, 247 bp, Glycine max
  unsure (1)..(247): unsure at all n locations; Clone ID: 701135670H1
gcctatatcgtgagncaggctgcnaagagtgttgtggnaaatggccttgccagaaggtgcattgtccnagtttcctatnccattggtgtccctgagcccttgtcagtgtttatggacacttatggaactgggaanattcctgacaaggngattcttcaaattgtgnaggagaatttcgacttcagacctggaatgatcaccattaacttggaccttaagaggggtggccataggttcctcaagacag

SEQ ID NO: 48561 - DNA, 247 bp, Glycine max
  unsure (1)..(247): unsure at all n locations; Clone ID: 701135672H1
catttatgcatatggntttgagaagccatcagctattcagcaaaggggaatagttccattctgcaagggacttgacgttatacaacaggcccagtctggaactgggaaaacagcaactttctgctctggaattctgcagcaacttgactatagtgtgactgaatgccaagccttggttttagcaccaactagggagcttgctcagcaaattgaaaaggttatgcgggcactcggagattatcttggt

SEQ ID NO: 48562 - DNA, 250 bp, Glycine max
  unsure (1)..(250): unsure at all n locations; Clone ID: 701135673H1
gggtctcaccgagaacaaaaaatgggtgtttgtgggtcgaggcccaaagtgaacgaagaagacctctgcatcannnnnnnnnnnnnnnnnnnnnnnnnnnnnnnnnnnnnnnnnnnnnnnnntccncagaagacgcgtatcttctagaaagatcgaagccaacaacgtttctcactctaattcagctcttcaagcttctaatcgcgcttctgatgctgcttggtttgattctacttcggcgttggattct

SEQ ID NO: 48563 - DNA, 248 bp, Glycine max
  unsure (1)..(248): unsure at all n locations; Clone ID: 701135674H1
ggggaagacattttgcagcaccagcaatcaagtggtatccattcagatgccaatacattaggtggttctcaagttgtcaaagaattcgaatcaggcacgagactancatnccccttgacacgcnagcangngaacccaaagacaacagcaactcttcgcaaccatgcattggcggaagagatcattcaggagtgatcataagaaatagtgagaccaacattgttggtaggtaggtatatgatgcttat

SEQ ID NO: 48564 - DNA, 249 bp, Glycine max
  Clone ID: 701135675H1
ggcgacggcaacataccctccaccgccaccttattacaggctttacaaagattacttgcaagaccctaatttctgctcccgaccctccaccacctattgaaggcacttatctttgttttggagccaattacactactagtgatgttctacctaccttggaagaacaaggggtgcgccagtctattctaagggccctaatgttgatttcaagaaagagctgaggtcactcaacggagagttgcaactaca

SEQ ID NO: 48565 - DNA, 229 bp, Glycine max
  unsure (1)..(229): unsure at all n locations; Clone ID: 701135676H1
aggctttctacatatacatatatcntccaaaacaacgattnctcatcagctgtagcaaagaatcaaacttcatagaagtcaaaatatgaagaaatcaatatgtctagatacccccttttctatggataaaagatctaattgataaaggaagcatcgtaaggatccattaacgcggttttgaaccgatacaataaaaactgcttacttatctcatgatagaaaagtcagg

SEQ ID NO: 48566 - DNA, 253 bp, Glycine max
  unsure (1)..(253): unsure at all n locations; Clone ID: 701135677H1
ggttcatcatctcaaaaaggcttttgtgattctcgatttgatttggatcgcacagaacgaaggcatgggtcaagctttttcggaagctctncgacaccttcttcggcaacaccgagatgcgggttgtgatgcttggnnctagatgctgctggcaaaacaactatactgtacaagctccacattggagaagttttatctactgttcctacaataggttttaatgtggagaaggttcagtataagantgttgttt

SEQ ID NO: 48567 - DNA, 260 bp, Glycine max
  unsure (1)..(260): unsure at all n locations; Clone ID: 701135680H1
caaagaaatactttgtgcgacctaacaccgctgttgtacagccctgggactcttgtatcatcagagtcacccnccaagcccaacgggaanacccaccagacaggcaatgtaaagacaagtttctcttacagagtacaacagtgaatccaaatactgatgttgatgatctcccgccagatacttttaataaggagagtggtaattcagtagaggagttgaaattgagagttgcatatntctctcctacctcacctgaagga

SEQ ID NO: 48568 - DNA, 252 bp, Glycine max
  unsure (1)..(252): unsure at all n locations; Clone ID: 701135681H1
gaaaatganagtgcttgttttgtttgttgctacagttttggtagcatatgaatgccatggctcagactaccagaagntccctctccaaatgaaaactgggtttggtgggcaatacagcaatgaggtngcatgtgccagtnggaggcttggcgtggaagcaaacaacgtagtcaagtngcaaactgntcctgcagcttgcggagagtacatagctgactacgttctaggagaccaatatagatcggattccca

SEQ ID NO: 48569 - DNA, 251 bp, Glycine max
  unsure (1)..(251): unsure at all n locations; Clone ID: 701135682H1
accatattgaaacatatgatgtgactacaattagagcaagcacacctatgtttctcatgtctcggaagattaaatcacttggtgtcaaatgggttatctcaggagaaggatctgangagatctttggngggtatttgtcacttccacaaggcacccaacaaggaggagttccacagagaaacatgccgcaagatcaangcacttcaccaatatgattgcttgcgagccaataaatcnncnggggcctgggg

SEQ ID NO: 48570 - DNA, 248 bp, Glycine max
  unsure (1)..(248): unsure at all n locations; Clone ID: 701135683H1
ggggtggttctgttggatacatgggccagcatgtttgggatgagggttaggattgcattagctgaaaagggtgttgagtatgaatacnaggaagaaaatctcaggaacaagagtcctttgcttttgcanatgaacccaattcaccagaaaattccagttctgatccataatggcaaaccaatttgtgaatctgcaattatagtgcagtacattgatgaggtctggaatgataaagctccaatcttgcc

SEQ ID NO: 48571 - DNA, 247 bp, Glycine max
  unsure (1)..(247): unsure at all n locations; Clone ID: 701135685H1
agctagtttatcgtgaggagaatatgaagttgtttgtnttctntgttgctgcagtagttttgggngcatggccatgccatggcgcaggctaccaaaggttccctctccgaatgaaaactggctatggtgagcgttcttcggaggtaaaatgcgcaagtnttaggcttgctgtggaagcacacaacatccgagngcttaaaaccattcctgaagagngcgttgaaccaacaaaggactacattaatgg

SEQ ID NO: 48572 - DNA, 71 bp, Glycine max
  unsure (1)..(71): unsure at all n locations; Clone ID: 701135688H1
ctctcntcttccggcgttctggggntcncatcgccgggcgattccncantntgcttntcttggtcaccngt

SEQ ID NO: 48573 - DNA, 249 bp, Glycine max
  unsure (1)..(249): unsure at all n locations; Clone ID: 701135689H1
gggcaccggctacatcggcaaacatatagtggaagcaagcgcaaaggctggaaatcccacttttgctttggtgagggaatccacactctctgacccctccaaggcacaactcatccacaattttgaggcnttgggcgntaatttggtccgcggggatctgtacgatcatgagaagttggtgaaagctatcaagcaagtagatgtcgtcatatccacgctgggtcacctgcagcttgccgatcagctcaa

SEQ ID NO: 48574 - DNA, 249 bp, Glycine max
  unsure (1)..(249): unsure at all n locations; Clone ID: 701135690H1
cgatttcgctcccacccttgagctccgccagcttatccccgccgtggattattcacaaggaatagcatcctatcccctgttggtgttacaggnaacacatttcaaatgtggaggggtttcccngggagtnggtatgcaacatcatgtagcagatggagcctctggtctgcacttcatcaatacatggtcagatgtggctcgtggcttggatgtttccattccaccattcattgatcgncacaatacttc

SEQ ID NO: 48575 - DNA, 251 bp, Glycine max
  Clone ID: 701135692H1
cccgtgttccgacttccgagtaacattcagtttcatagttcactctctgtactcttcacttcttctacgctgctaaataaggttcttctgccactgtgaacagtgaattgttcgtgctgctatgttcaatggcacccatccagaaaaaatcgaagaccaagaagaagaccaagaagttcaaaaaacacaaacaggtgagcctggtccccgttgagcccagaaccagtgagaccgattggtgggactctttc

SEQ ID NO: 48576 - DNA, 251 bp, Glycine max
  Clone ID: 701135693H1
gacaatgaggcctgctcttgctttgcttcctcttctatttgctttcttgttagctgccactacggaatcaagaaaagatccaggggaatattggaaaatgatcatgaaagatcaggaaatgccagaaggacttcaaggtcttgtttcatttcaatctgaaaataaccctaagactcaagagcagcttggtaaaggttccaaaaaccattgtgaagagtctctagttacaaatacacaagttaacagtgact

SEQ ID NO: 48577 - DNA, 254 bp, Glycine max
  unsure (1)..(254): unsure at all n locations; Clone ID: 701135694H1
ctcttttaagctatttccntctcttaacacaattggttgtgccaattgccatagtcaccaaccaattaacaaaggtatatatatcatcatatcatcaccaaatgaaaaatattgggttgttttttcttgtggtggtggcnacttttgtggtggcagccacagctggtagcttttaccaagactttgaaataacgtggggtggtgagcgtgccaaaatctatgagaatggaaaccttctcacactctcccttgat

SEQ ID NO: 48578 - DNA, 157 bp, Glycine max
  unsure (1)..(157): unsure at all n locations; Clone ID: 701135695H1
cagtcactgcttngtntagntcagaaccagatcgtgttctcttcttccnttggcaaacntggcaactncaaatgagcnagcagagnnagcangnggcggatgganngcncctcgccggacngaacgagggnctgacacgagagttggcggangacgg

SEQ ID NO: 48579 - DNA, 260 bp, Glycine max
  unsure (1)..(260): unsure at all n locations; Clone ID: 701135696H1
gaaacactgtactggttgatgcgctctcacgacgcattcccttggtcagtgacagacctacaattatttttggagccgatgtgactcanccacatcctggagaggattcaagcccatcaattgcagcagttgtggcttcgcaagactatcctgaaattacaaagtatgctggtttagtttgtgcccaagttcataggcaggaactcattcaggatcttttcaaacaatggcaagatccagtcagaggaacagtgactggt

SEQ ID NO: 48580 - DNA, 267 bp, Glycine max
  unsure (1)..(267): unsure at all n locations; Clone ID: 701135701H1
gtttgtccaacgtggcaccgtggataacaactgtgggagcgggaactatgcgaccgcgatttccctgcttacataaccctcggaacagggaaaacataaccggagcttctctttatagcggtaaacccttntcggattcgccgcttcctcttgtttacgctgggaacgcgagtaactcttctgtagggtatctatgtttgcaagattctctgattcctgagaaagtttcagggaaaattgttatatgtgagagaggtgggaatccga

SEQ ID NO: 48581 - DNA, 259 bp, Glycine max
  Clone ID: 701135703H1
cgagcaatggcgacatcgctggtgcgatcgggttttcttcgaagcgccctaagaggaagcgctcgtggctcccaggttccgaagcgaaactttgttcctctggtcatcacgatgatgcatatgagacggccaaatgggagaagattacatatctaggcattgttagttgcactggtttagccgtttataatctatcaaagggccacccacacttcaaagaacctcctgcttacccatatttgcatatccgcaataagga

SEQ ID NO: 48582 - DNA, 256 bp, Glycine max
  Clone ID: 701135704H1
gcttgctactgagtttccacactgcataccttaggtcttccgaattcgaagttaatttgcaagatggctaaggaaaaggctcagatcaacatttggtggttggtcatgtggaccctgaggaggcaaccaccattaacgagctgaagaagcctgttgtggagaaagaagctccagggcatgccatatgagggcatgcacgtacggcctcggaggggaaccagaaaattatgttaacaaaataatctggaaccctaat

SEQ ID NO: 48583 - DNA, 255 bp, Glycine max
  Clone ID: 701135705H1
gtggtaatatgggaggagcattcatgatcctcctttcccttcccttctccctcatcttcctcctcatcctcttctacataaccctccccgcacaacggggcgagggaagaaaatctctggccccgctggtccggcaacctatcccctcataggttgcctgatatccttctacaggaacaggtaccgtttgttggattggtacactgagctactagctcagtccccaaccaacaccatagtggttcaaaggcttgg

SEQ ID NO: 48584 - DNA, 253 bp, Glycine max
  Clone ID: 701135706H1
attcctccctggagtaacttgtggcttgttgcttctataatcctaactatgcttcttcacatgctaatcttatatgttcacccactgtcagtcttttctctgtaacaccattatcttggactgactggacagttgttctctatctttcattacctgttatagtcattgatgaggtgttgaagttcttctccagaaatcccattggtttgagattcagattatggttcaggaggtcggatttactaccgaaaaa

SEQ ID NO: 48585 - DNA, 243 bp, Glycine max
  Clone ID: 701135707H1
ttgatttgtagtttgttttgtgctttagataaaagttctgccaaatcaagaggggttttaagatcatagtgtgtgttttgcacaatggctaagttctttgctgctatgatcttggcactctttgccatttccatacttcaaacagtggtaatggctgctaatgaacaaggaggccacttgtatgacaacaagagcaaatatggaagtggaagtgtcaagagttaccaatgcccatcacaatgc

SEQ ID NO: 48586 - DNA, 251 bp, Glycine max
  unsure (1)..(251): unsure at all n locations; Clone ID: 701135708H1
gtacttgtgttcttctatcccttctcattctttcactctttgtggctgaaatatatggaaatagacaagttcaagctcttaacaaactgcaaagtccaccaagttcagaggaaattcacaaattgataggagtgagtttgaggtagaggagcttgcnatgatcgcattgttcactctcaagagggtctcaaagagaaagatagaattgagagtcttccaggacaaccccctgtgagtttttctcactatgg

SEQ ID NO: 48587 - DNA, 251 bp, Glycine max
  Clone ID: 701135709H1
gctttttctctttccttattctatttcaaacttccaccagtgatggcaggtttggctccagaaggaacacaatttgatggtcgccaatatgtgctaagatgagtgaattgctttccactgatgggcaagaattcttcacctcatatgacgaagtctatgacagctttgatgccatgggattgcaagagaatcttctgcgaggcatatatgcttatggttttgagaggcctctgcaatccagcaaaggggaa

SEQ ID NO: 48588 - DNA, 208 bp, Glycine max
  unsure (1)..(208): unsure at all n locations; Clone ID: 701135710H1
gaaccgggtgtgggtgttgttggtgttggcggaggcagatcngagatctggatagatatanatggagggagttggggcccggcttgggcggtcctcgacccgctacggaccggccacggtgttcactggaccggtccggaagtggaanaagaaatggatccacgtgtccccttcttctgcttcctctaattccaacgccaataatcat

SEQ ID NO: 48589 - DNA, 250 bp, Glycine max
  unsure (1)..(250): unsure at all n locations; Clone ID: 701135712H1
acaaccaccaccatctagggtttttctttttctcatggctagtttgtcaactaggattttcttcatcatgcccccttgtgtgcctggctcnggtccaatggcacaaggggaaatgacatgtggccaggttgtgagcaacctgaccccatgcatctcctatgtggtgtatggtggaaccaatgttcctgaacagtgctgcaatgggataagaaatctctatggcatggctcagaccaaaccagaccgccaa

SEQ ID NO: 48590 - DNA, 251 bp, Glycine max
  Clone ID: 701135713H1
ggcggcgtaaccctccaacaacaacacttcctcgtcagaaaatgtctctggtggcgaacgaggatttccagcacattctgcgtgtgctgacaccaacgtggatgggaagcagaagataatgttcgcaatgacctccatcaagggtattggaaggagattcgccaacatcgcttgcaagaaggctgatgttgacatgaacaaaagggctggtgagttgactgctgctgagttggacagtgtgatgactgtgg

SEQ ID NO: 48591 - DNA, 254 bp, Glycine max
  unsure (1)..(254): unsure at all n locations; Clone ID: 701135714H1
tacattttactttagtttgtgaaattctatccaaagattttgagantgtctagctgtgggtgtggnagcagctgcaactgtggcagcaactgagttgcaacaagtactcttttgactacgttgagaagatcacaaatgagactctagttttgggtnttgggccggtgaaggcncaattcgagggtgctgaaatgggtgttgcagctgagaacggtggctgcaactgtggatcaaactgcacttgcgacccatgc

SEQ ID NO: 48592 - DNA, 257 bp, Glycine max
  unsure (1)..(257): unsure at all n locations; Clone ID: 701135715H1
ggggtcacttccttgtacattggatggggattagatggctcngnttggatttcatcagaaatgaaaggcctgaatgatgattgtnaacactttgagtgttttccacctggtcacttgtactctagcaaagaaagagggtttcgcagatggtacaatcctccttggttctcctgaggctactccatccaccccttatgatcctctcgttttaagacacacctttgagcaggcagtcataaaaagattgatgactgatg

SEQ ID NO: 48593 - DNA, 266 bp, Glycine max
  unsure (1)..(266): unsure at all n locations; Clone ID: 701135717H1
ggcactctcttctcgtctcttttccaaatccaaattgatctatggcagtcaaatacttctacaaaaggagcatgctnattccagttcgtcactttgcaaagagtctgcccctcctgcccttaagggagacgagatgctgaagaacatttttgtggaggtgaagaacaaatttgagaccgccataggaatattaaagaaggagaaaatcaccattgacccagaagatccagctgctgtttctcattatgcaaaggtcatgaaaacaa

SEQ ID NO: 48594 - DNA, 259 bp, Glycine max
  unsure (1)..(259): unsure at all n locations; Clone ID: 701135718H1
gattttgtagtaagtgaggtgccaatatggtgaagatagctcttggtactttggatgactcttttagcgctgcctctcttaaggcttatttcgagagttccacgcaactctgatttncgtgttcgctggtgttggatcagccatcgcttacaacgagcttacaaaagatgcagccttggatccaacggggctggtggcagtagctgtggcacatgcatttgcactgtttgtaggtgtctccgtcgccgccaacatctca

SEQ ID NO: 48595 - DNA, 255 bp, Glycine max
  Clone ID: 701135721H1
atttattcaaacctaaagaaacacagtaacacaccatcacaaactcatgtaaccctgccaataaaccatcacccctaaactccagcaccagcgcttgctcacttcaatacacaactcccagaatttctcatgtcaccacgtggcaagcacgctgatgtggagccaagtgttgtgcttacacgtaggtgtaccctccataatacaaccaaagacttaagcatcatataataatattaataaagtaaactaaagaaa

SEQ ID NO: 48596 - DNA, 233 bp, Glycine max
  unsure (1)..(233): unsure at all n locations; Clone ID: 701135722H1
ggcgctccagaagagggaaatacatttcatgattcaaanctgtcatgaattcgacanttgatgatgatcggaggcttgcgttttagattttnatgaatcgtttgatgttcatctaacgggtgtaattgatgcacggtaaccgcgtganatcctagtagtgcttttaatagtgtgggtgtgagagaagtgagaagtgagtgagtagtgagaatggagtttcaagggttaccgga

SEQ ID NO: 48597 - DNA, 253 bp, Glycine max
  unsure (1)..(253): unsure at all n locations; Clone ID: 701135723H1
gtggcacccgcaccggccctagtggcgatgctgccatcccctggcatgggccacctaatcccaatgatcgagttcgcaaagcgagtggtgtntaccataacctggcggtgancttcgtgatccccactgacggcccaccttcaaaagcccaaaaggcagttctggaggcccttccggactcaatttcccacaccttcctccctccggtcaatctctccgacttcccgccggacaccaaaatcgaaaccctgat

SEQ ID NO: 48598 - DNA, 255 bp, Glycine max
  unsure (1)..(255): unsure at all n locations; Clone ID: 701135724H1
cagagagagagaatggggaaaagacaaatcccagaccctccgaactttaagaaatacggcgttcctttactactccgttgcgtggattccccacacgttgtcaaatcgcgccaaatcgaaaccgccgatgagtcctcggactccgatcacagcacttcgccggcgaccgaggcggagaaggaacccgcgacggtcgccggtaactacctgctgttcgccggcggnggcggagcaggccacagcggtatccccaat

SEQ ID NO: 48599 - DNA, 251 bp, Glycine max
  unsure (1)..(251): unsure at all n locations; Clone ID: 701135725H1
gcgaacagaaacacgaactaagaatccatggcgacaccaacgacgacgaagngaaaaccggtgttcgtgaaggtggatcagctaaaaccttgcaccaacggccacacgctnacggtgaaggtggtcagctccaagccggtgaagacggtgaccactcgcggcggtcgatcgtcgntgctcgcggcgcgnccgncgccatcgccgagtncctcgtcgtaganaaaaccggaancataatcttcacancacgc

SEQ ID NO: 48600 - DNA, 248 bp, Glycine max
  unsure (1)..(248): unsure at all n locations; Clone ID: 701135726H1
cacttttcaagaatcgtaagctatgggaaagtcttacccaactgtgagtgctgattaccagaaggccgttgagaaggcgaagaagaagccagaggcttcancgctgagaagagatgcgctcctctaatgctccgtttggcatggcactctgctggaacctttgacaagggcacgaagaccggtggacccttcggaaccatcaagcaccctgccgaactggctcacagcgctaacaacggtcttgacat

SEQ ID NO: 48601 - DNA, 258 bp, Glycine max
  unsure (1)..(258): unsure at all n locations; Clone ID: 701135731H1
gtttgtnttctttgttgctgcagtagttttggtagcatggccatgccatggcggcaggctaccaaaggttccctctnccgaatgaaaactggctaggtgagcgttcttcggcggtaaaatgcgcaagttttaggcttgctgtggaacgcacacaacatccgagccttaaaaccattcctgaagagtgcgttgaaccaacaaaggactacattaatggcgaacaatttagatcagactctaaaacagttaaccaacaag

SEQ ID NO: 48602 - DNA, 260 bp, Glycine max
  unsure (1)..(260): unsure at all n locations; Clone ID: 701135732H1
cgcatgcgcttagacttaaaggctatggcaatctgaggccagaagttgaagagggaatttgccaagtcttggctcatatgtggttagaatcagagttattcctggcactggggatgaaggtgnnnnnnnnnnnnnnnnnnnnnnnnnnnnatcgccttcgtcttcttcatcatcaaagaagggtaaacgttccgactttgagaagaaactaggtaagtacttcaaacaccagattgagtcagatagctcagcagcttatg

SEQ ID NO: 48603 - DNA, 261 bp, Glycine max
  unsure (1)..(261): unsure at all n locations; Clone ID: 701135733H1
gcagcatatagaattgtcttccatgatctaagccaggttttatgggatggtttatatgttggggatccagcatcttcaagaattgagccatgtctcaggaacttgagcggaagttaatgttcatttcagacactgttcatgaaagaattcgcacacgtattattactgaaataatgagagcttcctttgatggattctgcttgtnttgcttgctggangtccctcacgtgcttttacccggaagactctcagatcatagag

SEQ ID NO: 48604 - DNA, 253 bp, Glycine max
  unsure (1)..(253): unsure at all n locations; Clone ID: 701135735H1
gaggcctctctgttgggtgtgtctctgtttctctctcactgttgtngttgttgttgatccattgaagaggaacttgagaagcgagaagaaattgaatcctttggggtgaaatcggataacccaattggctgaaacctccaatgcggtgttggaggagaccctccttgnagaaggaacatcgcggatctgatgatggtggggacatgggtgatgaagatggtttcaggtggttgtagggtgttgtggggggcaa

SEQ ID NO: 48605 - DNA, 254 bp, Glycine max
  unsure (1)..(254): unsure at all n locations; Clone ID: 701135736H1
gaagacatacatacctccagaaggctttcttacaacactgaaagggttggattataaacttcaagtagggattggacacttttatcatatatctacgagggatgtttagcaaattttgaaattggagaggaaggagaagaagcatccaagctttaccctgaagtgaattacacacgcatggacgagtacctaaaantttatgtgtaaaaggaactcattcagtaggagttccgtgntcaaccnggaacncggtt

SEQ ID NO: 48606 - DNA, 245 bp, Glycine max
  unsure (1)..(245): unsure at all n locations; Clone ID: 701135737H1
agcaagcacacctatgtntctcatgtctcggaagattaaatcacttggtntcaaatgggttatctcaggagaaggatctgatgagatctttggagggtatttgtacttccacaaggcacccaacanggaggagttccacagagaaacatgccgcaagatcaaagcacttcaccaatatgattgcttgcgagccaataaatcaacatttgcttggggtctagaagcccgtgtaccatttttggaca

SEQ ID NO: 48607 - DNA, 253 bp, Glycine max
  Clone ID: 701135738H1
ctccgccatcttcctaagcatttcaactctctgcgcttcaaactgccaaacaatggcgttgttccgcttctctctgcttttcacactcctttttcttccattctcttatcgaatcactcagtaaaatgcggcgaccgtgacgaggaagatgatctttatcagggaatcaacaagtatagggaatcattaaacttgacatctctaacaaagaatgaaaatgcaaattgctttgctgatgaaatggctgaccagt

SEQ ID NO: 48608 - DNA, 227 bp, Glycine max
  unsure (1)..(227): unsure at all n locations; Clone ID: 701135740H1
tctaaaacttaccaacacaacaaaatcgagtttccaataaagagttttgttgaaatggaaaacgtccggcggtgtgtaaggaagatgatcagatggatttgcctcccggatttcgattccacccgacggatgancgcccncataagccattacctctacaagaaggtcattgacaccaagttctgcgccagggcaattggagaagtngacctcaacaagtccgagct

SEQ ID NO: 48609 - DNA, 245 bp, Glycine max
  unsure (1)..(245): unsure at all n locations; Clone ID: 701135742H1
aaatntcaataatttgaactaaattagtttcaagtcctaagancttacatttcgagatatgcttaattcaacataaccctgttgtacatttgttcgatttcttatgcaagccaaatttcacatttaagccttagtgttaaactgttaatgatcctcactcatagaacttgttcatatcttgtgaaccaactggataaaatattgattagaagcatgaaccttcaattcattatacctaagtttag

SEQ ID NO: 48610 - DNA, 250 bp, Glycine max
  unsure (1)..(250): unsure at all n locations; Clone ID: 701135745H1
gcttggactgcctggnaacggaggcactgaagaagtgctcatcaggaagaggggtttctctgagactgaaactggtcatgaagatgagttgccaccactgtggatttgatgcttaatctttcttctaaggaggccgcaannannnnnnnnnnnnnnnnnnnnnnnnnngataagcacaagacttngcctaaggagaagacccttcngccagcagatcctgctaagcctcnagcnaagacgcaggtggtgg

SEQ ID NO: 48611 - DNA, 244 bp, Glycine max
  Clone ID: 701135746H1
gccctggtcaaaccatctcttccattaaatttgccagctttggaactcctttgggtacttgtgggaactatgagcaaggagttgccattccccagcatcttatgccatattagagaagagatgtataggaaaaccaagatgcacagtcactgtatcaaacagcaacttcgggcaagacccgtgtccaaaggtgttgaagcggttatcagttgaagctgtttgtgctccaactgctgcaaattgg

SEQ ID NO: 48612 - DNA, 253 bp, Glycine max
  unsure (1)..(253): unsure at all n locations; Clone ID: 701135747H1
aatccctctttccttgtggaatttccctcaaactgaaagggttggtgttttggtgtaaaagtagttcagtgtgtgnnnnnnnnnnnnnnnnngagtgagagttgggagtatcagtgtcaangcctctttggttgaggctccagttttgtgggctggaaggctcttcatcttctatgccctcctcaaggctggcttggctggatctcaagccaacccacttgtcttagcaaaggaagctgctaatggaaggaaa

SEQ ID NO: 48613 - DNA, 254 bp, Glycine max
  unsure (1)..(254): unsure at all n locations; Clone ID: 701135748H1
tgatattgtgaaaactgcaagatttaaggagttggctccttatgatcctgactggtactatgtcagagctgcttccatggcaagaaagatcacttgagaggaggacttggtgttgntgcctttcagaggatttatggtgggagcnagaggaatggtagccgccctcctcatttctgcaagagcagtggtgctgttgctcgtcacattcttcaacagttgcagaacatgagcatcatgaactggacaccaagggt

SEQ ID NO: 48614 - DNA, 255 bp, Glycine max
  Clone ID: 701135749H1
gtttgtataaaagaaaagctagcgtcatcggaccttctccggcgtcgaccatccgccgtcgcagacgacggcgcccatggctcatctgccgttggatccgtactacctttaccaacaacaagatgagcggagaacatcaacacgttatttgtctccggtctcccagacgacgtgaaggcgcgtgagattcacaacctcttccgccgccgccccggcttcgactcctgccaactcaagtacaccggccgcgccaac

SEQ ID NO: 48615 - DNA, 258 bp, Glycine max
  unsure (1)..(258): unsure at all n locations; Clone ID: 701135750H1
cacaagttggagacaatggtgattatgttaatgaccaatgtgcatgatatatattacaacttaacagcataattgtnctttgtcttgtataatttcatccatcaattgtttattgggtgattagttttataagaatccatgaatttnttgggagcatggcctgtgtggtttgaccgagccagtctgggctcccatataatttgttgagggacccattaaaatggtattctgtaggaaaaancnctggaaaggccctaa

SEQ ID NO: 48616 - DNA, 251 bp, Glycine max
  Clone ID: 701135752H1
gcaatgggttggatcggtgagactgttgattccatcaaatctcttcagatccgccaggtcctcacccaggctgtgagcctaggcatgattttacgtctgcactgataatatggaaggcattgatgtgcgttactggcagtgaatctcccgttgttgttgttctttctggaagcatggaacccggattcaagcggggagacatcttgttcttgcacatgagtaaagatcctattcgggcaggggagatgttg

SEQ ID NO: 48617 - DNA, 252 bp, Glycine max
  Clone ID: 701135753H1
ggcatggcggctctcgtgctccttcgcttcatcgtccacgatcatgacaacctcttcgtcgctgccgaggccgtccactccctcggaattccgtcctcatctataagctcatgaaggagaagacatgtgctgggttatcactcaaatcccaggaattaacagctatctttttagctgtaaggctgtactgcagttttgtcatggaatacgatatccacaccttacttgatttcgctactttcgtaacaacag

SEQ ID NO: 48618 - DNA, 120 bp, Glycine max
  unsure (1)..(120): unsure at all n locations; Clone ID: 701135754H1
ctcagtggaggggaaaccaatgaactatgtgatcagtttaataacaattgtcactgtttatgaaattgtatatctataacttaagtagtntctcatttgttatgattagaatagttactt

SEQ ID NO: 48619 - DNA, 252 bp, Glycine max
  unsure (1)..(252): unsure at all n locations; Clone ID: 701135756H1
caaataacaagaaagaaacaatgaacgacttgttctccggttccttctcccgcttccgcagcgaccagtacctnccccggaccgccaccacgcatcgagatgggcgccaccgcctccggcgcggtcgcggcggcgaggtgaaccttgacaagttcttcgaggacgtggaaggcgtgaaggaggaactaaaggagttggaaggtttggctcagagtctaaggagcagccacgagcagagcaanncgctgcaca

SEQ ID NO: 48620 - DNA, 248 bp, Glycine max
  Clone ID: 701135757H1
ggcataacctaaacttacccttcttctctctgtgtgtgtgcgcatcaaacgcaaccagaagcagccatggccactgcaagaactgtgaggacgtttctcctcatgagttcgtcaaagcttactcttctcacctcaagcgatctggcaagatggagctgccagagtggactgatattgtgaaaactgcaagatttaaggagttggctccttatgatcctgactggtactatgtcagagctgcttccatg

SEQ ID NO: 48621 - DNA, 109 bp, Glycine max
  unsure (1)..(109): unsure at all n locations; Clone ID: 701135758H1
gggcttctgtgacctncaaccanaaatnctcccttnctaaccttatnacntctgctgcgttccttacaccatcantggcgcatgcaattgttcctcataacganatcct

SEQ ID NO: 48622 - DNA, 247 bp, Glycine max
  Clone ID: 701135759H1
ctcagtttctgttgtattttctcaattacaacatcgtattctgcaaattcaaaccgggtcttggttttctgaaagatgggaggtggcaggacaagcatcatgatgaatctgacaaaggaattttttcacaccttgctcatggggtagctggtgcagcacatggtggacatgggtacccacctggggcttacccaccaccacctggggcataccctccacaacaaggatatcctccagctgggtatcc

SEQ ID NO: 48623 - DNA, 256 bp, Glycine max
  unsure (1)..(256): unsure at all n locations; Clone ID: 701135762H1
ggagtccgttctgccacggctgagaaaatagcgacgcggaaacacgctcgtcttcaccgatcctgcgatccagcgcgacgtgtccagcgatnctctctctaacgagtcnacggagggcgaagaatcgcgaggctagccgccggtgaagagtcgcccgattcaagcccgattcatccccgatgcagagattcaaccacgattcaggaacaaaaacgagacaacctccgattcgtatcggtagcagctggaatcttat

SEQ ID NO: 48624 - DNA, 123 bp, Glycine max
  unsure (1)..(123): unsure at all n locations; Clone ID: 701135763H1
agggagtccgttctgccanggctgacnaaantagcgaccgcggtaaacacnctcgtgcttgcaangatgcctngcgatgccagcgncgaacgtgtccatgcgatntctactgctgctaaacna

SEQ ID NO: 48625 - DNA, 252 bp, Glycine max
  unsure (1)..(252): unsure at all n locations; Clone ID: 701135767H1
gtccgtgctccaactcatattatttccaccatttctgatgacagaggagaggagccatgctatgctggtgtacccatgtcttccattatgaaaaaggttatggtgttggtgatgttatctctcttttgtggtttaaacgaagccttccccgtnactgtactcaatttattgagatatgcatcatgctatgtgccgaccatggtccttgtgtctctggtgctcacaatactattgtgacagcaagggctggga

SEQ ID NO: 48626 - DNA, 249 bp, Glycine max
  Clone ID: 701135771H1
gcggcaacagggagagaagatgaagttcaatccacgtgtgtcgagcagccgccgcaagagccgaaaggctcatttcacggcgccatcggcgtgcggcgggtgcttatgagcgcccctctgtcggcggagtgcggtctaagtacaacgtgaggtcgatcccagtacggaaggaggacgaggtgcaggtgatgcgaggctcatacaagggtcgcgaggggaaggtgactcaggtctaccgtcgaaagtggg

SEQ ID NO: 48627 - DNA, 238 bp, Glycine max
  Clone ID: 701135773H1
ctcctcactcaaacttcccctctctacgccgttcctcccaaatggatgcaccaatggagttttggggtgttgaggttaggttggtcagaccgtgacagttgacccaatggatcctgtggattcatacatacacatatctcaggttgcgctcggagaggcgaaaaaggagaaacctaatgagtctgtggttttgtatttgaaagttggtgaacagaagattgtcttgggaaccctttct

SEQ ID NO: 48628 - DNA, 245 bp, Glycine max
  Clone ID: 701135774H1
ctgacagtggtggcatctctacatatcattcagcacatgagaagcctgatgctgcttctgtgttggaaaggaggattcaaatagattggatagttctgaccaggattggcagggcaatagacatgagagacggagcaaacagagtcgtgaaaaagaaatctccgaagaagtcccagtggtgaaaccaagatctatgcggcgaaggcagtcaagatcacgactacctggttactacgatgccacta

SEQ ID NO: 48629 - DNA, 108 bp, Glycine max
  unsure (1)..(108): unsure at all n locations; Clone ID: 701135775H1
agctggcattggttcanngnctaggtgggctctttgtaaacaaggatgagaagctnaactgatcaagatcttccaaaatattncatctctggctttacaacaancana

SEQ ID NO: 48630 - DNA, 247 bp, Glycine max
  unsure (1)..(247): unsure at all n locations; Clone ID: 701135776H1
cacagcttcagttcgtttttgtngatnctgtgaacttatggctgacggggtggtcnctgttggatacatgggccagcatgtttgggtgagggttaggattgcattagctgaaaagggtgttgagtatgaatacaaggaagaaaatctcaggaacaagagtcctttgcttttgcaaatgaacccaattcacaagaaaattccagttctgatccataatggcaaaccaatttgtgaatctgcaattata

SEQ ID NO: 48631 - DNA, 250 bp, Glycine max
  unsure (1)..(250): unsure at all n locations; Clone ID: 701135777H1
cgcctttgcatttcagcagcacaccacantggccaccaatgcattcactggcacatctactctccatgcgatctgtcattcctcaaacaaggcatttgcctcaatttctggcccgacatctgcttcaatttccagctttgggagaaagaatgtntcttttagcttgcagccacgcttaattcgccttaaaatttcctgtgctgccgctaaaccagagacagtagagaaggtgtgcaaaatagtaaagaag

SEQ ID NO: 48632 - DNA, 255 bp, Glycine max
  Clone ID: 701135780H1
cgaacttgtagggcaattgagatggaaaaataataaaaagaaagagaaaaacacaggagaagagaagagagtagaagatacgaagatttgagcatttatataatcgaaattggaagcgaggaaggaaaatcgaaatcgaaaatggcagtaatggagaggttgaagatgttcgtcgttcaagagccagttgtcgccgcttcctgtctcatcgctggcttcggtctttttcttcctgcttttgtgaggcccatgttg

SEQ ID NO: 48633 - DNA, 254 bp, Glycine max
  unsure (1)..(254): unsure at all n locations; Clone ID: 701135782H1
gttctgactcagtgcttgtgttggacgcagaagaaccagaaaagaaaaacaagcacgaggagatgattaacttcgaagaaaccgagttgcactcggcctccctggcgggtctgcgagtgatcacaacgagtcaacaacggtcaagggcagtggtggaaagagaggcttctctgaaactggttctgttgatttgaagcttaatctttctccantgatgactctgcctcagattcaccttcatctgcgtctacaga

SEQ ID NO: 48634 - DNA, 201 bp, Glycine max
  Clone ID: 701135783H1
ttggccctggctcccattgctaaacctcttgctgggagaagctttgcaagcgaaccctaaaacttgttcgtagagctgccgaacacaaatgcttgaaaagaggagtgaaggaggtcgttaaaagtataaggagaggtcataaaggattgtgtgtgattgctgggaacatatcaccgattgatgtcatcactcatgttccta

SEQ ID NO: 48635 - DNA, 251 bp, Glycine max
  unsure (1)..(251): unsure at all n locations; Clone ID: 701135784H1
ctccaagaggcctgatcagaggaggaactttgatgtcaagggnagtgatttcaacaactcatcaaagccttttgatgatgatttcaatntggctggaagatcaccaattccaatggaccccttttctctatgcctcacaacaacaacactcacactcttgaagttggaggcttcaacaagggaggaatctattccaacaccaacaccacttcctccttatatcctaaccttaacaacaacactcttggagg

SEQ ID NO: 48636 - DNA, 250 bp, Glycine max
  Clone ID: 701135786H1
ctcaaccaaaaatctcccttctaaccttattcttcttctcgtccttcaccatcattgcgcatgcaattgttcctcaaaacgaaacctcaaatttgagaactcaggtgaacttggaccctacatcgttgagtacggtgcagattacagaatgataagcatcttcaactctccattccaagttggtttctacaacaccaccccaaatgccttcactctagctttgcgtgtagggctccaacgctcggagcag

SEQ ID NO: 48637 - DNA, 251 bp, Glycine max
  unsure (1)..(251): unsure at all n locations; Clone ID: 701135788H1
caagtatgcaagcgaaattacagcagagaaaganacagatgcaaatcaattgaccgatgtggagataccaaagacagaaaccgaaggtgtacatgaagataaatccctccaaccaacacttgacgcaacatctattggaaacgaaatagttgttgagagtagtcaagatgagagagaggaagaagaggaattcacagaaaagttaaatgaagaggtgaagattccacaaaatgataccgngcggactggag

SEQ ID NO: 48638 - DNA, 247 bp, Glycine max
  unsure (1)..(247): unsure at all n locations; Clone ID: 701135789H1
ctgaagcagaaaactacaataatagccaacacttgttcatgcaagaagacgaaatggcgccgtcnccgccgttngcctccggcggctgcggcggctttctgaagggtcgttggttctggctttgcatcacgacctggccgttttgccataacagttccatgatctcgtcgttttgcctgttttaattgtcgtcgctttcaggaaaaacaaaaaaattgaaaataatagtgaagagagagttacgtgg

SEQ ID NO: 48639 - DNA, 237 bp, Glycine max
  unsure (1)..(237): unsure at all n locations; Clone ID: 701135790H1
cnaganatatgggananattttntatctgcagctgttgatctcagaacctagcngcggtgtaaatcgccagttgatttaaagctctcactacgaacaccaccgggtgaagtaaaattganagtgttgaaggaaatagctaagnaacatcaaattgattgggatactacagaaagtgagacagaacttctcaagcctccagaagagctaatagtagggccacgtgcttttgtcagcgc

SEQ ID NO: 48640 - DNA, 244 bp, Glycine max
  unsure (1)..(244): unsure at all n locations; Clone ID: 701135791H1
ganaaccctggtttagtttggtgttaggctttgaagctaaagtcaacaacacatagcagaggatagatagtttgttcgttgcgttccatgtcggcgtcggagattgttcgggaactggattcgctgaaggacgaaaagaccataattgagcagaaaatctctgcgcttgaagctcaactcagagagattaatctccaaaacgacgccgncaccacccaacggattgacgcaggacatgattcac

SEQ ID NO: 48641 - DNA, 251 bp, Glycine max
  unsure (1)..(251): unsure at all n locations; Clone ID: 701135793H1
gggcaaccagaagcagccatggccactgcnaggactgtgaaggatgtttcacctcatgagttcgttaaggcgtactcctctcacctcaacgatccggcaagatggagctgccagagtggactgatattgtgaaaactgcaagatttaaggagttggctccttatgatcctgactggtactatgtcagagctgcttccatggcaagaaagatctacttgagaggaggacttggtgttggtgcctttcagagg

SEQ ID NO: 48642 - DNA, 251 bp, Glycine max
  Clone ID: 701135794H1
cagccactggccaagattgccattcacaagaccgttttggcgctacacagttctgcttccattatagcagtcccttttgtgctaggaacaagggtgaggatacccaatgggtgactgtagagctagagtccccaataccatctgttgatgactgggtcggagttttttctccagcaaacttcaattcagcaacatgtcctgacactgacggcattggctgggtagaggaaccatacatatgcacagcccca

SEQ ID NO: 48643 - DNA, 249 bp, Glycine max
  unsure (1)..(249): unsure at all n locations; Clone ID: 701135796H1
gcattaaggagtcctagagataacacaagaatgatcacattctttaccagtatcntccctcttcaagtccattgcgacggtatgngccaacgcatcagagctgttttttctctcctcctcatccagcttacacaataatgggacaaagtagttacactttgaatgacatatcatcatatccaatgacatcaaatgccccgtttgctctggatcctggcatggaacatctcgatacagaggcaatacacc

SEQ ID NO: 48644 - DNA, 269 bp, Glycine max
  unsure (1)..(269): unsure at all n locations; Clone ID: 701135801H1
gggaagtttatnttcgaggtaaaaagagagttggtttagnaagcgatgatgncatatnctggtcttcggattggattggttttccaaagtgctgcactctttgattctttgactgttcgtgaaaatgttggttttctcttgtatgaacactcaagcatgtctgaggatcagatatcagagcttgtcacggaaaccttggctgcagttggattgaagggagttgangatcggttgccttctgagttatcaggtgggatgaaaaagcgagt

SEQ ID NO: 48645 - DNA, 263 bp, Glycine max
  unsure (1)..(263): unsure at all n locations; Clone ID: 701135802H1
cgtnaacgantctnanngtagggntgtangnnnanttnttganatganccgacgtttaccctcctgccgggtaacaccttcaacaaccctccaccacccttctacggcgtccatcagccagaaacccacgtgtcccatgtcttcaacaacagcaactactccgctcccccgcctccaccaccttcccataaccaccaccatgactccttcactcacggaggcggcagcaccgtgcaccacacccctcacnacaacgcgccncc

SEQ ID NO: 48646 - DNA, 279 bp, Glycine max
  unsure (1)..(279): unsure at all n locations; Clone ID: 701135803H1
atcttactcaanatgatcaggattctgtcagantgttngctntngagggctgtgcngntcntggcnngntgtttgagccacaanattgtgttcgcacatatantcccggttattgttaacttctnccaggataagtcttggtcgcgtncgttacatggttgncaaatcaattgtatcagctttntgaagctgnaggtccctnaacctaccagaacggnattggnacctggcttatgtgcggttgcttcgagataatgaggctgtaatgcgcatagcagc

SEQ ID NO: 48647 - DNA, 273 bp, Glycine max
  unsure (1)..(273): unsure at all n locations; Clone ID: 701135804H1
gcgggcaaaggtgttagttcggtggctaaggcggtagcagantatgcagtatccttggcgtgagaagttggggaaatataaggatgagcttgccaagggtgtgtggggatactgggagctgggggcatggaagccgctgagtatcagtgctcggcatcgtgctagaattcgcaaggaagtcctccttgctggggaagattggccctacgatcctgcaaaggaaggagatgaagaccaggaggaaaggacacaaatgtgataggatttctgccg

SEQ ID NO: 48648 - DNA, 274 bp, Glycine max
  unsure (1)..(274): unsure at all n locations; Clone ID: 701135805H1
gtganttgattcagatgaggacgaaccatggaattttggctataatagggtggggtctaatgcctggcctgtaggggctattattgctagatatttcaggcacaaggatcccttatggttctatctccatgcaatcattcagtttgtaggattcacatttgggcttggtacagtaattcttggattacaactctattccaaaatgcaagtccatataccagctcacagaggcataggcatctttgctctggtactaagtattctcaggtgttgg

SEQ ID NO: 48649 - DNA, 274 bp, Glycine max
  Clone ID: 701135807H1
ggtttcgataaaggaatcgatgtcgatgtcgatgtcgacagagcttgatccagccaaagttgcttcttttgcttcgtggtttcctccaaattcagcaacgcagggccgaagcatattctaagctcaaaagtgggttttctgactacatggcctctggaggggaattggcttacaagcagctctgcagtgaaatcacaatagagtttaacaattgctcgaaaaaagtcctgaaatggagtcactgtttagaagccctgattactgccgagttgat

SEQ ID NO: 48650 - DNA, 275 bp, Glycine max
  Clone ID: 701135808H1
gtggatttgagacaagtggtggcaggtgtcctcaccctcacaatgtttgtcatgcttggaaatatgatcaaaagagaccacttcgataattcacttcaagaaaagcttccaggaggatcggaagatgccaactttgagactgctacgtttgatgctactcatgtaagaaagaatatagggctttggaagggagatgtggatgacctaaaaccgtgttgggttaagccatcttctgatgatgtggagcagacccaaggatttgttacttttgcgtt

SEQ ID NO: 48651 - DNA, 275 bp, Glycine max
  unsure (1)..(275): unsure at all n locations; Clone ID: 701135809H1
gaaaacaatgggttccgataatcaccagaacttggagttcttgaaggagatcggtttgggctcttccaacattggntcttacattaatggccagtggaaagccactggttcttctgtcacttctgttaatccttctaacaatcagagtatagctcaagtgaccgaagcaactttgcaagattttgaggaggggttgcgagcttgcagtgaagcagctaagacatggatgactataccggcaccgaagagncgtgagattgtgagacagattggtg

SEQ ID NO: 48652 - DNA, 274 bp, Glycine max
  Clone ID: 701135810H1
tgctttcatgccaactggttggggaatgctgcagattgctcaagcattaaaacctgtagtacgccgggctgggttttggggatcagtgaaaactcttgctcgaggttatgagattgtcatgggtttgctattgttcactcctgttgcttttctggcttggtttccatttgtttcagaatttcaaacccgtatgctgttcaaccaagcattcagcagaggtttgcaaatttctcgtattcttggtggccaaaggaaggaacgctcttctcgcaac

SEQ ID NO: 48653 - DNA, 276 bp, Glycine max
  Clone ID: 701135811H1
tttccaccaggcacgcagattctctccttccttctctctatccaaattttgattctttcgatcaaacccgcaacacccacctcaccaaaaccctacgcaacccatccatgacgcttggcttaggaggatccagtgtcgtggttcctaggaacttcagattgctggaggagcttgaacgtggagaaaaaggaattggagatggcacagttagctatggaatggatgatggtgatgacatttacatgcgctcttggactggcaccattattggccccc

SEQ ID NO: 48654 - DNA, 277 bp, Glycine max
  unsure (1)..(277): unsure at all n locations; Clone ID: 701135812H1
caaatctcttccttctctctcctcatttccaaagttcccaactttcctaacccgagatnctggtgaattgaattgaaattgaaattgttgtcgtgnnnnnnnnnnnnnnnnnnnnaaggaatgccgctgatattagcgaaaagcgattcgatccagattcgcgaggtgtggaacgataacctggaagaggagttcgcgttgattcgcgaaattgtggacaactacccttacatcgccatggacacggagtttccggggatcgttctccgaccagtgg

SEQ ID NO: 48655 - DNA, 277 bp, Glycine max
  unsure (1)..(277): unsure at all n locations; Clone ID: 701135813H1
ggccctgcaagtnttgaaatcgatgatcaccctatgcaaattgaagaaacacagtacccgaaaaccttgcttctataaagaagaccttcatccaggcaaaacaatgaaagtacaattcagcaagcctccctttcaacaaccatggggtgttggtacatggttaaaggaaattaaagacactactaaagaaggatatagttttgaagagctatgcatcaagaaagaagccattgagggagaagagaagttttgtgcaaaatcctgggaacagtaattg

SEQ ID NO: 48656 - DNA, 281 bp, Glycine max
  unsure (1)..(281): unsure at all n locations; Clone ID: 701135815H1
gggattcttgcatttagatctggaaattttctcgagaganatgaggaaggcatgaggcatgtcgaacaagagagaaatccgaacgcgaganattttgatctggacatcctcgccaccactttgcgctgcgacagcctcgactaggacaagagagaaatccggccagaccaccatgtcgccggggaccgcgactaggcgcggcagcagttcaagacctgacgtcgtggtgcatcctctccgaccccacacgtaagacctgacgccgccgccgaagtgagtgg

SEQ ID NO: 48657 - DNA, 280 bp, Glycine max
  unsure (1)..(280): unsure at all n locations; Clone ID: 701135816H1
catgaggttgccatatcagtgaaaccactgaaagtgcaaaactggattcttcctgaaatgcctgggcttataactgattttntgatttctcttgatgatcggtttctgtactttgtaaactggcttcatggggatatcagacagtataacattgagaaccttaaaaatcctaaactgaccggacaagtatgggttggtggacttatccagaaaggaagccctgtagtagctataactgatgatggtgaaacttggcaagctgaagtgcctgagattcagg

SEQ ID NO: 48658 - DNA, 274 bp, Glycine max
  Clone ID: 701135817H1
ctctttcacacccttcactttactctctctctctgacagctaaaatgcaaggaggaatgagatcatttttgtcacatgggaatgtcattagaaatgctgttctacaacgcgtgcgcatggtgaaccccctgctacagacaattgcctcttcgcggtttgaatctgttacgcctgctcgcattgaggagcatggttttgagagcaccacaatttcagacatcttgaatgataaaggcaagggtgctgatggctcctggctttggtgcaccacaga

SEQ ID NO: 48659 - DNA, 274 bp, Glycine max
  Clone ID: 701135818H1
gcagccacagctggtagcttttaccaagactttgaaataacgtggggtggtgagcgtgccaaaatcctatgagaatggaaaccttctcacactctcccttgacagagcctctggctctggctttcgttccaaaaaagagtacttgttcggaaaaattgacatgcagctcaagcttgtgcctggtaactctgctggaacagtaactgcctattatttatcttctctggggcctactcagcacgaaatagactttgagtttttgggtaacttgagt

SEQ ID NO: 48660 - DNA, 271 bp, Glycine max
  Clone ID: 701135819H1
atttccagtgtcaaacatggcgtctcagatgagcaagaagagaaagtttgttgcggacggagtgttcttcgccgaactgaacgaggttctgacacgtgaattggcggaggacggttactccggcgtggaagttagggttacgccgatgcgcaccgagatcatcatcagagccaccagaacccaggctgttctaggtgagaagggaaggagaattagggaacttacctcagtggtgcagaagaggttcaaattccccgaaaacagtgtcgag

SEQ ID NO: 48661 - DNA, 260 bp, Glycine max
  unsure (1)..(260): unsure at all n locations; Clone ID: 701135820H1
cgattcgttccatttcttccaaaatggccaaagacccagttcgcgttctcgtcantggagctgcagggcaaattgggtatgctcttgtccctatgattgctaggggagtgatgttgggtcctgaccagcccgtgatcctccacatgcttgacattcctccggcagcagagtcattgaatggggttaaaatggaattggtggatgctgcattccctcttcttaaaggtgttgttgccacaactgatgtggttgaggcatgc

SEQ ID NO: 48662 - DNA, 273 bp, Glycine max
  unsure (1)..(273): unsure at all n locations; Clone ID: 701135821H1
aaagaagatggagaaagcgatcagcagacagaagattttncttcatcatctcaacccttcatcgtgctacccacgtcaacgaatcatcctccctctatgcttcagcatgtgtggcgggggacagcgctgcttatcaaaggacatcgacattcagggatgatgttgtgatcgtggctgcttatcggactgctcattgcaaaggtaaacgtggtggtttcaaagntactcttcctgatgatctactggctcctgtttnnnaaggctgtaattgag

SEQ ID NO: 48663 - DNA, 262 bp, Glycine max
  unsure (1)..(262): unsure at all n locations; Clone ID: 701135822H1
atcgccccacaaaaacgtgggagccctgaatcgtgcgtntnttgcgattctgactngntcntcatttttactttttgggcctttgaaagcttaaaaacctaaacgcccaagactcaaaacaaggcaganccgctcaactganccgtgaaactcttcttctcattcacattcagttgcgcgaagaccatgcaggctctgcaaatgccaatggtggatttggagggcacagaaggttacataccttccacngtntatgtggang

SEQ ID NO: 48664 - DNA, 178 bp, Glycine max
  Clone ID: 701135823H1
atgatgtgcaaggttctttatcttccttaaatcttatcactattcttaggagttttgagtcctttattgggatgctgttttttgtgccttctctactgtttgcaagagcaaattgtgtactttgttgatgttaaagacttaattaactggcgtatgctttattgggtgttctcggtcc

SEQ ID NO: 48665 - DNA, 266 bp, Glycine max
  unsure (1)..(266): unsure at all n locations; Clone ID: 701135824H1
cattattcccattgctatatattatggctagcatgaaggttacatgggtggnnntgatcatgtggcatggccgtggtgggtgcaccgatgatggcgcaagccatgaacatgcaatgatgtgacggtgaacatggcacagtgcctatcctacctgatgcagggaggaacaccttcaacactttgctgcagcggagtcaagaacattcttggctctgctgtcaccaccgttgacaaacaaactgtgtgcaactgtctcaaggcggatg

SEQ ID NO: 48666 - DNA, 275 bp, Glycine max
  unsure (1)..(275): unsure at all n locations; Clone ID: 701135825H1
ggccgtatgccctancttgggttgctccaatggaggatacccaaganattgaggagcaaggacatgaagaagtgatttcagacaaaacattcaagaagcagcaggaaactcttgatgaaattctttcacgacacaggaaagagatattgcagctgcagaaaaaggaagttgagatgaaaaaggctgcagctagaggtagcaaggctgagcagaaagctaagaagaagcaagtggaggaagaggtttctcaactttctgctaagcttaaggaaaac

SEQ ID NO: 48667 - DNA, 255 bp, Glycine max
  unsure (1)..(255): unsure at all n locations; Clone ID: 701135826H1
tgaaaacccaaagtgcttctctcctctgtctttttctctctcttgctatcctttnggctagtngcactgctgcaagtgcaactccaagaagcgcagtgccaagccaccatgtttcaacattcaacagaagcctttttccttccacttttctctttggaattggttcttctgcttaccaggcagaaggagcagcaagtgtagatgggagaggaccaagcatatgggacacctacactagacagcatactgaaaaga

SEQ ID NO: 48668 - DNA, 274 bp, Glycine max
  Clone ID: 701135827H1
caagcttatacgattttcttcggaaaaacaattatcgctcatttcccattgatcttgtccgtgagattggcagacaactattggaatgtatagcattcatgcatgacttgcgcatgattcatactgacctgaagcctgaaaacatactactagtttcaccagagtatgtcaaagttcctgactacaagagttcatctagatcaccaagttcctatttcaagagagttcccaaatcaagtgctataaaggttattgattttggcagcaccacttt

SEQ ID NO: 48669 - DNA, 278 bp, Glycine max
  unsure (1)..(278): unsure at all n locations; Clone ID: 701135833H1
tccctctcactacancacaactataannaaacgtagagantactgtgtgttcagaanctggccagtaaactnncgcagnggaaagtacaagtagaaggagaagaagtcacantgaagctgctctctncaaaattgttcactctgcgccattgctgctcgcggcggcgctggttttagcttccgncgacgcatcagtnacaatgagatgcagaaacatgaagccacggaatcaagggacgtggnngaagagaagttgcgagtgcagagcttgaagattc

SEQ ID NO: 48670 - DNA, 271 bp, Glycine max
  unsure (1)..(271): unsure at all n locations; Clone ID: 701135834H1
ccctatacaaccaaaccctaacacacacccatttgattcagtttccatgggctagcctcaaggttgcatttttngctgcagtgctctgcatggttgtggtgagtgcacccatggcacatgcagctatcacgtgcgggcaggtgacgaatagcctgatcaattgcatcggttacctccagaacggaggaacgccgccgtcgggatgctgcaacggagtgaagagcctcaatgccgtcgccaagaccaccgccgaccgccagacggcgtgcaa

SEQ ID NO: 48671 - DNA, 267 bp, Glycine max
  unsure (1)..(267): unsure at all n locations; Clone ID: 701135836H1
gtgaaattcccattcgaccagccaatgaagatctacaacagtttgtggaacgctgntgantgggcaacgaggggtggtttggagaaaacggattggtcgaaagcacccttcatagcagcgtacaaggggtttcacatcgacgggtgcgaggcttcggtgaacgccaagttntgcgacacgcagggcaagaggtggtgggaccagcctgagttccgtgaccttgacgccgcccagtggcgtaggctcagatgggtgcgccagaaatac

SEQ ID NO: 48672 - DNA, 270 bp, Glycine max
  unsure (1)..(270): unsure at all n locations; Clone ID: 701135840H1
gggaagantcacccatgctttgagtgatgatgntttngctcangctctanatggacaatagttctccgactgangggcttgacaattntnatgantggacaattgatttgaggaaactgaatatgggtgagccttttgctcaaggagcttttgggaaactctacagaggtanttacaatggtgaagatgttgctattaaaatcttggagangcctganaatgatccagcaaaggctcaattgatggagcnacagttccagcaggaggtca

SEQ ID NO: 48673 - DNA, 270 bp, Glycine max
  Clone ID: 701135841H1
ggcagatttaactggatcaaacaaccatttacattcaaatggatcaagcactgtcagtagccgtagcacaggacacactaaacagagccaatcagattcaacaaatagaaatgggagcagaactaaggacagtgaatcccgtaatgaaactgaatgggttgaacaagatgaacctggtgtatatattacactcacctcccttccaggaggtataatagatcttaagagagttcgcttcagtcggaagcggttcagtgagaagcaagcaga

SEQ ID NO: 48674 - DNA, 270 bp, Glycine max
  Clone ID: 701135842H1
ataatatggcatttaaaggctatttcgttttgggcctcatagctcttgttgtcgttgggcacttccaaagttacatgcgaaatagaagcagataaagtttcacctattattgacttttccctcaatcggaacagtttccctgaaggcttcatctttggggcggcatcatcctcctaccagttcgaaggtgcagcaaaggaaggtggtagaggaccaagtgtatgggataccttcacccataaatatccagataagatcaaggatggaagt

SEQ ID NO: 48675 - DNA, 269 bp, Glycine max
  Clone ID: 701135843H1
aagctccaaaattcctcctaagtgcagtaaccgaaacccaatgacccacctagccatggtttggcttcaaacatggctccctgaaccctagcgtttctccctcttcgccaacaacgctgatccgatcccgatctgtttctgattccgatccgatccaatccaatggctggggcagcctctgctctgttcctccttgacatcaaaggccgcgtcctcatctggcgcgactaccgcggtgacgtcaccgccgtcgaagctgaacgcttctt

SEQ ID NO: 48676 - DNA, 271 bp, Glycine max
  unsure (1)..(271): unsure at all n locations; Clone ID: 701135844H1
gcaagacacctgcgntaggantcgatttnngcacgacatantcatgcgttggcagtgtgncagcgtgatcgagtggagntcatcgcgaacgaccaaggaaacagaacaacaccctcttatgttgctttcaataacacccaaaggatgattggtgatgctgccaagaaccaggctgctaccaatccaaccaacactgtctttgacgcaaagcgcctaattggtaggagatttagtgatcaagaggttcanagtgatatggagctatggccat

SEQ ID NO: 48677 - DNA, 274 bp, Glycine max
  unsure (1)..(274): unsure at all n locations; Clone ID: 701135846H1
gcggcgagcaatggcgacatcgctggtgcgatcgggttttcttcgaagcgccctaagaggaagcgctcgtggctcccaggttnccgaagcgaaactttgnttcctgctggtcatcacgatgatgcatatgagacggccaaatgggagaagattacatatctaggcattgttagttgcactggtttagccgtttataatctatgcaaagggccacccacacttcaaagaacctcctgcttacccatatttgcatatccgcaataaggattcccct

SEQ ID NO: 48678 - DNA, 271 bp, Glycine max
  unsure (1)..(271): unsure at all n locations; Clone ID: 701135847H1
tacggttcatgatcaaactcaaaccaatttcgacgaggaggaggtgtgtgaatgtnatgcttgcngggttnangaagatgacggctactgtgaagaagaagaggctgaattcgatagangctcgttttcgagaatgcttcggagggtatcgttaggcgaactagattgtacgctcagatgtcacacttggggaacttggcttacgatatacctagaatcaagccagggaaactcttgaaacatcatggtctgcgctttgtaatttcatcga

SEQ ID NO: 48679 - DNA, 258 bp, Glycine max
  unsure (1)..(258): unsure at all n locations; Clone ID: 701135849H1
gcaaaatttgtatatttgatgggtgctgatgatgtaaacttagacaagatcccagatgatgcttttgtngtttatcaaggtcaccatggtgacaagagtgtttatcgagcaaattttattttgccagcagcagcattcagtgagaaggaaggaacctatgaaaataccgacggatgcacgcaacaaacattgcctgcagttccaacagttggtgactccagagatgattggaagataattcgagctctatctgaggtg

SEQ ID NO: 48680 - DNA, 267 bp, Glycine max
  Clone ID: 701135850H1
agagaatcataagaaagcaagaaagaaaatgggagtggagaagcagttgttgaggcctggcaccggtcccaagccaattcccggtcagaacgtcaccgttcactgcactggtttcgggaagaacggtgacctttctcagaaattctggagcaccaaggatcctggccaggaccctttcactttcaaaatcggccaaggttctgttatcaaaggatgggatgaaggtgtgcttggcatgcaaattggtgaagttgctcgtctccggtg

SEQ ID NO: 48681 - DNA, 266 bp, Glycine max
  unsure (1)..(266): unsure at all n locations; Clone ID: 701135853H1
gattttgtcactcctgattcaccagaaaatccaaatcacagggacaagattaggcgaanatttgagtggaacaaagaatctgaagtaagacaaccactaggtaattcattttcttcacaagagcagagccaaccgtttagttctacaacgccactgacaatgaaatcatcttcaacaacttcattacatagagtagatattattgaagatgattttatgagtgtgatcaataagagtggtgctgatttgattcaaccagaacctga

SEQ ID NO: 48682 - DNA, 267 bp, Glycine max
  Clone ID: 701135857H1
ggctccagttgagcctaattccagtgagtccaaatctgacacaacagagccacccattcctcctggttctggtcttggccatggccgtggcaagccaatgcctccatcaggtcttccttctttctcatcatttatatcttccataaatcagccacctgctggtcgtggccgaggtactgcacctcatcctcaacatgatttgcagccaccagactctggacccaaaaaacccattttcttcaaaagagaggatagtgtttctccaac

SEQ ID NO: 48683 - DNA, 266 bp, Glycine max
  unsure (1)..(266): unsure at all n locations; Clone ID: 701135858H1
ggctcnagcatcgctgtccatggctaccatcgttngcatcaanncncgccagatnctttcgacagtcgtggcaatccaactgtcnagntggatttnacttnctncgatggtacttttgccanagctgctgttccaagtggtgcatccaccnggatttatgnggcccttgaattgagagatggaggatctgactaccttggaaanggtgtatcaaggctgttgacaatgtgaacaccgtcattggccctgctttgattggcaaggac

SEQ ID NO: 48684 - DNA, 271 bp, Glycine max
  unsure (1)..(271): unsure at all n locations; Clone ID: 701135860H1
caagataganatgganaactttccagttgttcnacangggaaacctgantantgaatagagatccagtaaccatngngataatcanagatgcctgtnnagaactggggtttctntganttggtgaaccatgggatatccatagagttgatgatggacaccgtggagaggatgacanaagngcactacaaaaagtgtatgnagcaaaggttccnaganatggtancnancaaaggcttggagtctgctcantctganatcaatnatttngnc

SEQ ID NO: 48685 - DNA, 268 bp, Glycine max
  unsure (1)..(268): unsure at all n locations; Clone ID: 701135861H1
aggctttgaagatgggaatcacaaaccccttnaaagaccntccctctncctcatcaaggggcttnttgcttggnnnctctatgctcttcttnccatagttttacttcgcttgtacttctaccctctacccttccctccatctccagaaactgagcttcctcattccacccccaccaccatcatctcacagtcttctctttctgattctacactaccttcttctncagaaaaggaaaaaacgtatgagcctccatgtgactactttgat

SEQ ID NO: 48686 - DNA, 222 bp, Glycine max
  unsure (1)..(222): unsure at all n locations; Clone ID: 701135866H1
aaaaaatggcgtcgataactggaccacagattctactgcantgctggttctccatggttgaaacagacgatgaaaccctcgtcatcaccctttctcctcttcccaaaacacactcctcgtcgcaccttctgctccatcaattccaattccaagggttcgagttccatcgttcccgacctcctccattacctgaaccactcctggacccaattccacacaaca

SEQ ID NO: 48687 - DNA, 261 bp, Glycine max
  Clone ID: 701135868H1
ctagatcgcaagcaaagaacaattttacgttacgagaaagcagcggtgacatgtctggcgccaaggacaagaggaagcaaggcgaagacgacgccgtttcggggagccagcagcagaagaaggcgcgtgaggatgaggctgtgacggatgaggaggtggaggagttctgcgccattctccgccgaataaacacggcggtgaagtacttcaagagccacggcgaggacgtggcagcgttggagaaagatatcatgcaggatg

SEQ ID NO: 48688 - DNA, 265 bp, Glycine max
  unsure (1)..(265): unsure at all n locations; Clone ID: 701135873H1
gtnngtcctgctgacaccaatgctgannacacattgnacactctgaagtatgctaaccgtgctccgcaacattncagaacaaggcagttatcaatcgtgatccagtgggagctcagatncagagaatgcgaagtcagattgagcaattgcagtctgagcttctgttatacagaggtgatgctggtggggcatttgaggaacttcagattcttaaacaaaaantatccttacttgaagcaagcaatgaagagctacagcaggagct

SEQ ID NO: 48689 - DNA, 263 bp, Glycine max
  Clone ID: 701135874H1
ggaacctgcacttctggtgacacgttttgagtatgctaatctttttcacactgttacagactacgtacagtgcttatgtttcttctagagtcactggtctgcctaatcgaccacatttgatctttgttgacggccacagcaaggctcctcttgaagagacatgggaagctttattctcaagcctcagatatgctaaaaacttcagtggttcagtttgttttcgtcatgctattctctcacctttgggatatgagacagcattg

SEQ ID NO: 48690 - DNA, 265 bp, Glycine max
  unsure (1)..(265): unsure at all n locations; Clone ID: 701135875H1
caaaaccctagagaggacgagagagcgtgcaactttcggcaaccacagaccatgacattcaancggcaggaatggaggtcgcaacaaacacggccgcggccatgtcaaattcatccgatgctccaactgcggaaaatgctgccccaaggacaaggccatcaagaggtttttggttaggaacattgttgaacaggctgcagtcagagatgtgcaggaagcttgtgtctatgaacaatatacacttccaaaactctatgtgaagatg

SEQ ID NO: 48691 - DNA, 266 bp, Glycine max
  unsure (1)..(266): unsure at all n locations; Clone ID: 701135877H1
atnactagtggtagttgnattngaatctctaccatgaanncttntnntagaatcctatntnactatnnaantccatctatttttgggntttctccaancaagttgagtgattcagcaatcatgggcatgttgtccagatctangtcgtcacaactcaacccatncgncataggtacaatacctgtaatactcagaatgtagggtacataaatgggatccatccgaatcggagagattttagtgtttccggttcgaattggggtctt

SEQ ID NO: 48692 - DNA, 254 bp, Glycine max
  unsure (1)..(254): unsure at all n locations; Clone ID: 701135878H1
aactttcannccccattttnattttgtttatctcncttnntngtgtgcctttctagtgtccnggatttcctgnttgtcngtttctttctgggntgtggngtgaggctgtcagatccttcaacagtgttggttgattgacaccattgttctctatgcaaaatattgtcatcaaaggctctcatcattgctaagctcctgnttcaaaaaaagangtccatgaacaacanactactttagactacaactcagaagcc

SEQ ID NO: 48693 - DNA, 268 bp, Glycine max
  unsure (1)..(268): unsure at all n locations; Clone ID: 701135879H1
gcttggtgatgtccctttctgttctcttcactcttggtcttgcgagagaaagccatgccagagacgaagatttttggcatgctgtttggccanacactcccattccangttcattgcgagatcttntaaagnctggcnctgcaagtgttgaaatcgatgatcancctatgcaaattgaagaaacacagtacccgaaaaccttcttctataaagnagaccttcatccaggcnaaacaatgaaagtanaattcagcaagcctcccttcaa

SEQ ID NO: 48694 - DNA, 272 bp, Glycine max
  Clone ID: 701135880H1
ctggggttcttcacatttcctttcatccttgttcgttaattcaattcacaacagaagcgcgagccctagacctgaatctcgccggtaacaacacacaatttggtagttgaatctagtacattctgttacacgaaaatttctgtggggtttctctgttacaatggaggagctgaaatctgctatggaggagcacatggaccttatggctgatcttgttcagaagctctcttcggatcttcgtgctggcttccgccctgcttacgataacttta

SEQ ID NO: 48695 - DNA, 260 bp, Glycine max
  Clone ID: 701135881H1
gttaacgtacctagttgttggtctttatatttagttattgacatcaacaaagtcatggaggaagttaatgtggtttcaaaccaagaatggaactgtttcagtagcttctgcgtttgctggccataaggaagctatacagcaaagggaccacaaatttttaagaattgctgttgaagaagcgtataaaggggtagactgtgaagatgggggtccctttggtgctattatagtttgtaatgatgaaattgttgctagatgtc

SEQ ID NO: 48696 - DNA, 236 bp, Glycine max
  unsure (1)..(236): unsure at all n locations; Clone ID: 701135882H1
ggnctgagctacctagctncagaagcatccattcatcagactccaactcgcaagcactcgcattccgtctacagaggggtccgaatgcgggcctgggggaagtgggtatccgaaatccgcgagcccagaaagaagaaccggatctggctcggcacctttgccaccgccgagatggccgcgcgtgcacacgacgtcgcggcgctcgccatcaaaggcanctccgccattctcaactt

SEQ ID NO: 48697 - DNA, 258 bp, Glycine max
  unsure (1)..(258): unsure at all n locations; Clone ID: 701135883H1
acgcgttctagtttttnttatagacaccttctaaaaaaaactcaaccccaacattctcgtacacttgatccttcttgggttgtcaacaattttccctcttttcattttccattgctnaaaaatcataccttgaaatcgaaagcccctgttttgtttttcttttcgctggtgttgtgagagaaatgtgccctttaaggtttatcttggtgttcttctccgccgtgctggcgggttattttgcgtggaaaacggtgcgtt

SEQ ID NO: 48698 - DNA, 260 bp, Glycine max
  unsure (1)..(260): unsure at all n locations; Clone ID: 701135884H1
ggtcgagtntcacagcagcantggtgnacgtcaaggctcanaaatcgacagcctacttcaagngntatcaagtacaagttcaaganaagaagagagggaaaaaccgatnaccgtgccaggnttcggttgattaatcaggacaagaacaaatataacactccganataccgatttgttgttcgctttagcaacaaggacattgttgcacnaataatatctgcnagnattgctggcgatattgttcttgctgcagcatatgc

SEQ ID NO: 48699 - DNA, 259 bp, Glycine max
  unsure (1)..(259): unsure at all n locations; Clone ID: 701135885H1
gccatggttgtggccattcgcccagcaaagaaccctttttgcgtgaagggtcgcgtctactgtgacccttgccgtgctggttttgagacctcagcaaccacctacattgccggtgctgagattatgttgcaatgcaagagcagggttagcancgaggttgtgtacaccaagaaggggtacactgactcaactggagcatacacaatgtacgtggacgaggatcacgcagatcaaatatgcagtgccaagcttgtaagca

SEQ ID NO: 48700 - DNA, 249 bp, Glycine max
  unsure (1)..(249): unsure at all n locations; Clone ID: 701135886H1
cgtaaccatgtctcagactgttgtcctcaaagttggtatgtcatgtnaaggatntgttggagcagtgaagagagttctaggaaaattggatggtgtggaatcatatgacattgatttgaaggaacaaaaggtggtagtgaaaggaaatgtccagccagacacagttctgcagaccgtttccaaaactgggaagaagactaccttctgggaaggtgaagcagcaacatctgaaactagcacagcaactgc

SEQ ID NO: 48701 - DNA, 264 bp, Glycine max
  unsure (1)..(264): unsure at all n locations; Clone ID: 701135887H1
agaccctntctatggctgtgtaggggtcatntcatctcttcatnnaacaaattgatgtgttgcagacccaattggcagtngcacaggctgaggntgtgnacctgcagagtgcgccaagctggcatcactctacagccccactagcccaaccaacagtggctctccatcacaagccaagccnntttttgacatggacatggtggtggaccagaccccctatggtgatncaatgctggtgatatntgcctgctactagctanttta

SEQ ID NO: 48702 - DNA, 76 bp, Glycine max
  unsure (1)..(76): unsure at all n locations; Clone ID: 701135888H1
gcttcaaatagtcactcnacaaaagagtnncgaggcctcatnccaaatctggcatntctgnntatacnnatttccc

SEQ ID NO: 48703 - DNA, 260 bp, Glycine max
  Clone ID: 701135889H1
gggctacctccatggtgaagcttatgcttttctctgctctcatactcttgtcctgcaagcagttgtgtctgtaacaccactgcattttcaacatccactagaccctttaaccaaacaagagataagtcttgtccaaaccatagtccaaaacaagtacccaagctcaagtaacaggttgagcttccactacattggactcgacgaacctgaaaaggatgccatcctcaaatgggaatccatcaaaccaactgttataactg

SEQ ID NO: 48704 - DNA, 261 bp, Glycine max
  Clone ID: 701135890H1
cgatgattgacagcacgaatggcgactgcgcgaggagaagaagaagagaaatgggcaacacgttgggacatgaagagggagaggagaactttttaaaatttgaagtgaaagataattttccggcttcacttaaaatattggtgcatctagcaaatacccaagccttcctagcaacaactgcattattgcattacaaaaagggaaaaaaactacggtagaggaaaagggtattatagtaaaatcaaagaacacgatctgatc

SEQ ID NO: 48705 - DNA, 163 bp, Glycine max
  Clone ID: 701135892H1
ataccctgctgcgcctgcatcacgtgggttctgcagacgtgaaatctgagccgttggattgccagaaccatcgcgagaatcaggaaacgccgtggttgagtccgtgtcacaggacaaatcaaagggtgtgcaactgacacgcggcgacggctaatcgaatgaa

SEQ ID NO: 48706 - DNA, 266 bp, Glycine max
  unsure (1)..(266): unsure at all n locations; Clone ID: 701135893H1
angagatctttttctgctcttngangancgaacgggtctttncttcnactnttgngatgtctntgctctcagntctcatggaccntaaccttctccgataccnccgagaaggngantcgcagngtacatatggntcggtggatcangaatngacctgaggagccaagcaaggaatctcccaggacacagttagcgacccttcagagcttcccaagtggaactatgatggttncagcacaggtcaagctcctggtgaagacagtgaa

SEQ ID NO: 48707 - DNA, 265 bp, Glycine max
  Clone ID: 701135894H1
caaggctgttgttattcatgtcccttacagattaaggaaaggtttccgtaagattcatgttaggcttgtccagggagcttgagaagaagtttagtggcaaggatgtaatcttggttgccacccggaggattttgaggccaccgaagaagggttctgctgctcagcgtcctcgcagccgcactcttactgctgttcatgaagcaatgctggaggatgttgtattgcctgctgagattgttgggaagcgtgtgaggtaccaaattga

SEQ ID NO: 48708 - DNA, 266 bp, Glycine max
  unsure (1)..(266): unsure at all n locations; Clone ID: 701135895H1
tcccttatccatttcnacaccacancatagttnacaancaacgtntntcttnagcctncattctacgctctcccaacngccagtntntgacncgaagagcgaaccataatggaagagtaaattaccggaaaccgaataaccgtttctccgtgaaagcctccgccaaagagattgcctttgaccagcattcccgctctgctatgcaggccggcattgacaagctcgccgacgctgttgggntnactcttgggcccagagggaggaat

SEQ ID NO: 48709 - DNA, 268 bp, Glycine max
  Clone ID: 701135896H1
gaaatttcttagacaaaaaacaaggatcagaaccgttgaatcaagttgaggaagatggcactagtctctggaggaagatcaacactgaaccctaacgcccctctttacattcctgccgcgtttcgccaagtggaggatttctctccggaatggtggcagctggtgacgacgctgacatggtaccatgactactggctaagccagcagcacgatgagggagccttctacggcgaggacgacgggtttgatggcaatgatgtcgttgatt

SEQ ID NO: 48710 - DNA, 295 bp, Glycine max
  unsure (1)..(295): unsure at all n locations; Clone ID: 701135901H1
gcccagaatccgagatcaaccctgacccctaaggccaggggtttttctcggcttcttcagattcctgaaatggcgtctgtttcagctttagccaagtacaagctcgtcttcttgggtgaccaatccgtgggcaaaaccagcatcatcactcgcttcatgtacgataaattcgataacacctatcaggctacaattggtattgattttctatcaaaaactatgtatctcgaagncgnactgttcgattgnattgtgggataaactggcccggaaagntttagngntttttcccgcc

SEQ ID NO: 48711 - DNA, 277 bp, Glycine max
  unsure (1)..(277): unsure at all n locations; Clone ID: 701135902H1
acctgcgaggtgttataggcaaattaagaacaagccataccccaagtcacgtttctgccgtggtgttcctgatcccaagatcaggatttatgatgttggtatgaagaagaagggtgttgatgagtttcctttctgtgtccatctggttagttgggagaaggaaaatgtttcaagtgaggccctggaagctgctcgcattgccttgcaacaagtacntggcaaattttcctnggaaaggncnttccccntgaaagnccnggggncccctccntttttt

SEQ ID NO: 48712 - DNA, 292 bp, Glycine max
  unsure (1)..(292): unsure at all n locations; Clone ID: 701135903H1
ctttgattccctgagatttctgcaatctacaaaaattcactatgggagtcacaacctttacacaggaatactcctcctctgttgccccatcacgcatgttcaaggccttgattgtagactccagaaatttgcttccaaagctcttacctcagtttgtaaaagatgtgaatgtgatccaaggtgatggtgaagctggaagcattgaacaagttaacttcaatgaagctagccccttcaaatatctgaaacacaggtngtggggttgcnaagggaaatggggtngcnannnacc

SEQ ID NO: 48713 - DNA, 283 bp, Glycine max
  unsure (1)..(283): unsure at all n locations; Clone ID: 701135904H1
tgtcaggtaccttatcagttgattttgaggacttcaactttaaactttgtacatttgggtggtgtacttggagaatcgctcagtccatgtgttgtgtgatcgaaccattatacataaatatgggtgatgaaagaatacaaagtgctgtcttcttggactaagactattgatgtgtctaccagtaacattcctattgggtgcttgttccatatgctctacaacagaggtnatnttggnggaactntgaaaaaantggntgggggaaattttaacnnggggggnc

SEQ ID NO: 48714 - DNA, 288 bp, Glycine max
  Clone ID: 701135906H1
gcggcttgccgctagcgttctcaagtgtggtagaggcaaagtttggcttgaccctaatgaggtcaatgaaatctccatggctaattctcgacaaaacataaggaaattggttaaggatggtttcattatcaggaagccaactaagattcattcccgttcccgtgctcgcagaatgaaggaggccaagaggaagggacgtcactctggttatggtaagcgtaagggtacaagagaggctaggctccccaccaaaatccttggatgaggaggatgcgtgtcctcagacga

SEQ ID NO: 48715 - DNA, 294 bp, Glycine max
  unsure (1)..(294): unsure at all n locations; Clone ID: 701135907H1
tnaggattccgaacgagtgaccttcttcgtttctcgcaaagtttaagtaatcatgggtnaggaaaaggttcacatcaacattgtcgtcattggacatgtcgactctgggaagtcaactaccactggtcacttgatctacaagcttggaggtattgacnagcgtgtgattganaggttcgagaaggaggctgccgngatgaacaagaggtcattccaagtatgcctgggtgctcgannagctnaaagctgagcgtggaaaaaggaattgccntnggnngttccttngtgggagnt

SEQ ID NO: 48716 - DNA, 288 bp, Glycine max
  unsure (1)..(288): unsure at all n locations; Clone ID: 701135908H1
tgattcagatgaaaatgaaaagaagtctgatgatgcaagtgaaacaacagataagactgaagaaaaagtggaacaaagtagtaaccaagagtctgatgaaaactccaacgagaagaaaacagatgacaatgccaacagtcagggttcaaatgaggtttacccttccgtggctcagtcagagcttctgaatgaaagtaccactcaaaatggttcttttacaactcaggcagcagagtcaaagaatgaaaagggtctcaagtatctcccaggcnatnggctaatgggaac

SEQ ID NO: 48717 - DNA, 291 bp, Glycine max
  unsure (1)..(291): unsure at all n locations; Clone ID: 701135909H1
gagaggctaaccattaaacattttatcttaactaatcttgaagcttatcaatgcatatttctttgagccactgcagtatgaataatgaatttagcttagccattgcccactgtgttgtgctttagaaaatgttagactggagatgctatactgtctaagaatctttatttctcatgttgtcattctaaaccgaaataccggttgtgccaatgaagtggcaaatcatgtcttataaaattaggatncgggattgccccggttttnccantgntgaaagggtccccncccaat

SEQ ID NO: 48718 - DNA, 287 bp, Glycine max
  unsure (1)..(287): unsure at all n locations; Clone ID: 701135910H1
gcagccacaccgaggtcgatgaagttgagttcttaaacaactgcagggatgctggggtggttcacattctaggaaacacagttgtcagggcaaggagggattcaagattccacaagaaaatagctgttgattatatatatgcatttctcaggaagatatgcagggaaaatagtgtgatcttcaatgttcctcatgagagtctattaaatgttggtcaggttttctatgtatagcctctactcctcttctcttggtaattctgcgtgaacattgagttataggcncnt

SEQ ID NO: 48719 - DNA, 289 bp, Glycine max
  Clone ID: 701135911H1
aggggttgcttcttcccttttgttttcaaaggaagagaattttcaattttcaatttttcattgggttctctgaaatggagagagatttcatgggtctcaacttgaaagaaccactagctgtggtgaaggaggagatgaacaatgatggctgcaaaaactctggcttcaaaaaaggtcggattgcacagtggccattctcgaacaaagtatctgcccttccacatttgatgtctttcaaggcttctcaagatgataagactaagaatacagtgtctgataccttatcatc

SEQ ID NO: 48720 - DNA, 286 bp, Glycine max
  unsure (1)..(286): unsure at all n locations; Clone ID: 701135912H1
gtttatcttgagcatgatattcaaacaaacaccagncccggcgatcatcaaaagctcttgcttgcatatataagcacacctcgtcatgagggccccgaggttaatagagaaattgctcagaaggatgcaaagggtctttacaaagcaggggagaagaaactgggaactgatgaaaagacttttatccacatattcagtgaacggagtgcggcgcatttggctgccgtcagttctattaccatgacatgtatggtcattcactgaagaaggnngtaaggatgnaacc

SEQ ID NO: 48721 - DNA, 285 bp, Glycine max
  unsure (1)..(285): unsure at all n locations; Clone ID: 701135913H1
attgaggctctgcagtttcttgagaatgagataaaggacaagaagttctttggaggagaggagattgggttggtagatattgctgcngtctacatagcattttgggtccctatggttcaagaaattgcagggttggagttattcacaagtgagaaatttcctaagctccacaattggagccaagaatttttgaaccatccaattgtcaaagaaagtcttgccccctngagatccgtttcctccttttccanggntcnccnngaaagnctntgggtcaaaaaagnt

SEQ ID NO: 48722 - DNA, 290 bp, Glycine max
  unsure (1)..(290): unsure at all n locations; Clone ID: 701135914H1
aaagaatcccaggccgaggagaaagatggaggggaaggagcaggatgtgtcgttgggagcgaacaagttccncgaganacagccgattgggaccgcggcgcanagccaagacgacggnaaggactaccaggagncggcgccggcnccgctagttganccgacggagtttacgtcatggtcgttttacagagcagggatagcagagtttgtggccacttttctgtntctctacattcaccgtcttaaccgttatgggagtcgccggggctaagtctaagtgtagtaccgtt

SEQ ID NO: 48723 - DNA, 293 bp, Glycine max
  unsure (1)..(293): unsure at all n locations; Clone ID: 701135916H1
anttantcgtcttcttctctgcatccatcagatccaaagtttctcgcgatacgagggagcaatgtcagaggctaaggttcaggatttgaagaaggaagaggaggttgctgatgattctcctaagaacgaagttgacagtggaaaatctgtggatgatctgaaagattcggataacgataaaagcgatggaaacgccatgcccttcatcccatcaggaggaagcagctgttaagaaaaagtatggaggggtgttgccaaaaaagcntccantaattncccaggttcntgaacnt

SEQ ID NO: 48724 - DNA, 265 bp, Glycine max
  unsure (1)..(265): unsure at all n locations; Clone ID: 701135918H1
tatgggtcctccagacagtccttatgctcacnggtgttacncctagtcactattgcatttccctccagantatccctttaagccacccaaggttgcattcaggacgaaggtatttcacccaaatataaatagcaatggaagcatttgccttgacatattgaaggagcagtggagcnctgcgctaaactatttcaaangggttgctcnncaattggnntccctttgacggnccctaatcctgnnggnnccttggccccnaaatncc

SEQ ID NO: 48725 - DNA, 283 bp, Glycine max
  unsure (1)..(283): unsure at all n locations; Clone ID: 701135919H1
tcaccccttttaacagttcacctagttgacattctgtatagctactgcttcactcttcgtctctanaatggagattggaagtcagatgccttagggtcagtcatggttgtattgagcgtgtccttggtgttgggtcaaggtgcacagccggagacagtactagaagcactttctcattgcttggagcaggtatgctgtccagtttacagacacatgggaggattgcaatttggtttgggtgtcattgatgatgtgatcanccccttggttngnaaccctccct

SEQ ID NO: 48726 - DNA, 281 bp, Glycine max
  unsure (1)..(281): unsure at all n locations; Clone ID: 701135920H1
aaagccgggaacgaaggagaaagagggcttcaatttcattccggaatgtngtgggaagacgagattgtgatgcgcgatgtcacgaatgcgggccttgttatcagcgatcgcattggtngtgaagtttcgtctcagctacgacctcgaagaagctctagaagcttccagncangctagccacccttattccactcaaccnngagaagaaanagctttagttgaggtggtgaataccgggatngntacnggcncatngaaagatnanagaagngggggggaag

SEQ ID NO: 48727 - DNA, 283 bp, Glycine max
  unsure (1)..(283): unsure at all n locations; Clone ID: 701135921H1
gaattggggtgctcctgattctgtctcttcctctctcactttctttgagtttcattgtgatccagttattgacttcattggccaggaatatcatctggggttgtcacaatctgagtgatccatctacttttgtggcaaagattggctcttttgaggtcttattcagatccggacttcaatttctataccaagagaaggagctgcttctgaagtttgactaggagtgtattagaagagaggatcttcnaaactgatccgtgcaatnggtaatnnacaaggcttt

SEQ ID NO: 48728 - DNA, 284 bp, Glycine max
  unsure (1)..(284): unsure at all n locations; Clone ID: 701135922H1
aagagttgctgcttcttccgccactcagcacttcgctccctctgtgcttcaccaaccatggccgaaatcgaagctaccgttccagatccctctcaaatcgacgtcaaacttttcaaccgctggagcttcgacgacgttgaggttactgatatgtctctggctgattacattggagtgtccccgtcaaagcatgctacatatgttcctcacactgtggtaggtactccagtnaagaggttcaggaaggcgcatngcccattgtggagagacttcacaattctntc

SEQ ID NO: 48729 - DNA, 290 bp, Glycine max
  unsure (1)..(290): unsure at all n locations; Clone ID: 701135923H1
cacatagctagttgtttaaagtgagagaaaaanaaagaagaaaatggcaaactttccagttgttgacatggggaaacttaacaccgaagagagagcagcagccatggagattataaaagatgcctgtcagaactggggtttctttgagttggtgaaccatgggatatccattgagttgatggacactgtggagagggctcacaaaagagcactacaagaagactatggagcaaaggttcaaagnaatggtggcccagcaaangggcttgcagtcagttcaatccagnntc

SEQ ID NO: 48730 - DNA, 291 bp, Glycine max
  unsure (1)..(291): unsure at all n locations; Clone ID: 701135924H1
cagagagagaccactctcctctggagcaaatccaccggcctccctcttcacaacgccattgtttggatggatgctcgcacttcttccatttgcaggagattggaaaaggagttatctggcggtagaaaccattttgtggagagttgtggcttgcctattagcacatacttcagagagggaacgtcttctgctgctcaaaattttagagctncnagactcggtaatcactttgantgatgaactngaacncnnaaaantaaaannnctgccnantgngaaaaaanggtnnnt

SEQ ID NO: 48731 - DNA, 285 bp, Glycine max
  Clone ID: 701135926H1
gtaatctgagagagaaacaaaaacaatgaaggtttccattgccaagttccactcccttcccctatgttttttccttctcttggccttcaacacaaaacccctcctagcagcagaaccagagccagtggttgataagcaagggaaccctttggagccaggagtagggtactacgtgtggccactttgggctgatgaaggaggcctcacactaggccaaacaaggaacaagacatgccctctttatgttatccgtgacccttcattcattggcaccccagtttcatt

SEQ ID NO: 48732 - DNA, 283 bp, Glycine max
  Clone ID: 701135927H1
ttcattttctaccttcaaacaaaaatttctaaaagcggtttaatttccatgtttcttttctcagctccactgttctggacagtaccattgaagggtcggtgcttgttcatccgagaagaaattgcaggcctcatccgcgctgaggaaattgtgctcctccatcttcacgtactgcgcgtggtgatgatacggtttctggaactgaaaacagttcatcatcgaagacgatgacggcgaggttgatatggagcaattgttgaatttcaagggagagtacatgttg

SEQ ID NO: 48733 - DNA, 260 bp, Glycine max
  unsure (1)..(260): unsure at all n locations; Clone ID: 701135928H1
ggcctaccctactattatcccttacccttcctgcctctcactgctttcctggctctttcanaagatgttgaacaagttgtggacataagtggcaaccccattttcccaggtggcacatattacattatgccatcaacttggggcgctgccggtggtggattgaaactaggccggacaggaaactcaaactgcccagttactgttttgcaagattnctcggnaatntccgtggnacnccagtnantttgnnnnngcccggg

SEQ ID NO: 48734 - DNA, 293 bp, Glycine max
  unsure (1)..(293): unsure at all n locations; Clone ID: 701135931H1
tggtnctgcntcnnctgctgncagacgctgganatcgacnanananagnttnttccccaagcnntncctctttggctgctttgaacttcaccaatataaatatcaattgccgtatcctttgcttcacttcactccttctcttctcatattgcttcctttctttctcttcttcaaatggagaaaaaggtccccttttttttctccattctcttattcattgctctgctatttcatggaggaaaggtgttnnccttgaatgccaagacggatcagaggaatggggatacgttcaa

SEQ ID NO: 48735 - DNA, 293 bp, Glycine max
  unsure (1)..(293): unsure at all n locations; Clone ID: 701135932H1
cncccctnccttccctcctncaacttcatnttgctttcanntcagtaagcncnagagagcnaaagctctggctagaacttgtaatgtatatgcaagccatcatcattcagnacaattagtgcatcatcctccttcaactgaagaactttatttaatttgctcctaanatattttgtnagaggatgtggtgcagcataaaacctgcaatgagatggctttcttcccagcaaatttcatgctccaaacccctcacctgatgatcacccatcatcatcaacctccancttctctca

SEQ ID NO: 48736 - DNA, 292 bp, Glycine max
  unsure (1)..(292): unsure at all n locations; Clone ID: 701135933H1
caggcaagtatatcatttctgctattcttggatcatttggagttgcatgggtttgtgattattatgtttcagacaaaaagctatttggaggttctacccctggaactattacaaacaatgagtgggcagaagagactgacaaaaaattgcaggcatggcctcgtactgccggtccaccagtggtcatgaatcccataagtcgccaaaatttcaatggtcnagtctcncgctgggtaaaaattttgtggnttgntttcagtnaatgggggntcgggnnancccaattttcccc

SEQ ID NO: 48737 - DNA, 283 bp, Glycine max
  unsure (1)..(283): unsure at all n locations; Clone ID: 701135934H1
ccaagaccaccagattcacctgacgatgatttcaccaaccaatggcctttggagctctccgagtacttgaattttgatgatgatcaatggccagacgattacccggaatcatttgtttcggggcatgtcttcagccataacaatcaagccaatgaagttggtaactttggaggaagtagcacccactttgaagagtcttctagcagagacgttggcaatgaacgtgagaaganggaagtcagagatagagttgcattcaaaacaaantcagaggtagnnttng

SEQ ID NO: 48738 - DNA, 288 bp, Glycine max
  unsure (1)..(288): unsure at all n locations; Clone ID: 701135936H1
aaaacacgctattccgtttccaccttcccgttaactttcagaaaccgagtgtgcgaactgcgatggcgagattgaagataggagggacatgggcaggggtgctggaagangtggacctccaggcgtggaccctggctacgctccgcgacctcgtcgccgcccgatcgaactccccctncctccgactnccatcaacctcntgtgcgccggcaagattctcaaagacgacgcgtncngcncaaattnttgccaacncggngncaaaaaaaantgggaatcanccccgcc

SEQ ID NO: 48739 - DNA, 280 bp, Glycine max
  unsure (1)..(280): unsure at all n locations; Clone ID: 701135937H1
aggtgcaggaagagggagaggtcatcccaggtttcaggccagacaagaatttcttccacctcaaaatggtattggaaggcgagttttggatgacattgagttgctgaacactgattcactagttaaggaggtagaaaggatttttgcttcaagtcctccagattcaatggagcttgagaaggcaaagcaaatgctgaaagagcatgagcaagcacttgttgacgccattgcaaggattgcagtgcntcnnatggnggangtnntggaaacnnccnntcnt

SEQ ID NO: 48740 - DNA, 280 bp, Glycine max
  unsure (1)..(280): unsure at all n locations; Clone ID: 701135938H1
agaacattttgagtcttttccacctggtcacttgtattctagcaaagagagagcgttccgcagatggtacaatcctccatggttctctgaggctattccntctgccccttatgatcctcttgctttgaggcatgccttgagaaggctgtggtaaaaaggttgatgactgatgtgcccttttttntnttnttnaccattttacactcnggatcaatgttcnttnnnacnctgataaacncttngtccaaaaatggtnctctggcttcnagaccccaggcna

SEQ ID NO: 48741 - DNA, 149 bp, Glycine max
  unsure (1)..(149): unsure at all n locations; Clone ID: 701135939H1
ggtcgttctctctganatgggtttcgntttggcatacanagcatctggttgttgctcaaacctagcaatttcagtgctctgttattgcgatgctgcttcattganatcanaaccgtgnctctctctctgcaactcnanttancgaccca

SEQ ID NO: 48742 - DNA, 282 bp, Glycine max
  unsure (1)..(282): unsure at all n locations; Clone ID: 701135941H1
gcagaatttcccaaatttctccactaccctatctcctttgctcctgaaactcccacattcttcaccagcaatgcacgatcttcaatacgaatgcagtttcgatatttgatatcggagtatcggtgtttgagcggctgaattggaattggaaaatgcttgaggcaatggaaagttcggtcaatggtgggttcacccatttgcagagctgtggagatagcagcgaagaagagttatcggtgcttctcgtcacaccaaatggtcnttaacaggaattacccgccc

SEQ ID NO: 48743 - DNA, 281 bp, Glycine max
  unsure (1)..(281): unsure at all n locations; Clone ID: 701135942H1
agcgccctagatttgctcttctttgcttcggaanaaagagaaaaacaaataacaatggcgttcgcttctttcctcggcagagttctcttcgcttccgtcttcatactctctgcttaccaagaatttaacgaatttggagttgatgggggacctgcagcaaaagcactncagacctaagtttgatgcctttacacatcgagtgcattctcaagttggctttcaacttcctgagattgatctgaaatttttaattgctggggctattgctctgaagggccttg

SEQ ID NO: 48744 - DNA, 280 bp, Glycine max
  unsure (1)..(280): unsure at all n locations; Clone ID: 701135943H1
ggtgtttctccacaattcccatggagcctaagacacaaccccaagcgaatagtcctccaccaaaaccttgggaacaagcaggttcctcttcgggtccagcgcctttcaaacccccgtcagctggcaacacaagtgatgtagttgaggcttcagggactgcaaaacctggggaaattgtttctagttctgataggagtgcagctgtcaacaggaatactcttgggaggcctgttcccacaaggccatgggancagaattatggnaacagcacctatggngg

SEQ ID NO: 48745 - DNA, 276 bp, Glycine max
  unsure (1)..(276): unsure at all n locations; Clone ID: 701135945H1
acaggnctggatctgttggatttgtntctaaatctggtgggatgtccaatgaactatacaacactattgcccgcgtaactgatgggatttatgaaggcattgctattggaggagatgttttccctggttccacactttctgaccatgcnnttacggtttaacaacatgccacaggttaaaatgatggtagtacttggggaacttggtgggcgtgatgagtattccttagtggagggcctaaaacaaggaaagtatccaaaccggttgttgctgggt

SEQ ID NO: 48746 - DNA, 286 bp, Glycine max
  unsure (1)..(286): unsure at all n locations; Clone ID: 701135946H1
gcaagacgccaaatctagcaactattgantnntgtnttctttgaaacatcgtgtggcacagtaccccagaagatcgaacaaggatctcnacgaagacaaacctnngtnctcaantgtgtttntttacntctcanntantttcagaccataccaggnntgagaagatgcaggcagacaccgnntatgattnctatgatgccttcgttgcccacctacgaacatangaacngancagattcaaaaatancttgatgagaacaagaagctgattctggcaatattggac

SEQ ID NO: 48747 - DNA, 283 bp, Glycine max
  unsure (1)..(283): unsure at all n locations; Clone ID: 701135947H1
ggcttgtctcaaagattaagccatgcatgtgtaagtatgaactaattcanactgtgaaactgcgaatngctcattaaatcagttatagtttgtttgatggtatctactactcggataaccgtagtaattctagagctaatacgtgcaacaaaccccgacttctggaagggatgcatttattagataaaaggtcaacacaggctctgcctgttgctttgatgattcatgataactcgtcggatcgcacggcctttgtgccggcnacgcatcatgcaaattctgc

SEQ ID NO: 48748 - DNA, 294 bp, Glycine max
  unsure (1)..(294): unsure at all n locations; Clone ID: 701135948H1
agttngtcgtcttcttcnctgtctcactaagaanacaaaatccaatggcgccgtctttcgcaatcaacggtggtttccccggcncccagantcactcctcctnccgtnancngntgcttttntncngtctacngctaggtccaanananccgcatcgaccacgaactccctctcccctccgatctcaaaaaccctttcatcatcgtcgacggttccccaaagctccgtgccggcaancctgaggagatcgcgaantgttcccgaaactgttcgggcaaccgtcggcggctttgg

SEQ ID NO: 48749 - DNA, 290 bp, Glycine max
  unsure (1)..(290): unsure at all n locations; Clone ID: 701135949H1
gggagtctgggtcaccatntaaacctgctgcagctttncaaaggtgcatatgaanatttgggcagtgatnctagtggtggaaagtcagtaacgatncgaaagatatggcancttgttcagatgctgatgggtgaggaatnagccgtgcaacgtgttttcaaaaaggatgncattgattttnggtgccaagacgccaccttgacntgnggacatnagnanntcnttcnttggttncntcnanaaggncncccttanacaagctnctccggcngtggtgttggnaatttgnc

SEQ ID NO: 48750 - DNA, 283 bp, Glycine max
  unsure (1)..(283): unsure at all n locations; Clone ID: 701135951H1
gcgcacgatagccctccatcacccatgcttggagtactctgcgccactcgctccaaaccttggctcttctccctcgtccacgcctcccttcctcgcctatcccatgcccctctctcaccttccgcctcgccgccgccccgtngccgccattccaccgcctgcaaactctttctctccgctggcggcgccgcctaccatatggcacgccatcatgccccgagtgaatgacgacgacggattccgangcggcgttttcngttccanannataanggtgnagggtt

SEQ ID NO: 48751 - DNA, 144 bp, Glycine max
  unsure (1)..(144): unsure at all n locations; Clone ID: 701135952H1
ctgggtgaggcctatcagtggactcncnatggtggttgaccttgaactcatgaagatcgttcagtatcacgacggtggcattataccagtaccaactgccgacaacactnnataccgcttttcacatcagaacccaccattcgg

SEQ ID NO: 48752 - DNA, 277 bp, Glycine max
  unsure (1)..(277): unsure at all n locations; Clone ID: 701135953H1
tttccctnngtganaaannaaanactaanacananagaacatagnttgnnttggtgaggtgagaagataaagaaagaatggcatttgcatnannaacacagaagngtatggcctgtgacaaaaccgtttatctngttgatnagttgaccgcggataaccgagttttccacaaagcttgnntcancntgncatcnctggaaaggaancctcaagctcagnaactagaactctttgagggagttctttattgtaagnaacatttgncnantgggnaaaa

SEQ ID NO: 48753 - DNA, 278 bp, Glycine max
  unsure (1)..(278): unsure at all n locations; Clone ID: 701135954H1
ctccctctcagtgaaaattgcatctaaaganacagantgcaagganctgggggtggcagggatccctttcttngattttggtggttttggangctttggttcctttgggcntcccaggagtttaatctcaagcttntttgggggtagggacccatttagtgaccctttcttcgcccaaccttttggagggatgtttgagtctagtcccngtggtggtcctactggatttccttnccccantngnatgaacncntctnggntccntgagnancaagacc

SEQ ID NO: 48754 - DNA, 281 bp, Glycine max
  unsure (1)..(281): unsure at all n locations; Clone ID: 701135955H1
atacccagncccgagtgatccggatgatgctgtactggtctcccaaganggtcgcaatgaatggtttcttacaaagtgatggtggaaaggagctggaggatcctatatccccaaattcatgtactttagtggttgttcaaaaacatcagcttacaactgatgatgtaagggtngttcatgatgttantgacctaacaaagggagaagaaagagtganaatttcatgggtgaataacaccactaatgatttcccaccactntttcacnantacccngnannc

SEQ ID NO: 48755 - DNA, 282 bp, Glycine max
  unsure (1)..(282): unsure at all n locations; Clone ID: 701135956H1
ccaaccttggtgctacagaggagcaactagactttcctgttctttatgcttctgctaaagaaggatgggcgtctactacatttaccaaggatcctcctgctgatgccaganatatgtcacagttgcttgatgccgttgtaagacatgttccaccaccaaatgcaaacattgatgcacctttccaaatgctggtttcaatgatggaaanagattctatctggggggaattttganntgggcgccnattcccnggggtnttcccnttgggggaaangggtncnc

SEQ ID NO: 48756 - DNA, 281 bp, Glycine max
  unsure (1)..(281): unsure at all n locations; Clone ID: 701135957H1
gttctcttcactcttggtcttgcgagagaaagccatgccagagacgaagatttttggcatgctgtttggccaaacactcccattccaagttcattgcgagatcttctaaagcctggccctgcaagtgttgaaatcgatgatcaccctatgcaanttgaagaaacacagtacccgaaaaccttcttctataaagaagaccttcatccaggcaaaacaatgaaagtacaattcagcaagcctccctttcaacaaccatggggtgttggtacatgggtnaaagg

SEQ ID NO: 48757 - DNA, 277 bp, Glycine max
  unsure (1)..(277): unsure at all n locations; Clone ID: 701135958H1
agagggtncacaggtacctgtacaggaacattcttcancatctcaaactgatcaacatntnntgagatncagatgctaagtttagctatgaaatgtctgttaatgggaaaactctncanagagactatctggatgctcacatccagcaaggtgaggaggcancaaaccatgatttnctcagctagcantgaaacacagtcagtggntaagggtnaacttgttgcntcccatcangtcanagnntgcaanaaantgttcncagtctntgnngttnact

SEQ ID NO: 48758 - DNA, 278 bp, Glycine max
  Clone ID: 701135964H1
tgggtagataaagagtgtatctggattctgatctgaatatattggcacgcataaaagggaacgaacgtaatggctgcagcagcgttgctcgaacttgatcgagttctcaagtccaagaaggaaatgttgacgcctcgggaagcaaatattcttctatcgtggaaatctaaatctctgatggatctcgctgccggtgcacttggtgggaccgcagctgcaggggctgcaattggaaactcaatggactattcgaatatgccttcagcaggattggtact

SEQ ID NO: 48759 - DNA, 276 bp, Glycine max
  unsure (1)..(276): unsure at all n locations; Clone ID: 701135965H1
caaggttgcaagcacctccaccttcttactgttgttctcttctcctcattcatattttccatttttatttttctaataaaacaaaacnacataagcaccgttcttttctctctgaaattcccatattcatcacttctgagctctggacgagatccctctgctctcccattccagatctcgccatcagattcancctttcattttaagcaaggcnnaannngaaaaagggtcnagggtgctcccccgggnagggttcgggcgngtnangttnnncct

SEQ ID NO: 48760 - DNA, 275 bp, Glycine max
  unsure (1)..(275): unsure at all n locations; Clone ID: 701135966H1
angagacagtgctggtgccaatattgttcataacattctctcctttcgtgttgggcctgancccttgcctggggatgttcaaatattgggctctattttggcccatcctnatttctacngctcagagcctgttgggtctgagcctgttactgggctggaacagaatttcttcaatctggtttggaaattggtgtatccttcagcaccggtgggattgacaacccnttcataaaccttnggtgcnggggnctancttggctggaattnntnntttg

SEQ ID NO: 48761 - DNA, 235 bp, Glycine max
  unsure (1)..(235): unsure at all n locations; Clone ID: 701135969H1
ggcggtctatntatcatngaagtgacaatgaggcctgctncntncnttgctgcctcttcgagtngctttcntgttagctgccactacggaatcaagacaagatncangggaatantggaaaatgntnatgaaagatcaggaaatgccagaangacgtcanggncttgtntcantgcganccnaaaataaccctnagactcannagcagcttggtcataggntccatnnncatgtt

SEQ ID NO: 48762 - DNA, 277 bp, Glycine max
  Clone ID: 701135970H1
accaaaccctaacacacacccatttgattcagtttccatggctagcctcaaggttgcatttttggctgcagtgctcctgcatggttgtggtgagtgcacccatggcacatgcagctatcacgtgcgggcaggtgacgaatagcctgatcaattgcatcggttacctccagaacggaggaacgccgccgtcgggatgctgcaacggagtgaagagcctcaatgccgccgccaagaccaccgccgaccgccagacggcgtgcaactgcctcaagtcggc

SEQ ID NO: 48763 - DNA, 275 bp, Glycine max
  unsure (1)..(275): unsure at all n locations; Clone ID: 701135971H1
gcgtgacttatattggtaaaggtggctctggtaattttgtnacaatnatccacaatggcatcgaatntggtgacntgcagctgattgcagaggcctatgatgtgctgaagtcagttggaaagttgtcaaatgaggaactacaaagtgtcttctcagaatggaacaagggagaacttctgagtttcctgattganatcactgcagatatatttgganattanggatgntacagggnatggntntntnntngacagggccntagtcagnnctggtnt

SEQ ID NO: 48764 - DNA, 280 bp, Glycine max
  unsure (1)..(280): unsure at all n locations; Clone ID: 701135972H1
cccatttccatcaggtcagtgcctatgtacttttttcagaaaggttggtggtgactggtgattgttgaagagaataatggcaacttcaactatggatattcttcatttccaccacactcctttttattgtgaggagaatgtatacttgctttgcaaaaagttgtgcaatgatggaatagcaaatgctgatggatctgatnctttttgttgcctcatttccaacgaaangnaacagatcccacttgggaatcaaanggcctagnaaanagagctggngggg

SEQ ID NO: 48765 - DNA, 278 bp, Glycine max
  unsure (1)..(278): unsure at all n locations; Clone ID: 701135973H1
gcgttcttcggaggtaaaatgcgcaagttttaggcttgctgtggaagcacacaacatccgagcctttaaaaccattcctgaagagtgcgttgaaccaacaaaggactacattaatggcgaacaatttagatcagactctaaaacagttaaccaacaagctttcttttatgctagtgaacgcgaagtccatcacaacgacatatttatattcggcatagataacaccgtactctctaatatccccatatatgnnaaaccatgggtatgggggggaggat

SEQ ID NO: 48766 - DNA, 271 bp, Glycine max
  unsure (1)..(271): unsure at all n locations; Clone ID: 701135977H1
ctggtttgcaaagcagtatcttcgacctggaagatctgtagaatttggggtaaatttaggatcncnngcacccaaaaatccaaatgggccataatctattgtaagacccaaaatgctcatgttatccgtgttcagcacaccatgagtgaaaccaaccccctgtcatctggcaatcanggaagcagtacgctcagcaaatctccancantcancanccatgctcctttgagttgaagtcccancnttcaattttgnaaccggtntcccccag

SEQ ID NO: 48767 - DNA, 275 bp, Glycine max
  unsure (1)..(275): unsure at all n locations; Clone ID: 701135978H1
cttacaccgtttcggatttcatgacaaagaagcaagatttgcatgttgtcaaaaccaccaccaccgttgatgaagctttggaggctcttgtaaacaacagaatcagtggtcttccggtgatcgatgaggactggaatctggttggagttgtttctgattatgacttattggctattgattcgatatcaggaggtcctcaaagtgatgcaaacttgttccccgacgtcgatagtacttngnaaacgttcaatgagttacaaaagctgcttagtaag

SEQ ID NO: 48768 - DNA, 277 bp, Glycine max
  unsure (1)..(277): unsure at all n locations; Clone ID: 701135980H1
ggagcatccaaagaaggtttttggttnggctgctcgggactcatctgggcttctctccccattcaacttctccagcagagaaacgggggagaaagatttggtattcaaagtgcaatactgtggaatatgccactcagatctacatatgttaaagaacgagtggggcaacacaacctatccnctggttcctgggcacganattgctggtntggtaacagaagtngaagcnaagtgcaaaagttcnaagtnggagaccggtaggtgtggggtgcntgat

SEQ ID NO: 48769 - DNA, 284 bp, Glycine max
  unsure (1)..(284): unsure at all n locations; Clone ID: 701135981H1
attcgtggtggatcatggggggagnaacangagaacgagaatgggagaacgggaanaaagaaccagcatcagncnnnnnnnnnnnnnnnnnnnnngcgagttcgagttctgnaaagcgtggcaacataaaccacgaccaaggtctccgccacaagtactttcctaatcacaagaaatccctctccacnttcctctcccgcttccgcaaaaaatctccgncggttcgttccttcctaaaggcccnatncctttcnattcccaaatnggntttggnaatggttngg

SEQ ID NO: 48770 - DNA, 268 bp, Glycine max
  unsure (1)..(268): unsure at all n locations; Clone ID: 701135985H1
ggactaccacagtgaccagaagttcaccatcaccacctactcaccgactggagtggctattacagcatcaggaaccaggaaaagtgaactgtttctggctgatgtcaacacccagttgaagaacaaaaacatcactactgatatcaaagttgatacagattctaatctcttcacaactatcactgtccaatgaacctgctcctggtctgaaggctatttttagcttcaaagttccngaccaaaggnctggaaagntggnagtccagtt

SEQ ID NO: 48771 - DNA, 274 bp, Glycine max
  unsure (1)..(274): unsure at all n locations; Clone ID: 701135986H1
gtacaccagtggtattgcgtgttggtgtgaatcaagaaccgctctgctatggctgctctgcaatacttggaatcgctgcgtaattcgcaccctgagctctccgattggtacaattcgctggcggatctgtaccagaagaagctctggcaccagctcactctcaagctcgagcagtttgtggctctcgccgtcttccaggctggtgatgctttaatacaattatatcacaatttcatcacagactttgagncgaaaaccaacctttncaagcttg

SEQ ID NO: 48772 - DNA, 75 bp, Glycine max
  unsure (1)..(75): unsure at all n locations; Clone ID: 701135987H1
gttggacntgacaccaaagacagcagaantnttgtttgagggngatggtggangttannacacttngtggagtnc

SEQ ID NO: 48773 - DNA, 277 bp, Glycine max
  unsure (1)..(277): unsure at all n locations; Clone ID: 701135988H1
gtcctacgatacgattctcttccgcctcccttcccttcaactccacggcgcagatccgaggagtttgggaaaccctaattcattcctctttgcttcttctatctctattcctctaacaccagtgatggcaggtttggctccagaaggatcgcagtttgatgctcngcaatatgattctaagatgaatgaattgctttccgccgatggacaagaatttttcantcatatgacgaagctatganagttttgnagccaaggggcntnnaaaaaaattttt

SEQ ID NO: 48774 - DNA, 272 bp, Glycine max
  unsure (1)..(272): unsure at all n locations; Clone ID: 701135989H1
atttttcaggggtgaccttacagaagatgggttcttgagccgaagtggtccttggtgtgatcaggtcagtttttcttggatgatataataagatttttntttttgttggcttcattaatagacagtacatattgtttatcttgcagggtctttgccttgttgactggggaagagggattgatttgcatctctttccagatcacacactatttaagggagattgcaaaacttctggttttcgctgcattgagatgctagaggataagccgtgg

SEQ ID NO: 48775 - DNA, 274 bp, Glycine max
  Clone ID: 701135990H1
ggatgcggtccgttaaacggaagcttgatgagtttaaaatggacgaccaattacccattcctgcgtttgcgcggattgaaattgagaatgaatgtgtggccttacgcgagatggtcagcatgcagcagagaaccattcaggatttgaatgctgagttggacgaggagaggaattcttcgtccacagcggccaatgaggccatgtcgatgatattgaggctgcagagggagaaggcggaggttcaaatggaggcgcgccaattcaagcgttttgc

SEQ ID NO: 48776 - DNA, 221 bp, Glycine max
  unsure (1)..(221): unsure at all n locations; Clone ID: 701135991H1
aaagaggattgagctttgagccttggggaagaggcagcagagacaataatggnnnnnnnnnnnnnnnnnnnnnnnnnnnnnnnnnctcagtttctccctcctcctagaaagctttctgtaatcccttttcactcaacgaactgcacacatttgtcattcccggctgttgtgactccaagacaacaaccactgttgttgttttcttcaacctcaacttgttt

SEQ ID NO: 48777 - DNA, 273 bp, Glycine max
  unsure (1)..(273): unsure at all n locations; Clone ID: 701135992H1
aagagatctttttctgctctttgaagaaagaagggtctttgcttgattttggagatgtctctgctctcagatctcatcaaccttaacctctccgataccaccgagaaggtgatcgcagagtacatatggatcggtggatcaggaatggacctgaggagcaaagcaaggactctcccaggaccagttagcgacccttcagagcttcccaagtggaatatgatggtnccagcacaggtcagnnncctggtggaanacagtgaagtgattttatcc

SEQ ID NO: 48778 - DNA, 255 bp, Glycine max
  unsure (1)..(255): unsure at all n locations; Clone ID: 701135993H1
gggaagtagtagtaaataaggatcaatggcggttcctgggaggcncaacggcatcaacgacgacgaagaggagttagacgacaatgcccttttcgaagaacaaggtgtcgtcgaagagacaccgattacccctcctcacctccgcgacctctccgccgccgctcaaatcggcgacgcccacgccctccgtctcgctcttgataacttgactggtagtattgatgagccagtggaggatggggatacggctcttca

SEQ ID NO: 48779 - DNA, 274 bp, Glycine max
  Clone ID: 701135994H1
tgggacttttctacatgatctcacatgtcaaggggtatggttttggaggttggaccaatgcacatgccaccttctatggagggggtgatgcttctgggacaatgggtggggcttgtggttatggaaatctgtatagccaaggttatggaactgatacaacagcactgagcactgcactgttcaacaatggcttaagctgtggtgcatgctttcaaattaaatgtgcgaatgacccacaatggtgccttcctggctccttcatagtcactgccac

SEQ ID NO: 48780 - DNA, 281 bp, Glycine max
  unsure (1)..(281): unsure at all n locations; Clone ID: 701135995H1
ttgtctcaaagattaagccatgcatgtgtaagtatgaactaattcagactgtgaaactgcgaatggctcattaaatcagttatagtttgtttgatggtatctactcggataaccgtagtaattctagagctaatacgtgcaacaaaccccgacttctggaagggatgcatttattagataaaaggtcaacaacaggctctgcntgttgcctttgatggattcctggntaacccntcgggttgaagggccttttgnccgggagggacngttcaaanttngcc

SEQ ID NO: 48781 - DNA, 260 bp, Glycine max
  unsure (1)..(260): unsure at all n locations; Clone ID: 701135996H1
ggggacttgtatgagaatgatgttgaccacacccgctatgatngttgttcctcgcagaagggacaaaggtacgttgccagaatgaaaaagaagcaaaaaagcaaagttggaggagtaatgtgaaggagctacctagcccaactagtccaattcaaagaccaaaaccgaagcctgtggatgaggacttgtacaagatctcaccagagcttctttatgccaaaactaggaagaagagagggttgtgtttcttcccaagctgc

SEQ ID NO: 48782 - DNA, 274 bp, Glycine max
  unsure (1)..(274): unsure at all n locations; Clone ID: 701136001H1
ttcctggctctttcagaagatgttgnacaagttgtggacataagtggcaaccccattttcccaggtggcacatattacattatgccatcaacttggggcgctgccggtggtggattgaaactaggccggacaggaaactcaaactgcccagttactgttttgcaagattactcagaaatcttccgtggcacacagtcaaattccagcatacctgggataagccctggaatcatctttacaggtactccacttgaaatcgagttcgcagagaaac

SEQ ID NO: 48783 - DNA, 275 bp, Glycine max
  unsure (1)..(275): unsure at all n locations; Clone ID: 701136002H1
caacaacgtcgtccaagaccatgaccatggccatggccacgatcctgctcctgttcacggtcttcgcggtttcatcggccctagacatgtcgataatctcgtacgacaacgcccacgccgccacgtcgcgcagnanaggggagctgatgtccatgtacgagcagtggctagtaaagcacggcaaggtgtacaacgcgctcggagagaaggagaagaggttccagatcttcaaggacaacctgcgattcatcgacgaccacaactcccaagaggac

SEQ ID NO: 48784 - DNA, 272 bp, Glycine max
  Clone ID: 701136003H1
ggagcatatgcaaagagtatatttgtggatgagcttggggcacaagaaagctctttactgaactgtacaccaaaggaagactttggaggaggacacccagaccccaatttgacatatgcaaaagagttggttgctcgtatgggattgggcaaatccgaaccacaagatgatcccccagagtttggtgctgcttctgatggtgatgcagatcgcaacatgatacttggtaaaaggttttttgtcactccttcagattccgtggccattatcgt

SEQ ID NO: 48785 - DNA, 267 bp, Glycine max
  unsure (1)..(267): unsure at all n locations; Clone ID: 701136004H1
gcgacaacacaacatccactgtctctnctctctctctactactctctctgtttcagngtttcacaaatcacacgcnagggcgatctgagtggatgagatgtgaaacttncgcagctgatcaccatcgccttcttcctccccttgtttctaaccaatcttcaaattccatgtttttttaggtatgaaacttatntccttcctttttatttttcgtttnaactttttataatcttncaattatccttttttttccctctctcgagatta

SEQ ID NO: 48786 - DNA, 270 bp, Glycine max
  unsure (1)..(270): unsure at all n locations; Clone ID: 701136005H1
gcagaatcttggagacaaagcagtgatgtgncatgggctaaatttcagaactgcagtattttactgccataaagtccgtgaaacaacagctttcatggttccattggtggctggtgatggaaccaaaactcaggcacttgctgtttgccactcagatacttctggaatgaatcatcacatgcttcatgaactcatgggagttgatcctggaactaaccctgtttgccatttccttggaagcaaggccattttatgggtacccaatttatc

SEQ ID NO: 48787 - DNA, 271 bp, Glycine max
  Clone ID: 701136006H1
gttctgccaagtaaagttgatccattggtcaatctgatgaaagttgagaaagttcccgattctacatatgacatgattggtggtttagaccagcaaattaaagaaataaaagaggtcattgagctaccaatcaaacatcctgagctgtttgaaagtcttggaattgcacaaccaaagggtgtcctgctctatgggccacctggtacaggtaaaacattgttggctagggcagtggctcatcatactgactgtacattcatcagggtgtctg

SEQ ID NO: 48788 - DNA, 268 bp, Glycine max
  Clone ID: 701136007H1
ggaaatatcaactgctgttgatgctgatcgtgttgcttcatcaaatgttatgaataaaggacacactgttaacatggccaatagtgattttactaataaaaatgggtttaatccatttttaactagttcccagcacacatctttgaatacaaatgattcttatcaagggactagcttgccagcttatgcttcttgtcaggctatcagggtccaagaagcacccatggtacacagctgccagtcccttcagatgtgtccttagtatccg

SEQ ID NO: 48789 - DNA, 268 bp, Glycine max
  Clone ID: 701136008H1
tccgaagcaggaactaaatatggctgacttgttggaatggtcaaagcaagctaagaaacgaatgcttcatgtcgtctaccgtgttggtgaccttgatcgcaccatcaaattttacacagaatgtttaggaatgaagcttttgaggcaaagagatatcccagaggagaaatatgctaatgcttttcttggattggccctgaagaatcccattttgttgttgaattaacatataattatggggttacctcgtatgacattggcgatggct

SEQ ID NO: 48790 - DNA, 61 bp, Glycine max
  unsure (1)..(61): unsure at all n locations; Clone ID: 701136011H1
gngaccactaganatggccanccncanctagtgcattcttgcatnaggggttttanaaccc

SEQ ID NO: 48791 - DNA, 263 bp, Glycine max
  unsure (1)..(263): unsure at all n locations; Clone ID: 701136012H1
acacaacaaacaacaacctcttcctcctcacattcgggcccaagggcccagngcccagaaacagagcaagaggcccagggactgcagcaagcacccggtgtaccacggcgtgcggaagcggaactggggcaaatgggtgtccgaaatccgggagccacgcaagaagtcccgaatctggctcggaacttctccactcccgaaatggcggcgcgagcccacgacgtggcggccctcaccatcaagggccagtcagcaatcctcaa

SEQ ID NO: 48792 - DNA, 260 bp, Glycine max
  Clone ID: 701136013H1
ctaccctactattatccctttccttcctgcctctctttgctttcctggctctttcagaagatgttgaacaagttgtggacataagtggcaaccccattttcccaggtggcacatattacattatgccatcaacttggggcgctgccggtggtggattgaaactaggccggacaggaaactcaaactgcccagttactgttttgcaagattactcagaaatcttccgtggcacaccagtcaaattcagcatacctgggata

SEQ ID NO: 48793 - DNA, 260 bp, Glycine max
  unsure (1)..(260): unsure at all n locations; Clone ID: 701136014H1
gcttaatcctgaagccaaagctttattagagcaggcattgatggatgcaaacagagaaagagagaaaaacatatngaaagggagttcttactctctgccatctccatcacattctgatggggtagctgataatatgtctgaggttagtgagtccgaattatgttgcatctgctttgagcaggttgcacaattgaagttcagaactgtggccaccagatgtgtgcacaatgcacactagccctgtgttgccacaacaagcc

SEQ ID NO: 48794 - DNA, 262 bp, Glycine max
  unsure (1)..(262): unsure at all n locations; Clone ID: 701136015H1
gcaaaatctagggtttgtncgttcgctcgttcgcaacaatggcgctgaggagattctacaacgagatcaaggggaagagggtgagcgaggtccctgagcacgtgaagccgatgctgtccctgagctacatcaagaaagcgattcagagaggcttcgacaattaccatgccaagtacattgaaaccagttcccctgatcccatcttccatgtctgctacggcggcatgatcttctcctaacctacgtcgctactcccccacga

SEQ ID NO: 48795 - DNA, 258 bp, Glycine max
  Clone ID: 701136016H1
ggggcagggtgataataacagtaacagggatgagtgatatcatttcatttcagagggattaattattgttttatttttaagtgtggagtgctgtgcaggtcaaggcccttttacttgttcgtccggttgttcccatcttctctctcgtaccaatcaaatcacacttttgtgttgtgttgggcaaccctaaaccccgttttcggtgagatcgagatcgatcgaacatggatgaggagtacgatgtgatcgtgttgggca

SEQ ID NO: 48796 - DNA, 275 bp, Glycine max
  unsure (1)..(275): unsure at all n locations; Clone ID: 701136017H1
cctcttctcaacaatcggtttccgatcatcaaccccgctactgaagacatcataggngcatattccagccgctactaaggaagatgttgaccttgcggtggatgctgctaaaagagccttttcccataacaaaggcaaagattggtcttcagctcctggctctgttcgtgctcgctatcttcgagccatcgcttcaagataacagagaaaaaggatgaactaggaaagcttgaagcaattgattgtggaaaaccactcgatgaagcactggcaga

SEQ ID NO: 48797 - DNA, 252 bp, Glycine max
  unsure (1)..(252): unsure at all n locations; Clone ID: 701136018H1
cttgcgcaagcngggatcttcgaacntaatgttgttggggantgtantgtggcccatgatactaactgctcagaagaatgtcatggacaaatttacgcgtattgaaggtgattacaaggcaattgtacagaaccgcaatccattaatccctcctatatttggcacagatgaattggctggtgttgtgagtggaatccagctatgacgaattaactggatggaagcgagaggaggtgatggataanatgcttt

SEQ ID NO: 48798 - DNA, 248 bp, Glycine max
  unsure (1)..(248): unsure at all n locations; Clone ID: 701136019H1
ttttttttgacttaaaacagcacactgcatattactcaaagcanccatcaaagcacacngcatcctaacagcacacgtacgtagaaaggtgaagttccaggtcttgcacaacatacacaancacaccataatttattttatatacaatcttatggtgcccaagatgcagatgcatggactaattaaacaacaacgttagtctgataggcagtgtccatagataaattgggtacccataaaatggcctt

SEQ ID NO: 48799 - DNA, 273 bp, Glycine max
  unsure (1)..(273): unsure at all n locations; Clone ID: 701136020H1
ctactnctcactcactgcagatctcaattgcatccctgtccatggctaccatcgttagcatcaaggcccgccagatccttcgacagtgcgtggcaatccaactgtcgaggtggatttgacttgctccgatggtacttttgccagagctgctgttccaagtggtgcatccactgggatttatgaggcccttgaattgagagatggaggatctgactaccttggaaagggtgtatcaaangctgttgncaatgtgaacaccgtcattggccctgc

SEQ ID NO: 48800 - DNA, 270 bp, Glycine max
  Clone ID: 701136021H1
gtccaagcagcctccaattcgtgccactctcttcaaaatggccgttaccttctcaaatctccacacagaatcaggtctccaagtccctcgacgacttcctctctgggaaggtctacgtttctggggatcagttcacaaaggacgacatcaaagtgtatggtgctgttttggagaagccaggtgactcttttcccaatgctgccaagtggtacgaggttgtctcatctcagcttgctgcaagttccccggcaatgctcaaggggtgagatc

SEQ ID NO: 48801 - DNA, 270 bp, Glycine max
  unsure (1)..(270): unsure at all n locations; Clone ID: 701136022H1
gagagacctagtacctaatggacctggcagcgttaagatggtggcagtggattcggatgatctctggtttgcgtataacttgatagctcccggagactctgtcatggccgttactgtcaggaaggttctaagagaagctgctaatggcggacgggaagcagaacgcgtcaagctacaaattggaaattanatncgaagagcttctgattatgacaaagaaggttctattttgcgtgttncgtggaaagaacattttggagaatgaatatg

SEQ ID NO: 48802 - DNA, 259 bp, Glycine max
  unsure (1)..(259): unsure at all n locations; Clone ID: 701136023H1
tgaagttcaatccacgtgtgtcgngcagccgccgcaagagccgaaaggtcanttcacggcgccatcgagcgtgcggcgggtgcttatgagcgcccctctgtcggcggagtgcggtctaagtacaacgtgaggtcgatcccagtacggaaggaggacgaggtgcaggtgatgcgaggaacatacaagggtcgcgaggggaaggtgactcaggtctaccgtcgaaagtgggtgattcacattgagcgcataacccgcgaga

SEQ ID NO: 48803 - DNA, 261 bp, Glycine max
  unsure (1)..(261): unsure at all n locations; Clone ID: 701136027H1
tctctctctacaataatcatcatctgcctcttcttcttcagtaaattattgtacctgacgatcttctcggtttgatcttatatcaatggaattnttttagacagaactcggattcacagggaaatctgattgcataggaacaaaaaagacaacacctttttatctctacacaagtgattatgnttctgctgagaatgttggggccaaaatcggttcttccagtcaaaatttggaaaacaatgtagtgtcatcgaactcagg

SEQ ID NO: 48804 - DNA, 261 bp, Glycine max
  Clone ID: 701136028H1
atctgttatcaatatatattcaatgacatacacagtcccgagtgctaaacctgagtttaaagcttcagatcacaacagatccaccattcacctcaccactttctcttcacaaggcaaatctaacaagaaaaagtagtctctgaagccgatccagtgtcttgtgaatttggaattggtagtgaatctagatctaaaaagccatagcaatgtcttttatcggtacccagcaaaagtgcaaggcttgtgagaaaacggtttatc

SEQ ID NO: 48805 - DNA, 249 bp, Glycine max
  unsure (1)..(249): unsure at all n locations; Clone ID: 701136030H1
ggacctaacacactaaagcttatatatgacagaggcctcatagggtctatccatgactggtgtgaagcatattcaacatacccccggacttatgatttactccatgcatggactgtgttttctgacattgaaacgagagggtgcagtccagaggatctactgattgagatagaccgtttgctaggcctacaggtttcatcatcataagagataaacagcagtgntgttttgtcagagtactaacacatg

SEQ ID NO: 48806 - DNA, 261 bp, Glycine max
  unsure (1)..(261): unsure at all n locations; Clone ID: 701136031H1
ccaaaaacagccacccgaggtttcaatttcgctaagaaacaaagagaggttctatctcttactctngcgacgacgccgtntctctcgcttgaggtaaagacctttttgttcaagcatgggagatagcgaangcntggttaccgaagcatctgcngctgaggcanatgcttcggctggttatgctgagaccgggtcgaatcctgctcccgaggcaggtgctactgttgatcaatctgctggagaagctgctcaggccagttc

SEQ ID NO: 48807 - DNA, 260 bp, Glycine max
  unsure (1)..(260): unsure at all n locations; Clone ID: 701136032H1
aacccctataacaggaaatgtgatgtgtacagttttggcatctgcttatgggaaatatattgttgtgacatgccatatcctgancctaagtttctcagaaattacttcagctgtcgttcgccagaatttaagaccagaagtaccaagatgttgcccgagttccctagcaaatgtaatgaagaaggctggggatgccagtcccgataagcggccggagatggntgaggaagtttccatgnngaaggccatngcnnntccaa

SEQ ID NO: 48808 - DNA, 269 bp, Glycine max
  Clone ID: 701136033H1
gtctacagtacattgttagctttaatgatgagaaggttgcggctgggaatggacggtgacggcgaggagttgacggcgcaggagaccgctttgtatgaccgtcaaattagggtttggggagctgatgctcaaagaagattaagcaaatctcatgtcttagtctatggaatgaaaggaactgtagctgagtttgcaagaatattgttctggctggagtaggtagtctgacttagtagatgaccgggctgccacggaggaaatgctttcct

SEQ ID NO: 48809 - DNA, 273 bp, Glycine max
  unsure (1)..(273): unsure at all n locations; Clone ID: 701136034H1
caaacccacctcttctcttctctttctcctcctcagtatttcatactcttgcttcttcagttacctncactcaccgtaccgccgcgagggggggccccactcgacctcaccactactccgcaacaacaaaccganggcgatgatgattccctcacctacctctggcccctccccgcagagttcacttccggcggcgacactctctccgttgaccccgcgctcaccctctccgtcgccggaaacggggtggctccgccattctcagagaggcct

SEQ ID NO: 48810 - DNA, 231 bp, Glycine max
  unsure (1)..(231): unsure at all n locations; Clone ID: 701136035H1
accaccaccagcttctgcagtagctttaagctacgaaagantnccntgaccatggggcaaaagcatttagtgacggtgtctgtntatgggtttaacatgtccctcttccatctttctcctttggnttctgagatggttgaagaagagactctagaatntgatagataatgtgnagaaggcagnaggctagnctgaaaccatgtggtcantgacattattgtagcaagggag

SEQ ID NO: 48811 - DNA, 267 bp, Glycine max
  unsure (1)..(267): unsure at all n locations; Clone ID: 701136036H1
ggcaagggttttcatcttttccacaacagtcgnccggcgaacgttcgcaagagacgcaacacaaagttgaacgaggaataggcgtgtagggaaaccgtttcattttcaagcgcgtgactttcaaatccaatcttccataccaatggccttcagcaacgctctcagatctgccgcgaagttgtcgcttctccgaatcctccctctctaactcagtgagcagaggttttcattcaactggcatgaagaggatgggaggtggacatggcc

SEQ ID NO: 48812 - DNA, 266 bp, Glycine max
  unsure (1)..(266): unsure at all n locations; Clone ID: 701136038H1
gggaacccttgggagagcgatctacagcgttggtaactggattcgagggactggacaggccattgatcgtccncggttccctcctccagggcggttactncgtccaagagcagctgtctaggcatcgaactctgatggacatatttgataaggctcctgttgttgatgaggatgtatttgttgcgcctatgcctccgtcattggagacgttcaacttggaagaggatcatccatttggtatggagttgtctgaggggtgatgtnaa

SEQ ID NO: 48813 - DNA, 268 bp, Glycine max
  unsure (1)..(268): unsure at all n locations; Clone ID: 701136039H1
cttttatatcctctatatatagttctctggcaattaaggtctcanccaaataagcanaaatgggtagccagagttacttcaaggctttgattatttgccttatagcactaattggatcaactcaagctcaattgcagcttggtttctatgccaaaagttgtccaaaggctgagcaaataattctgaagtacgttgttgagcatatccacaacgctgccatcactagcagctgctctcataagattgcacttccatgattgtnttgtca

SEQ ID NO: 48814 - DNA, 266 bp, Glycine max
  Clone ID: 701136040H1
caaaatggcattgcaggcaccacctagccttcacaccgtcaatggcaatgctggcctgagacgacccttgatgaatcctcttctttttctctaaagtcatctttcttctctggttccctcaatttctatcttcatcccaatcacctccatcttacttcagctccacccaggatttccatgcgtgttgctccaaacaggcctatatctgtcgagattgcgggtatatttacaaagacaggactccctttgagaagttgcctgataac

SEQ ID NO: 48815 - DNA, 266 bp, Glycine max
  unsure (1)..(266): unsure at all n locations; Clone ID: 701136041H1
ctttgccaagaaagactggtacgatatcaaggccccttccctcttccaggtcaagaatattggcaaaaccctcgtctctcgtacccagggaaccaagattgcatccgaaggactcaaacatcgggtttttgagntctcattggctgatctccaaggggatgaagaccactccttcaagaagattcgtttgagagctgaggacgttcaagggaagaatgttctgacaaacttctggggaatggatttcacaactgacaagttgaggt

SEQ ID NO: 48816 - DNA, 262 bp, Glycine max
  unsure (1)..(262): unsure at all n locations; Clone ID: 701136042H1
angcagcagtggaagcaacgagctgctttactgaacaacgctgtgaagccagtgnattgtgggtgggccaaaactaagggtagcaaaggcaacaaangcctttctggagtttgcagaagcaagtggatatccaatagcagttatgccgtccgggaagggactagtaccagagcatcatccacattncattgggacatactggggtgctgtcagctctagcttttgtggggaaattgtggagtctgctgatgcatatgttttt

SEQ ID NO: 48817 - DNA, 261 bp, Glycine max
  Clone ID: 701136043H1
gatctcaggaaaaaacattgaaattggcataattggagctgataaaaagttcagggtattgacaccagctgaaattgacgactatttggctgaagtagaataatctgcaatgaagaactcttgtgttcctgaagttgtttgtttcacagttgggtttaattggtagcttaattattgacattgtgatggcaatagtgaatttgcgagctactcgttgtgatgaccagcaagccttcagataaacccttttccaaagtcatc

SEQ ID NO: 48818 - DNA, 259 bp, Glycine max
  unsure (1)..(259): unsure at all n locations; Clone ID: 701136044H1
ctcgagccctgagagatgtggganatttgggttgtgtgaagataaccaatgtgtggcttgnccattggaaaatggactacttggttggngcaacaattgcactgccaaggctgtgacatcatgcaaggctagtgatttccactactacaaaattgcaggagttgagcattacatgagcaaatacactacaggggatagagtgagtgagagtacttgtggaaacaaatgcaccaaggattgcaagtgtgtgggttatttc

SEQ ID NO: 48819 - DNA, 259 bp, Glycine max
  unsure (1)..(259): unsure at all n locations; Clone ID: 701136046H1
gcancctccaattcgtgccactctcttcaaaatggccgttaccttctcaaatctccacacagaatcaggtntccaagtccctcgacgacntcctctctgggaaggtctacgtttctggggatcagttcacaaaggacgacatcaaagtgtatggtgctgttttggagaagccaggtgactcttttcccaatgctgccaagtggtacgaggttgtctcatctcagcttgctgcaagttccccggcaatgctncaaggggt

SEQ ID NO: 48820 - DNA, 214 bp, Glycine max
  unsure (1)..(214): unsure at all n locations; Clone ID: 701136048H1
caaaacnaaaacccctntntcccctcanactggtgctggttggctctacacacantgantggccncnnaccaccatcancagcctcctccacccaccanncacagctgttgcagcngccacaanntttcngctnanacctgttgcacacntcctccagcnnaccaccctnctcacaccngttgcacacccncaccacgccaacaccagcancac

SEQ ID NO: 48821 - DNA, 270 bp, Glycine max
  Clone ID: 701136049H1
aggataccttgaattgtcagcaaagacaaaaacctactttgccactgctgtgaacttatgggatgctgatttctatgtcaaagttgatgatgatgttcatgtaaatatagcaacactgggagaaactctagttagacatcgatcaaaaccacggatatacattggatgcatgaaatctgggcctgtcctatcccaaaaaggggtaaggtaccatgaacctgagtactggaaatttggagaggctggaaacaggtacttccgtcatgccac

SEQ ID NO: 48822 - DNA, 271 bp, Glycine max
  unsure (1)..(271): unsure at all n locations; Clone ID: 701136050H1
cacaggncctattcgatggtgggatggcttgggaacncnagcnnggtctactaacggcataacnanagngttaagcgtncgccaacttcttcgccaccgtcacgctncnnccctccgaccanttaatcctcnaaccccanccccnccacgatctccttnatttctcatcgctccctcaattggtcaanangttgagctcccaaggttactatggaggcgtgcgattgcttatggcnatttgcaatgtcttcnacgcgtatggcagancgac

SEQ ID NO: 48823 - DNA, 270 bp, Glycine max
  unsure (1)..(270): unsure at all n locations; Clone ID: 701136051H1
gttctatatattattganttgacaatgaggcctgcttcttgcttggcttcctcttctatttgctttcttgaagttagctgccactacggaatcaagaaaagatccaggggaatattggnaaatgatcatgaaagatcaggaaatgccagaaggacttcaaggtcttgtttcatttcaatctgaaaataacctaagactcaagagcagcttggtaaaggttccaaanaccattgtgaagagtctctagttacaaatacacaagttaacagt

SEQ ID NO: 48824 - DNA, 104 bp, Glycine max
  unsure (1)..(104): unsure at all n locations; Clone ID: 701136053H1
ctcatccnattcgtggagtcccaactgcnatcaatgtgcctagcaacagctaactttcnggaacctgtggttaggttcttccctttgttcaggctganggggtt

SEQ ID NO: 48825 - DNA, 269 bp, Glycine max
  unsure (1)..(269): unsure at all n locations; Clone ID: 701136054H1
tcttgattccgacgtgcctatggttcccgccggcnagccctcgagcagcgccggtcccancctttccaagaagcccaagcgcttcgagatcaagaagtggaacgccgtcgctctctgggcttgggacatcgttgtcgataactgtgctatctgccggaaccacatcatggatctctgcatcgagtgccaagccaaccaggctngcgccactagcgaggatgcactgtggcttggggagtttgtaaccatgcttttcacttccattgcat

SEQ ID NO: 48826 - DNA, 267 bp, Glycine max
  unsure (1)..(267): unsure at all n locations; Clone ID: 701136056H1
ctgnatctcnctgatagcgacctgttnttcntactagccaatgatttctgatgaattcaaccgttgggaggctggacaagttttngcacggaaattgatgcttcacttagtggatgatttgcaacataacaaaccattggnttgaaattccaattttgttgaagggttcaaacgtatttnatgtgactcagtctggacaaagaatttgtggcaaaggcaataactctgcctggcgagggaganataatggacatgatgggggttgca

SEQ ID NO: 48827 - DNA, 238 bp, Glycine max
  unsure (1)..(238): unsure at all n locations; Clone ID: 701136059H1
agaacacagaccaaagctctccaanatccaagctgaaggacttcccataattgacctctccccaatatccaaccacacagtttcagatccatcttccattgaaaacttagtgaagcagatagggagtgcatgcaaggnatggggtttcttccaagtaaccaacatggggtgcccctcactctaaggcaaaacattgagaaagcctnnngattgttctttgcacagnntttggaggaga

SEQ ID NO: 48828 - DNA, 252 bp, Glycine max
  unsure (1)..(252): unsure at all n locations; Clone ID: 701136061H1
aatttnttcttctcctcagccatgctctctctctctctgcgtccatggagttttacgggtgttgaggtgaaaagtggagaatctctcaaggttgatccgggagatgacaagattatccacctttcaaatgcatgcctgggggatgtcactaaggataaagaaggtctaccagtagccctgtatgtacnagtttggtaaccaaaagcttgtacttggaacgctttcttctgaagcttttcctcagatatctat

SEQ ID NO: 48829 - DNA, 257 bp, Glycine max
  Clone ID: 701136062H1
gtgcaaacccactctgaacatccattctctatatcagccgtatctgctacctcatcatgtgctgcacaacagctgattccaccctcaatgccagattctaaggtgaaagaatcccttgattattctcactctgaacaaaaattgcagtcttctgtgaatgttgataataagcctaataatgtggttacaactggaggaagtatgggcaaaaacatgtgaaaggtagtgacttctcaagaagttattataagtgcaca

SEQ ID NO: 48830 - DNA, 256 bp, Glycine max
  unsure (1)..(256): unsure at all n locations; Clone ID: 701136063H1
gcggaagacgaagaagaagtaaccgacgcttgaataaaccgaaccgttcttcgantcgggttcnagttcgaagaagaaaagcgatgagttcgggtagtagcagcagccacagcagtgagaaggagaaggagaagcagagagtgagtcgcacgtcgctgatactctggcacgcgcaccaaaagacgccgcagctgtgcggaagtcctccaggaggatccctcgctcgtcaaggnnnnagactacgacaaccgcacgc

SEQ ID NO: 48831 - DNA, 259 bp, Glycine max
  unsure (1)..(259): unsure at all n locations; Clone ID: 701136064H1
gtttcacagccaagtcgtaaaagggtttcaagggatggaaaacatgcagagcttctggcaattgggtgatgaactccgtgggcactcaaaagcatcggaggatcacaagtggttaatggttgcctcgaaactngccgaacagacaagattgnagggggagcgtgtgaacaaccttgatctttcaaagggacccattgaaacaaggttcaagggataaatttgggttccaggnagagaacaaatttgattctcttaactt

SEQ ID NO: 48832 - DNA, 269 bp, Glycine max
  Clone ID: 701136065H1
actcaattcaactcaacattcttcaatcaaatcagccatggcagcagaacccacccgccccgtaaaaatcatcgccgccgccgatgacttcggcactcctctcaaagacgccctcgtcgctcacttgcgcactctcaacatccaagtcgaagatctcggaacctcttcctactactccgccggagccgagtcggtcgccgagtctcccaatcctcctcctccgacatccgtggcctcgtcgcctgcggcaccggcgccggcgtctccat

SEQ ID NO: 48833 - DNA, 267 bp, Glycine max
  unsure (1)..(267): unsure at all n locations; Clone ID: 701136066H1
tgcatgtgtaagtatgaactaattcagactgtgaanctgcgaatggctcattaaatcagttatagtttgtttgatggtatctactactcggataaccgtagtaattctagagctaatacgtgcaacaaaccccgacttctggaagggatgcatttattagataaaaggtcaacacaggctctgcctgttgctttgatgattcatgataactcgtcggatcgcacggcctttgtgccggcgacgcatcattcaaatttctgccctatc

SEQ ID NO: 48834 - DNA, 266 bp, Glycine max
  unsure (1)..(266): unsure at all n locations; Clone ID: 701136067H1
ttggntctgaactgaacctctctccgttgcgtacgacgcatcataggcatagcaatagcattgaagcaacggcggcggcaaccaccgttcaacgccggagataccatctatttctactgtattcttctcactctgatttattctcttcagtgaacactgtacctatgggaatcagtaaaacagaagtgaacttaaggaggttgcttggngctgctcctcagcagcaaaaccaggcaaaacttgtgcattatgttgcgtgaacaatt

SEQ ID NO: 48835 - DNA, 269 bp, Glycine max
  unsure (1)..(269): unsure at all n locations; Clone ID: 701136069H1
ctctttcnctcataaaaacactccgagtanaaagancctgctactgnntctcctcntggcattcgagtncaaanaancgaagaaaaataaanatgtcagacgcgttctgcagcgactgcangaggcagacggnggtggngttcgaccactccgccggcgacacggtgtgcncggagtgcggcctcgncctcaatcccactccatcgacgagacctccgagtggcgcaccttcgccaacgagtccggcnanaacgnccccaaccgtgtcg

SEQ ID NO: 48836 - DNA, 266 bp, Glycine max
  Clone ID: 701136070H1
cagagatataagatcgtggtcatctggcaaggaaactgacatccggctactcctttcaacgctacatcatattttatggcctgagagtggctggtatgctgttcctcttccgaacttaatagaaagttcacaagtgaagaaggcctatcagaaagcaagattatgcctccaccctgacaaactacagcaaagaggagcaacattcctacaaaagtatatagcggagaaggctttctccattcttcaggatgcatggactgcattca

SEQ ID NO: 48837 - DNA, 263 bp, Glycine max
  unsure (1)..(263): unsure at all n locations; Clone ID: 701136071H1
caacaataggggtctttgcgctattgctcaggctgagtctcttcgatacaagctccttggtggactcgctgtncgcagggcctgctatggtgttttgaggtttgttatggagagtggtgctaagggatgcgaggtcattgtgagtggaaaattgagagcccagagagccaaatctatgaagtttaaggatgggtacatgatttcttctgggcaacctgtcaaagattacattgactctgcagtgagacatgtgctcctgagac

SEQ ID NO: 48838 - DNA, 172 bp, Glycine max
  unsure (1)..(172): unsure at all n locations; Clone ID: 701136072H1
tagtgcctccttgccagaagttaaaatggcccaagaaactttctattcacatctgaatcatgaacgagggacctgacagttgtgacaatctcgtgtggtcgtgatgttgagagacctgcanaagtgctggaactgacaaacacatgntgttcgaggtacaacaagcacgtga

SEQ ID NO: 48839 - DNA, 261 bp, Glycine max
  unsure (1)..(261): unsure at all n locations; Clone ID: 701136073H1
cccttccttccatcccaaccacaaggntgctgagaagacataaaanatggtgaagatttgctgcattggagctggctatgttggtggcccaaccatggctgtaattgccttgaagtgtcctgagatcgaggtggtcgtggtggacattgctgcaccgcgaatcaacgcgtggaacagcgaccaactcccgatatatgagcctggccttgatgatgtggtgaagcagtgcagggggaagaatctcttcttcagcactgatgt

SEQ ID NO: 48840 - DNA, 261 bp, Glycine max
  unsure (1)..(261): unsure at all n locations; Clone ID: 701136074H1
gtgaaaatgaggaaaagcaaatgattaaagtaaaaganaaacttgacaagtgtaataaagagaagttactggagtnctgtgatgtgcttgacttaacaattgccaggccaacaacgaggcnnggaagatattattgcngtgctgatagactttttagttgcccctcatgcaaccacaactgtgttacttgcagaaaaagacaagtccagtaagggcaaaaagcgcaaacatgttgtaaaacagggttcatcaagatctgca

SEQ ID NO: 48841 - DNA, 305 bp, Glycine max
  unsure (1)..(305): unsure at all n locations; Clone ID: 701136076H1
taggctaacaaatgtgttgatgctaatgaaccttttaaatgtcaatttcaagacttgtatagtttttttattttattttattttggagttacaatttttacctaactcaatggttatggtttagcatatattcctttgtatgttgtgtaaatgcgnagttccaaggctctcgcaaggtctaaggttcagtnacagttttgngnccaggancagngtnattcnccattaaccttgaaaacaacctnattgnatcgggtncggcaacccattcccggttnaaccccaaggaacccctnncttcnata

SEQ ID NO: 48842 - DNA, 256 bp, Glycine max
  Clone ID: 701136077H1
cacgttgttgttcgctctgtgtctctcactctctctatatttgcatcattcatgcggaaatggctctcgaggttgctgttaaggctgctgttggggctccaaatgttctcggagattgtccattttcccaaagggtcctcttaactttggaggagaagaaaatcccttacaaactccacctcatcgatctcagtaacaaacccgaatggtttttgggtgtgaatcctgaagggaaggtgccagtggttctttttga

SEQ ID NO: 48843 - DNA, 253 bp, Glycine max
  unsure (1)..(253): unsure at all n locations; Clone ID: 701136078H1
gtttatcgtgaggagaatatgaagttgtttgtnttctttgttgctgcagtagttttngtagcatggccatgccatggcgcaggctaccaaaggttccctctccgaatgaaaactggctatggtgagcgttcttcggaggtaaaatgcgcaagttttaggcttgctgtggaagcacacaacatccgaggcttaaaaccattcctgaagagtgcgttgaaccaacaaaggactacattaatggcgaacaatttag

SEQ ID NO: 48844 - DNA, 252 bp, Glycine max
  unsure (1)..(252): unsure at all n locations; Clone ID: 701136080H1
ggagacagtgctggtgccaatattgttcacaacattctctcctttcgtgttgggcctgagcccttgcctggggatgttcaaatattgggctctattttggcccatcctnatttctacggctcagagcctgttgggtctgagcctgttactgggctggaacagaatttcttcaatctggtttggaaattggtgtatccttcagcacccggtgggattgacaaccctttcattaaccctttgggtgctggggca

SEQ ID NO: 48845 - DNA, 269 bp, Glycine max
  Clone ID: 701136081H1
gctgagtgttattcttccctaaccttcgtctgaaaccctaaaacattgaatcttaagaatggaactgtcatggttgagtgccattctggtgggggctggttatctcgctttgggctacttcattggttctcagtatccccctcgtttcctcttctcacataaattatcgactaaacaaaaagatgcttcacttctcaatgacagcgacaataagaagaggaatactaagtccaaactcgaagacccccttgagattgaacaactcgctg

SEQ ID NO: 48846 - DNA, 266 bp, Glycine max
  unsure (1)..(266): unsure at all n locations; Clone ID: 701136082H1
ggagaatatgaagttgtttgtnttctttgttgctgcagtagttttggtagcatggccatgccatggcgcaggctaccaaaggttccctctccgaatgaaaactggctatggtgagcgttcttcggaggtaaaatgcgcaagttttaggcttgctgtggaagcacacaacatccgagcnttnnaaaccttcctgaagagtgcgttgaaccaacaaaggactacattaatggcgaacaatttagatcagactctaaaacagttaacca

SEQ ID NO: 48847 - DNA, 254 bp, Glycine max
  unsure (1)..(254): unsure at all n locations; Clone ID: 701136086H1
aaatccaggtaagcctcaggntcttatggtgtactcaaattnggctcaggcncttgtnaaccctcatacagcagaagtnngtgagcagcttggacaacgtatatggggaatattacaaaagcaaatatttaaagcaaaggattatcccaggggtgatggagtccagttatccaatcttgaatctctgttggaaaanagtttganactagcntcaaaaccattcaaaagacagaagtctgcatctaacctttcaa

SEQ ID NO: 48848 - DNA, 265 bp, Glycine max
  unsure (1)..(265): unsure at all n locations; Clone ID: 701136088H1
acacttntgtcttcgttccattatctagttctcaattctcttcaccctttgcctctgaaagaaatgggtagttctgaagcggaaagaacaacagtaggattggcagcaagagacccttcagggattctctccccatacacctacaatctaagaaacacaggccctgatgatgtttacattaaagttcactactgtggaatttgccattctgatctccaccagattaaaaatgatcttggcatgtccaactatcccatggtcccag

SEQ ID NO: 48849 - DNA, 264 bp, Glycine max
  unsure (1)..(264): unsure at all n locations; Clone ID: 701136089H1
gggaatcaccattgatattgctttgtggaagtttgaaacaacaaagtattattgcacagttattgatgcgcctggacatagggatttcattaagaatatgattactgggacntcccaagctgactgtggctgttcttatcattgattcgaccactggtggttttgaagctggtatttccaaggntggncanncncgtnaacatgcccngcttccatnacacccttggtgtnacacagatgntncgccgntgnnacaaannggnt

SEQ ID NO: 48850 - DNA, 234 bp, Glycine max
  unsure (1)..(234): unsure at all n locations; Clone ID: 701136091H1
tgtttcctttcgggcaaaagggtcaaaagntnaaggggnctatggtggttatgcagnagactgtgttggatatcaacagcatcaccagtgttggagggatcgttgaccaaggcttaggcttcataggcagtgcagtcgatgcacttacttttgcagncaccaaaatctccatccagttgattagtgctaccaaggctgatggtggganaggaaaaattggnaagagtacaaatt

SEQ ID NO: 48851 - DNA, 254 bp, Glycine max
  Clone ID: 701136092H1
tgatccttacctcaccacatctgatattctactgggaatggtggacagaccaaaggctgctcaacccatgtatgccagtcttcaagaactatattcctgtttacgattctaagctggtttcaattgcagaattgcaagtgatgtgataaatagtgcctgatgtatatacagttctagttcgtgcatggatttgtgaaatgtaattccagaagtcctctatatttggttcatatggatgagggatctcctcataa

SEQ ID NO: 48852 - DNA, 256 bp, Glycine max
  unsure (1)..(256): unsure at all n locations; Clone ID: 701136094H1
caaaatcagganatggaacaaagggatcagaagggtgccaccaacaagaagtngttaccaaggttgtcataggagtaggagcgggaattgttattctatttgtggggacgacctcattgtacttgatataccagaaaaagaaactcaacaaactcagagagaaatactttcagcagaatggtggttccattttgctacagaaactctctacaagagaaaactcctcccaaattcaaattttcacagtggaacaact

SEQ ID NO: 48853 - DNA, 257 bp, Glycine max
  unsure (1)..(257): unsure at all n locations; Clone ID: 701136095H1
gaactagtctcctactctcanccncaananaataatggcatctgcacatgcgntggatacccccgtatgggtcccaagagnnanctcaagttcgctctcgagtctttctgggatggcaagagcaccgccgaggatttgcagaaggtgtcttctgatctcagggcatccatctggaagcagatngctgatgctgggatcaagtacatccccancaacactttctctcactatgaccaggtnctcgacgccnccgccat

SEQ ID NO: 48854 - DNA, 256 bp, Glycine max
  unsure (1)..(256): unsure at all n locations; Clone ID: 701136096H1
anaggttacataaatctagacaagtgttgactcattctagatctgtaactacaattacaaagactactctgtccttcacagacagcggttccaaacccaacaccattcacctgcttccattccatttcctctttctttctcccacatctctcatttctncagatccaccaccctctttgcagaaaaaagactttgatatttggaaatgtctgaagtgaagaacaaagtggatttcatccagttgcttggacctgac

SEQ ID NO: 48855 - DNA, 277 bp, Glycine max
  unsure (1)..(277): unsure at all n locations; Clone ID: 701136101H1
gattgctggtttaaatccaaatgtcattaagattatagaggagttcccactaagtagcaagctagatactcaagcctatggtgatcatacctgtataatagcaaaagaacatttggagcctaacttaggtgggctcactgttgagcaggctatccaaaacaagaagttgttcatcttagatcaccatgactatctcantccttatttgaggaaaataaatgcaaataccacaaagacttatgctacaaganccatatttttctngaaagatgatgga

SEQ ID NO: 48856 - DNA, 277 bp, Glycine max
  Clone ID: 701136102H1
gaaaaagaagatggataaagcttcaagaaatggaaacttgaaagatatcaagcttagctttgttggtcattctattgggaatctcattatcaggacagccttgacagagagcgtcatggagccatatctaagatacttacatacatatgtctccatatcgggtccacacttgggttatatgtatagttcaaactctctattcaattcagggttgtggatattgaagaagctcaagggcacacaatgcattcaccaacttaccttcacagatgaccct

SEQ ID NO: 48857 - DNA, 274 bp, Glycine max
  Clone ID: 701136103H1
gcacttgttgtactctttgcatttctcttcctcagttgtgcctatgcacaagacacaacaacccttgtgcctgcaatcataacttttggtgactcagccgtggatgtagggaataatgactatcttcccacccttttcaaggctgattaccctccttatgggagggactttgctaaccaccaacctactgggaggttttgcaatggcaaattagctactgattttactgctgacactttgggttttaagacctatgctccagcatatcttagcc

SEQ ID NO: 48858 - DNA, 263 bp, Glycine max
  Clone ID: 701136104H1
caaagcaggaactgcagcttttcttatagagcttgagaaaaaaagatccattaaggtgttagggaagagcactttcattggattggctataactttctttgctggagtttgcttctctctattctctccagcattcaatttggcaacaaatgaccaatggcacactttgaagaaaggggttcaccacttgagtgtttacactgccttcttttacttttcagtctcatgctttgttattgccatcattctaacatcaccttcct

SEQ ID NO: 48859 - DNA, 272 bp, Glycine max
  unsure (1)..(272): unsure at all n locations; Clone ID: 701136105H1
gttcctctgcttcatccttaagaccagagctgtgagtctcagtttctttttcttcttctgttgtntgtaaaacatgttttcttctcttttgttcacctgagtgaaggaagacataggcataccttgttgctattgctgtntatgttgtaattgtaattgtaattgttattgttattggtggtgatagattagaatttagatggagccttcactcctactttcttcaccttcatcatccacccctttacctttcttcatctcaaacacacttc

SEQ ID NO: 48860 - DNA, 270 bp, Glycine max
  unsure (1)..(270): unsure at all n locations; Clone ID: 701136106H1
gcttaagggagggttttatgttgaacccgaagctaagctcttgttcatcatcaggatccgtggtatcantgccatggatcccaaaacaaggaagattctgcagcttctgcgtttgagacagatttttaatggcgtctttcttaaagtgaacaaagctacagtgaatatgctccatagggtagagccttatgtnacctatgggtaccctaatttgaagagtgttagagaattgatctacaagaggggctatggaaaagttaacaagcagag

SEQ ID NO: 48861 - DNA, 63 bp, Glycine max
  unsure (1)..(63): unsure at all n locations; Clone ID: 701136107H1
gttttttaatatggttttngtctagatataattaatataaacaaaggtnctttctctgattct

SEQ ID NO: 48862 - DNA, 268 bp, Glycine max
  unsure (1)..(268): unsure at all n locations; Clone ID: 701136108H1
cccgtgtcctctcccctccccctacaaacaggttccggctctaatattgtgacactataggcacaggcagtcaggcacccacnnnnnnnnnnnnnnnnnnnnnnnnnnnatttcttcagttcctctgaagccgtgcttgcggcggatctagatcaccggcaatggcggactcgccggaggattgttcgagggatcctggaaacggcaaggacatggaggacagtacatcctctgttgccaatggtacaagtagctcttgctggnaggc

SEQ ID NO: 48863 - DNA, 269 bp, Glycine max
  unsure (1)..(269): unsure at all n locations; Clone ID: 701136109H1
gaactccacctgagaaaaagatacccttaattcgcaggcgcgtcttgtgttggacaacaaccacaagatgattaacttcgaagaaaccgagttgcgactcggcctccctggcaacgactcagcactcaagggaagtgctgccaagagaggcttctctgaaactgcttctnctgatttgaagcttaatctttcttcttgcattaacgactctgcctcggattcaccctcatctatgtctacagagnagcccaaagagaacaagactacca

SEQ ID NO: 48864 - DNA, 272 bp, Glycine max
  unsure (1)..(272): unsure at all n locations; Clone ID: 701136115H1
gtataaggtggccaataagctgaaatctgaaggtcacaatgtcacaactcnagacatggctgcttgtggtgtcaatccaaagcaaaggcaagaggttcattcagtttcagagtacaatgagcctttgatgacattcatggcctctcttcctccagaggaaaaggtgattctgttggtcacagtcttggtgggctatcagcatctattgccatggaaaattaccctgagaaaatctctgttgcagttttcatcactgccactgttgtctctca

SEQ ID NO: 48865 - DNA, 274 bp, Glycine max
  unsure (1)..(274): unsure at all n locations; Clone ID: 701136116H1
ggcaatgcatttgacaacagaatagatgccaaaaggaccctaacgaganattaaacttcttcggcacatggaacatgancaatgtgatagcccttaaagacattattcgaccaccacaaaggtataacttcaatgacgtgtacattgtttatgagttaatggatactgatctgcatcaaataattcaatccaatcaacaatgactgatgatcattgtcggtattttctgtatcagttgttacgaggactcaaatatgtacactcagcaaatgtt

SEQ ID NO: 48866 - DNA, 277 bp, Glycine max
  unsure (1)..(277): unsure at all n locations; Clone ID: 701136117H1
cttcttgctcaatacctgttgaggtgttgattgttcatagtgcgcaattagtttttttgggaacttagatgctgtggagtttatttttctgtcattaaagacaaatttgaggccatatagagaacatgtctagtaagaaggaagagaaatctcaggctgcggctgaaagaatcaaggctgcagccctgagtgctgcgaaaggccttagtcgtgcccaggctgaaagggctgcgactgcagctgcccgaaacgtcaatgcttatgggcagaaggnaga

SEQ ID NO: 48867 - DNA, 274 bp, Glycine max
  unsure (1)..(274): unsure at all n locations; Clone ID: 701136119H1
cangcgctntcgcgaatncaccgnatnattgtttcgagcagtgtaaaagagacaaaganaaacacagcaattcttcgcgagttcaacctttagccatggctagcaattgtncaatagaaggaccactannggaggagttcacttaccaagcaggatcagctcccttcaanagntgtcatgnttcgaccattgtngnggntgntanggatcatntnntggnngccnatnntgggggtacattcgagggggcacctgatgtgnaaatatgggtgca

SEQ ID NO: 48868 - DNA, 271 bp, Glycine max
  unsure (1)..(271): unsure at all n locations; Clone ID: 701136120H1
cagaaccaaaatcggttttcttctgtctctgatntnctcanagcttcnaattcnccttgtttggnttgtttatgcggtcnggagtatgatatngccgccggcngtggtaacggaggaggaggggcggatcaacgtntcgtncgaccgtggcgtccggttcttcgcaatccttggaccgtttctctcagaatggggctgnattganagaacgaaatacttagggttatctgattgctcatnagtngntagcagtgctctactgtgncaagct

SEQ ID NO: 48869 - DNA, 268 bp, Glycine max
  Clone ID: 701136125H1
cgagcaatggcgacatcgctggtgcgatcgggttttcttcgaagcgccctaagaggaagcgctcgtggctcccaggttccgaagcgaaactttgcttcctctggtcatcacgatgatgcatatgagacggccaaatgggagaagattacatatctaggcattgttagttgcactggtttagccgtttataatctatcaaagggccacccacacttcaaagaacctcctgcttacccatatttgcatatccgcaataaggaattcccct

SEQ ID NO: 48870 - DNA, 249 bp, Glycine max
  unsure (1)..(249): unsure at all n locations; Clone ID: 701136126H1
cntaaacttaaantgggctgatcgacnatggattggttctcanggctttcaaaaagtgggcangagccatccctagtgtacgagtatggccttacctttgctcacaacgagctcgagccaagaagacatgnnttacttcaaccacgagtttctccaaagcatgggcatctccatagcanagcacagactagagatcctcaagcttgccagaaaagagaagggaaagagcncacgcgcggtggcaaggct

SEQ ID NO: 48871 - DNA, 88 bp, Glycine max
  unsure (1)..(88): unsure at all n locations; Clone ID: 701136128H1
catcacctcattcgtttctcctcttctagntgcttctgtttcttctanttnctccaaccttcgtttcaancaccancacntnannncg

SEQ ID NO: 48872 - DNA, 273 bp, Glycine max
  unsure (1)..(273): unsure at all n locations; Clone ID: 701136131H1
gcagttccctacctctcctttcaagatgcagatcttcgtcaagaccctcaccggaaagaccatcacccttgaggnggaaagctctgacaccatcgacaacgtcaaggccaagatccaggacaaggaaggnattcccccggatcagcaacgtctcatcttcgccggaaagcagctcgaggacggccgtaccctcgccgactacaacatccagaaggagtcaacccttcaccttgtcttcgtctccgtggtggcatgcagatcttcgtcaagatc

SEQ ID NO: 48873 - DNA, 279 bp, Glycine max
  unsure (1)..(279): unsure at all n locations; Clone ID: 701136132H1
cccatcttcgttgctgccaccatgcataggatcaacaccgcaaggnnccattttttcctngctgttttcagaagcaaatctcggcctcactctgctgctttctccacctccttgctcttcgacgaaactcagacacagtttaaggaaagtgttgctcaatttgcaacggaaaatattgcccctcatgcttcgaaaatagaccaaacaaattatttcccaaaggaggtgaacttatggaaaagcatgggggaatttaatctcctgggattactgcaccag

SEQ ID NO: 48874 - DNA, 271 bp, Glycine max
  unsure (1)..(271): unsure at all n locations; Clone ID: 701136135H1
gctaaggcttggactgcctggnnacgtaggaggcactggcactgaagaagtgctcatcaggaagagaggtttctnctgagactgaaactgaaactgaggaggatgagtctgctaccactgtggatttnatgcttaatctntcttctaaggaannnnnnnnnnnnnnnnnnnnnnnngataagcacaagactttgcctaaggagaagactcttctgcctgcagatccngctaagcctccagccaaggcacaggtggtaggttggccacctgt

SEQ ID NO: 48875 - DNA, 97 bp, Glycine max
  unsure (1)..(97): unsure at all n locations; Clone ID: 701136139H1
gagaaattnacccttccgcagggtcatgcggcatntgctagtcnttacaatgganttattctaaagcctgnagcatctgcncgtctacncnngangc

SEQ ID NO: 48876 - DNA, 264 bp, Glycine max
  Clone ID: 701136140H1
gtcgatgcgaaaatatctcgttcatgttaatgttatgataacgaggaatggactatgatgctgttctgttggtgacggtgtgattgattgtgacgaaatctgacaatgaagcgtggagcattgttgtcagtgcttgcctgcgccttcgcggcggtgatctgggcagcgaacggcgacgacaacctcgtcccgcctcgccgggaagtgtacggcaatgggcgaatattcgacatcagtcatcggtaccaacccgagatgccggaa

SEQ ID NO: 48877 - DNA, 268 bp, Glycine max
  unsure (1)..(268): unsure at all n locations; Clone ID: 701136141H1
ggagtttcaaccccgcagaccgaatcgaatcctccaacatacgtttnaacacgatagatagacanaacaaaatccgaagctccaaaattcctccnaagtgcagtaaccgaaacccaatgacccacctagccatggtttggcttcaaacatggctccctgaaccctagcgtttctccctcttcgccaacaacgctgatccgatcccgatctgtttctgattccgatccgatccaatccaatggctggggcagcctctgctctgttcctc

SEQ ID NO: 48878 - DNA, 185 bp, Glycine max
  unsure (1)..(185): unsure at all n locations; Clone ID: 701136142H1
gttccttcacctctcaacaatctagcttgctncctatctatctatatgtaataagatgcgttcaaataggggcactagcttcactttatgttgtttcagctgtgtgtcaacaagtcatgtaagagacttcactatgttgttttctctttcgtggctttaataaattatgcgcccttgttccatac

SEQ ID NO: 48879 - DNA, 274 bp, Glycine max
  Clone ID: 701136148H1
gcaatctcacaacagagaaagcgatcgagagagaaaaagagagagaaatggagcttcatgaccatgatttcttggaggaattaatgtctctaagaagagaaacatgggatacaaatccatgttcacaagaaaaccagcttttctctaatggctggagttttgattgttttgatcaaaactatcatcaagcttttcctccaaactctttctcttgccaacaagttcctcaaagttacaaccacgactacacctacaatgaaatctatagttcctt

SEQ ID NO: 48880 - DNA, 273 bp, Glycine max
  Clone ID: 701136149H1
gaaaaatctagatctcgttcttccttgatctacgttacgcttttagtgaccggatctgtatggatctgaaccagatctacacgccgatggtggttttggcctggtctttcatagatctgatgcatggaggctcagatctactgtacagaggtgtgcgattcatgttcgtctctcttttggaatctgtttcgtagaaagtcgtttggtcttccatgtcgcatggctcttgaggtatttttttttgcagatactgtagataatcgatgagaagaa

SEQ ID NO: 48881 - DNA, 252 bp, Glycine max
  unsure (1)..(252): unsure at all n locations; Clone ID: 701136150H1
ggcagacgccggtgcctccaaaacctaccctcagcaagccngtaccattcgcaanaaccggctacatcgtcatcaaaggacgcccctgcaaggttgtngaagtnncgacttccaaaactggnaagcncggtnncgccaagtnccactttnttngnattgatattttcactgccaaganacttgaggatattgtgccctcttctcacaactgtgatgttcctcatgtgaatcgtactgattaccagctcattg

SEQ ID NO: 48882 - DNA, 264 bp, Glycine max
  unsure (1)..(264): unsure at all n locations; Clone ID: 701136154H1
gaattttcgtagtcaactaattcttgtgacagagtagggagcttctggtgattcctntgcnattctcagcattttgatgtagtagactatttgagtgaagcatctatcatgcgtatcatctggttgtaacaagtatcacctttgcttttcagactgctgcggagttggagaagcgcaaaganaattttactaaggagcttgattttgtntgtgctgatgtggtgatggccatcgtagcagatttatgcttgtgtggcttcctgc

SEQ ID NO: 48883 - DNA, 265 bp, Glycine max
  Clone ID: 701136155H1
aattttctcctctctccgattccttttattaattggagttttctcgctcctttttctttccctgaaaacatttcatcttcgtattgatgtcggaaaagggtcggccacttcccaaatttggtgaatgggatgtcaatgatccagcctcagctgaggggttcacagtgatttttaataaggccagggatgagaaaaagacaggtggcaacccagagtcaccaggaaagactgctactgatcctcatagcaaacctgcagtagagcc

SEQ ID NO: 48884 - DNA, 266 bp, Glycine max
  unsure (1)..(266): unsure at all n locations; Clone ID: 701136157H1
tctttcttcaccatgtcacttgctgggaaaatcaccactgaaatcggggttcatgcaaccgctacaaagtggttcaacctcttcgcaacacaactccatcatgttcaaaacctaactgatagagtgcatggaaccaagctgcatcaaggtgaagactggcatcacaacgagacagtcaagcactggacttataccatagatggtaaggttacaacatgtctgganagtattgaatccattgatgaacagagcaaaacaatcaccta

SEQ ID NO: 48885 - DNA, 269 bp, Glycine max
  Clone ID: 701136161H1
ggcggtacccttgctctccaagaggatcgtgaagaagcgcgtcaagaagtttatacgcccccagagtgatcgcaagatctccgtcaagccaagctggcgcagacccaagggtattgattctcgtgtcaggagaaagttcaaaggatgcactttgatgcccaacattggttatggctcagacaagaaaacccgccattatctaccaaatggtttcaagaaatttgtcgtgcacaatgtgaaagacctggaacttctcatgatgcataaca

SEQ ID NO: 48886 - DNA, 274 bp, Glycine max
  unsure (1)..(274): unsure at all n locations; Clone ID: 701136164H1
ctcaatctcactgtgttgtgagttgtgtgtgagcaccaaccaacaatggtgtctctgactccgttatgtttctttattaccttgttgatcgctggtgcagacgcagcggcgganncccaaacggtgcgttttgacaccggggggttgagcagagacacctttcccaaaggattcttattcggaacggccacgtctgcgtaccaagtggagggtatggcccacaaagacggtcgcggcccaagcatttgggacgtcttcatcaaaaaacccggga

SEQ ID NO: 48887 - DNA, 271 bp, Glycine max
  unsure (1)..(271): unsure at all n locations; Clone ID: 701136165H1
ttttcacaagcctaataattctctttgctgtgtcactgcattacatacaatatatattcngagcacaagnnnnnnnnnnnnnnnnnnnnnnnnnttagcagttcactttcaatctctgtagatttggtttgtgttcattgtccccactgaatagtgaggggtagcatagcagcccaccatcccatttcactctccacaccatgcctccaggtgctaggaagagaaaagctgccaggaaaaagaaggcaaaggaaaacaacatcaacccntc

SEQ ID NO: 48888 - DNA, 270 bp, Glycine max
  Clone ID: 701136166H1
gtcctctgagactttccttcagtccttcaccttctttctctctaggcgcaaaacctcgtactgtttgtggcggctaaggatgtcagggaaaggggcgaaggggttgatcccggcaaaacctccgccgccaacaacaaagacaaggacaagaagaaacccatctcgcgttcttcacgtgccggccttcagttcccagttggccgtatccaccggcttttgaagtcaaggacaaccgccaacggtagagttggggccacagctgctgtctat

SEQ ID NO: 48889 - DNA, 267 bp, Glycine max
  unsure (1)..(267): unsure at all n locations; Clone ID: 701136167H1
ganaaggnaggtaggtataccgttgaggggtgcaagangcaatggcccgcatgttaaactcgggggcccatatagaaagatgtggtgncngcgtctgcnaatgagaaagaggacgataaaggtggnnnnnnnnnnnnnnnnnnnacgaacgaagacagcgaaggagctacgctgcgagatttagaaattgaatccctaatttcgaggttccgactcctgtggagtgatcatatagcgaattttgtgttagcgatcaatttgcagagt

SEQ ID NO: 48890 - DNA, 249 bp, Glycine max
  unsure (1)..(249): unsure at all n locations; Clone ID: 701136168H1
agcgaccgnggtgctattctcgtgccacgcaggattcggtcgaanctgcaaacggcgctggaanccaccgttttggaggtggacgacgtgtcgtaccagcacgcgggccacgccgccgtgaagggtagttccgacaaagaaacccacttcaacctcaacatcgtctcccccaagttcgagggccagagccttgtcaaacgacaccgtctcatctacgacctcctcgccgacgagctccagagcggcctc

SEQ ID NO: 48891 - DNA, 265 bp, Glycine max
  unsure (1)..(265): unsure at all n locations; Clone ID: 701136169H1
gtaccatcaaagatgcaaagtcttgaatgcttgtaatgtttgatgtgaagtgaaagcctgatgaaaatatgaacttgtgttcaattaaaatgggaactacatgatgaaaaacatctgaagacagtacttagacagatgcaatttgtgactgaatttcattgttagattttagggagaagacttgggaggtagttgaatgtcaagtatattgttgtgtntttnttataagatgaaggttatctagtttccctattcctgacatgca

SEQ ID NO: 48892 - DNA, 261 bp, Glycine max
  unsure (1)..(261): unsure at all n locations; Clone ID: 701136172H1
aaaaccctaggagagtcgtgaccatagcggcgcctccttcnccctaatcgattttntcttcatggagtagtgtcataatcagacacagatcatggttgttctttactggcacctccttcacctctttgtggggaatatttgactgtgnagttctgtctttctcccttgcagaggcatccattcctctttctggattggttctaacaactaataacggaggacaatctttcatagactgttctaaatatgaaatcatttggc

SEQ ID NO: 48893 - DNA, 256 bp, Glycine max
  unsure (1)..(256): unsure at all n locations; Clone ID: 701136173H1
cgcaaacgcaaataataaaaaacaaggttttagccatggcatcgaagcggatctncgaaggaactcaaggatctccaaaaggatcctcctacctcatgcagcgccggtcctgttgctgaagacatgtttcactggcaagcaacaattatgggtcctccagacagtccttatgctggaggtgttttcctagtcactattcatttccctccagattatccctttaagccacccaaggttgcattcaggacgaaggtat

SEQ ID NO: 48894 - DNA, 262 bp, Glycine max
  unsure (1)..(262): unsure at all n locations; Clone ID: 701136175H1
tgctatagcagtaagctataactcatntgaggctctgtgagaattgagaaatggctaaagatgttgaggttnaagancaaggnggagagtactctgccaaagactaccatgaccctcctccagcacctntgttcgacccagaggagctcacacagtggtccttctatagagccctcatcntcgagttcatagcaacccttctcttcctttntgtcactgtgctcaccattatnggctacaaaaggcagactgatacaacggt

SEQ ID NO: 48895 - DNA, 265 bp, Glycine max
  unsure (1)..(265): unsure at all n locations; Clone ID: 701136177H1
cttaaaactggtatctgatttacaaaaggttacaaacttctcttgcntaaagaatggcatcagcaacaataaggaatgcagttgtcacgggagcaaacaaagggataggatttggaatatgcaagcaattggtttctaatggcatcacagtggtgctaacagcaagggatgagaaaaggggtcttgaagctgttgaaaagctgaaagagtttggtgtgtctgatcaagtggtgtttcatcagcttgatgtgactgaccctaaaag

SEQ ID NO: 48896 - DNA, 272 bp, Glycine max
  unsure (1)..(272): unsure at all n locations; Clone ID: 701136179H1
aatagaacctcgttggtttctgagacagccagagccaccttacggatcngagagatcnccacgcacgcacgcacaaacncctttgattttgtcttccgcttcgtcatttcctantctcagctnccaattctcctccnccttcttctaattctacttcttttcgagggtttttcgttcctctgtgcctgattgatccctaattcgataccatgcggaagaagctcgatacccgtttccccgctgctcggataaagaagataatgcaagcagat

SEQ ID NO: 48897 - DNA, 268 bp, Glycine max
  unsure (1)..(268): unsure at all n locations; Clone ID: 701136180H1
gctggaattggatggatgacagccttncatctttgtgaccagctttgtnggattgttagcgttggttcccattcgaaagnttatgatnatagactacaaattaacttatccaagtggaactgcnactgctgttctattaacgggttccatactcctaaaagncntgtgatggccaagaagcaggttcaatatcctctcttccgagattctcantcnctttgagttcttcgtcgcttacggtatagntnccatggttcntcagatccta

SEQ ID NO: 48898 - DNA, 272 bp, Glycine max
  unsure (1)..(272): unsure at all n locations; Clone ID: 701136181H1
ctctgtctctgtcaaccgtgcctgcgttcaattctctcacaatggcngaatccngcctcctatctctcccttccctcttctacgccaaaaacaaaaccctttctctctcaattcccactaatcctctcaacctgcaattcccatgctcaaactcttcgctttttcccctcaccaccaagactacgcgccactcttctctcctcacattcgtggctcagacatctggttgggccaaagaaggggaggaggaagaagccgcgtgggagaaccaa

SEQ ID NO: 48899 - DNA, 269 bp, Glycine max
  unsure (1)..(269): unsure at all n locations; Clone ID: 701136182H1
ctgtgttcgatccgttgagagaattcgcaaaggacagcgtgaggctcgtgaagcgctgccacaaacccgntcgcaaagaattctccaaggttgccgtgcgtaccgcaattggtttcgttgtgatgggattcgtgggtttcttcgtgaagcttattttcattccaattancaacatcatcgtcggatctggttaggatgaagggtactacaatcgcctcaggaattcaggttgtcaagcaaaagtaggcagaaagagttcccacatcaat

SEQ ID NO: 48900 - DNA, 266 bp, Glycine max
  unsure (1)..(266): unsure at all n locations; Clone ID: 701136184H1
ctcaacctnaacctctccgagccancgagcgagaaccagactcaagaagaaaacgtgttgtgttagtgttacccctttcncnntttctctcttncttgaatttggcgcgtgcgtttcgattcttcttccgaatcagagggattctggatttcttgttgaagatgcgacgctcttctgcatccaaaaagtcgggtcaatccaattccactcccaacgccgngctctcttccgctctgcttcaagtaaggcaagctcgaaggaatcag

SEQ ID NO: 48901 - DNA, 255 bp, Glycine max
  unsure (1)..(255): unsure at all n locations; Clone ID: 701136187H1
catttctcttttatgcagctatggttataacagctacttttatccttatcttccnccttcattcctctctntggccagacacacataatggnttatattggtgtttgttcccttgtaggttctctaacggttatgagtgttaaggctcttggaattgtcataaagttaacactgtctgggatgaatcagctaatttaccctcagacttgggcattcactctagttgtacttgtttgtgttcttacccaaatgaat

SEQ ID NO: 48902 - DNA, 263 bp, Glycine max
  unsure (1)..(263): unsure at all n locations; Clone ID: 701136188H1
acttcggccttatccagtttagggtttcggttctctaccctatctttcacgtatcgaaaccttaaatttacgatcaggtctgagcaatctggttggtagaacctttggtcttagtgagtcaagttttatgtctgaattagacgatcaanttcctactgccttcgatccttttgctgatgcaaatgctgatgactcgggtgctgggtcaaaggagtatgtgcatattcgtgtacagcagcgaaatggtaggaaaagcctgacaa

SEQ ID NO: 48903 - DNA, 242 bp, Glycine max
  unsure (1)..(242): unsure at all n locations; Clone ID: 701136189H1
gcgaaacgctgtcgttgcgccaatcncggcgttgttgttggnggtgctactcgcggcgagtgncggtggtggaggctcaggagaactcggacgtgaagacgctggtgaagcacatgcacgggaagaagtactgcgacaaaggatgggaatgtaagggctggtcaatttactgttgtaacctcactattactgattatttccagacctaccagttcgagaatctcttctccaagcggaactcg

SEQ ID NO: 48904 - DNA, 264 bp, Glycine max
  Clone ID: 701136190H1
ggcgcaggctaccaaaggttccctctccgaatgaaaactggctatggtgagcgttcttcggaggtaaaatgcgcaagttttaggcttgctgtggaagcacacaacatccgagcgccttaaaaccattcctgaagagtgcgttgaaccaacaaaggactacattaatggcgaacaatttagatcagactctaaaacagttaaccaacaagctttcttttatgctagtgaacgcgaagtccatcacaacgacatatttatattcgg

SEQ ID NO: 48905 - DNA, 261 bp, Glycine max
  unsure (1)..(261): unsure at all n locations; Clone ID: 701136191H1
tgcggctagggttttagcgcanttcttctagatttaaggaagatgggtaaggaaaaggttcacatcagtattgtggtcatnggccatgtcgactctgggaaatccactaccactggtcacctgatttacaagcttggaggcattgacaagcgtgttattgagaggtttgagaaggaagcngctganatgaacaagaggtctttcaagtatgcctgggtgctggacaaacttaaggctgagcgtnaaagaggaatcaccatt

SEQ ID NO: 48906 - DNA, 264 bp, Glycine max
  unsure (1)..(264): unsure at all n locations; Clone ID: 701136192H1
tgttgctctcactactaatggaagtgctcaaaagaagcctgggaggtctctgtctaagaggaaactgggaattcaagcaatggcagcagtaccaacccctgaactctttgaagcaacaatggtgcaagtgagagaagcctcaaagtctttcacatctctgctactgtctctcatgcacaatgcacattgggacataacagctgcngttcgttctattgaagctgctactgcctccactgacaaattccataatacttcttcaac

SEQ ID NO: 48907 - DNA, 265 bp, Glycine max
  Clone ID: 701136193H1
agccaacctcaaataacccttgttatctctctttcattctcacttgtactcatctctttttcacaactttttttgtaccttctgatctaatggcagttccagtgattgatttttcaaagctgaatggtgaagaaagaaccaaaactatggcacagattgctaatgggtgtgaagagtggggattttttcagttgatcaaccatggtattccagaggaactccttgagagggtgaagaaggttgcctctgagttctataagctgga

SEQ ID NO: 48908 - DNA, 267 bp, Glycine max
  Clone ID: 701136194H1
gttctatctgtgacgagcatcatggcctcaagagcagtgttattgttggctatgtgtgtgcttccggcgatggttgtggccattcgcccagcaaagaaccctttttgcgtgaagggtcgtgtctactgtgacccttgccgtgctggttttgagacctcagctaccacctacattgctggtgctgagattatgttgcaatgcaagagcagggttagcaacgaggttgtgtacacgaagaaggggtacaccgactcaaccggagcatac

SEQ ID NO: 48909 - DNA, 269 bp, Glycine max
  unsure (1)..(269): unsure at all n locations; Clone ID: 701136195H1
gtcgtgtcgggacaggtcgttcaatcacgcggattcgtgcttggtagtttgaaatcctcaaatccacgatactgacacgtncgactctaaccccgccacgtgcgactccaaccccggcacgtgcgttcaatccctcttaaatccctcggcaattttttcttcactcacattgctcctcacggcacgacttgntcaccgaccagagctgattttcgcggcggttaccactcatcggagattctatccaaaatcgntttccgatgacgata

SEQ ID NO: 48910 - DNA, 271 bp, Glycine max
  unsure (1)..(271): unsure at all n locations; Clone ID: 701136196H1
ggcgtctccctccttcctctcctctctctgcctttacctttgattgtaggtttttcattatttggcggcgaaacagggttgaatatttttgttttagcgtctgagctttgaattacagagcaaagtgaagcgtgaacatggtgatgcatctaaacgggacaccgtgcgctctcggattccacatgcctgcggagtncggaaacccacgcgcagtgctggatgggttggcctgaacgtgccgataatggcgtgacggcgccgttcacgccca

SEQ ID NO: 48911 - DNA, 282 bp, Glycine max
  unsure (1)..(282): unsure at all n locations; Clone ID: 701136201H1
cttcccctatggctcgtcactccttgctncttagccctcctcctcttcgccgcngtngccaccgncgcgatggcgtggncgcgttccgacgccgacgacatcctgatccgtcaggtggtgccagatgttggcgaacgaagaggaggacaacctgctgaacgccgagcaccacttcgcgagcttcaaggccaagttcgncaagacctacgccaccaaggaggagcacgatcatngcttcggcgtcttcaagtccaancttcgcagagccaggctgcacgccaa

SEQ ID NO: 48912 - DNA, 278 bp, Glycine max
  unsure (1)..(278): unsure at all n locations; Clone ID: 701136202H1
gccgccattgatttttcctcttccatttctcttactttctcagcctttttcgattacccatttggttatttcgccctaatggctcttgctccatccaaagtttccaccttttctggttttnctcccaaacccagtgttgggggtgctcagaaaaacccaacttgctctgtttctctgagctttttgaatgagaaacttggaagcagaaaccttagggtttgtgcctcaacggtgcctctcactggggtgatttttgaaccgtttgaggaggttaagaa

SEQ ID NO: 48913 - DNA, 281 bp, Glycine max
  unsure (1)..(281): unsure at all n locations; Clone ID: 701136203H1
attctcccttcatccaagtgtccgtacaacacatacacncntctccttatctaccgaccaccaccgacgtcgggaaccgccgcacattaacctccacgttgtcgtacaccgttccctccgcccaactatcaatgtcccttcaccaaccacaactccttcaacggcgacaccaccgccgccgccccgtccttcctcaccgcgatgtcgtnggcgccgacgaggtcctcgttcagcaacactttccttgccgtgccgtccaccgcgtccaccttgaaaacctt

SEQ ID NO: 48914 - DNA, 274 bp, Glycine max
  Clone ID: 701136204H1
gaacccttccacggtggtgactgcgcgatgggtgcctacaagtatgtttcagagctatggcgcaagaagcagtctgatgtcatgcgcttcttgcagcgggtgaggtgctgggagtataggcagcaaccttccattgttcgcttgacaaggtcgacccgccctgacaaggctcgtcgcttgggcttcaaggctaagcagggctatgtgatataccgtgttcgtgttaggaggggtggccgaaagaggccagttcccaaaggtattgtttatggga

SEQ ID NO: 48915 - DNA, 275 bp, Glycine max
  unsure (1)..(275): unsure at all n locations; Clone ID: 701136207H1
gcatcattgtgctccaataatcacagtagtagtcagtagcagtagttcagacagtagtacttgtaanccatgtctaatgtgtcccttctccttttccttgtgttcttgtctctctcatcaggagcgaatttgatcatggctaatggacagaaaacttggtgtgtggcaaagccttcatcagatcaagcaacccttttggccaacctcaattatgcctgctctcaagttgattgcaggattctgcagaaaggatgcccctgctcttaccctgacaa

SEQ ID NO: 48916 - DNA, 277 bp, Glycine max
  unsure (1)..(277): unsure at all n locations; Clone ID: 701136209H1
atgaaaagnggcatcatgagttcgaatctgtttctgtttccaattctcttttcattngccttctgtcctcgcccgncctctctgcttcggatctgatcctcgccaaggttgaccgtcgcattgatctgacttcacagattgtgcgcatcataatttcactaaaaggtaccgaattacgggatctgatgttgtatctgagattttgctgtctttcctgaggaaccagacaagtaacttggcatacntgaaaggaagcactnggtgaagggnagggnaa

SEQ ID NO: 48917 - DNA, 269 bp, Glycine max
  Clone ID: 701136211H1
gccccccaaaaatgaagagcaccatcttctttgctctctttctcttttgtgccttcaccacctcatacctaccttcagccatcgctgatttcgtgctcgataatgaaggtaaccctcttgaaaatggtggcacatattatatcttgtcagacataacagcatttggtggaataagagcagccccaacgggaaatgaaagatgccctctcactgtggtgcaatctcgcaatgagctcgacaaagggattggaacaatcatctcgtcccca

SEQ ID NO: 48918 - DNA, 143 bp, Glycine max
  unsure (1)..(143): unsure at all n locations; Clone ID: 701136214H1
tagncatnancantatgtananatanagaacacgcgaaacacctgattcccctctcccatangccgncagntcccgananaggagantcactcaaanagancngcagcaggaaatagcataaactaataccagaaaatnaaca

SEQ ID NO: 48919 - DNA, 279 bp, Glycine max
  unsure (1)..(279): unsure at all n locations; Clone ID: 701136217H1
tggaactacgtgagcttggaagaancggactgaaacttcagcactgtaggattcggagcttctccactgggcaatgtcttacggcgatgtttccgaggaacaagccaacgcttccgttcgcctcgctttccaatccggcatcaatttccttcgacacttctccgtactncnggagggacactgtcggaaaaagttctgggaaaggcactgaaggctctgggagctccgaggaactcgtacgttgtggcaagaatgcggacggtacaaggaggtttcgat

SEQ ID NO: 48920 - DNA, 273 bp, Glycine max
  Clone ID: 701136220H1
cttggtgttgcctccatgatgattgcctctaaatacgaggaaatttgtgcgcctcaggtggaggaattttgttacataactgataacacatacttcaaagaagaggttttgcagatggaatctgctgtcttgaattttctcaagtttgaaatgacagccccaacagtaaaatgtttcttgagaagatttgtacgtgcagctcaaggagtcgatgaggtccctccctacaactagagtgctctgacaaactatattgccgaattgtctctcatg

SEQ ID NO: 48921 - DNA, 273 bp, Glycine max
  unsure (1)..(273): unsure at all n locations; Clone ID: 701136223H1
caccgcacgaatatcttgttgtttggagcgatccgagaaaaactctgtaaacatgttggtttaccnggacctgccttacaggtgatgagcttctctctgactccttccgttacaaggaaattgagaatggaatgctgtgggaagttgaggggaagtgggttgttaaaggagcagttgatgtagacattggtgcaaacccttctgctgagggtggaggagaagatgagggagttgatgatgcagctgttaaggttgttgacattgttgacactt

SEQ ID NO: 48922 - DNA, 264 bp, Glycine max
  unsure (1)..(264): unsure at all n locations; Clone ID: 701136224H1
ctcccagtacagagcttaaccgagcttccacaaanatgaatcgancaaagttactgaagatngccggttcggttagaactgggggaaagggtaccntgnncaannaaggnngaaaggtntccanaaggcnacaaccncnnnttgaccaaaggctttcgaancccctnannagaactaggnggtgaaatgccatcccnggttattgagggggtcaantatctttaagggtggncgtngttatncaggnntctanantcccccagt

SEQ ID NO: 48923 - DNA, 264 bp, Glycine max
  unsure (1)..(264): unsure at all n locations; Clone ID: 701136227H1
catatccttatcctgtttctttcaatggaagtcatttctgcttctagcttgaatcccaacgctccgatgttcgtnccactcgcctatcggacggtggaggatttctccgaccagtggtgggacctcgttcactcctccccctggttccgcgactactggctccgcgagtgcttccaagatccccagttccaaaacgacgacgctttcgacttcgactttgacctagatctccaagatgaagatgaaagggaacgaaaggaagga

SEQ ID NO: 48924 - DNA, 270 bp, Glycine max
  unsure (1)..(270): unsure at all n locations; Clone ID: 701136231H1
ggaagaagcagcaatggcgccgaagataacacgtaaggttagcngaaaccctgaattgataaggggaatcggaaagtaccccgaggtcgcagatgtnccacaagaggggcatttgggctctcaaggccaaaaacggtggcgttttacctcgccacgaccctaaacccaagcctgaagctcctgctgaaaaaccacccaaattttaccctgctgatgatatcaagaagccccttgtcaacaagcacaaaccgaaaccagctaagtcagggc

SEQ ID NO: 48925 - DNA, 270 bp, Glycine max
  unsure (1)..(270): unsure at all n locations; Clone ID: 701136232H1
gcaggagcagaggggctaaacagagaacagtacgtgtaccttgcganctgtcggagcaggcggagggtacgaagagatggtggagttcatgcagaaggtggtggtggggtggacgccggcgtcggagctcacggtggaggagcgcaacctcctctcggtggcctacaagaacgtgatcgggtctctgcgtgccgcgtggcgcatcgtgtcctccatcgaacagaaggaggaagggcgcaagaacgacgaccacgtgtccctcgtgaagca

SEQ ID NO: 48926 - DNA, 278 bp, Glycine max
  unsure (1)..(278): unsure at all n locations; Clone ID: 701136233H1
ggnatttcgcacgtagctagctacagaagacaaaggggccttgantctcgagatcttgtcagatcggnacgcaaccnccaccgagatcgttttgtttgtgggtgtcgtgcgcgagattaattcattggcgtcacttagcttgggccacaagatgctttcaagcgttatgggaagggaagttactggcatacaggttatggaaaagaagccaaatggtgccataggggcttcaaatggcagtttaagtgatagaatgcgtgtttctcccaaaattgcgg

SEQ ID NO: 48927 - DNA, 273 bp, Glycine max
  unsure (1)..(273): unsure at all n locations; Clone ID: 701136234H1
attggatncattttgcagaggtgttgacaggaaaaccactgtttcctggtaaaagtgtcgngcatcnattagatttgattactgatcttctcgggacaccancacctgaaagnnttgcaggagttcgnnatgacaaggcaaggaagtacttgatgganatgcggaagaaatcncctgtgccatttgancagaaatnncagaatgcagatccattggcacttcgcctnntacanangctttagcntttgatncaaaggatcgaccanctgctnt

SEQ ID NO: 48928 - DNA, 271 bp, Glycine max
  unsure (1)..(271): unsure at all n locations; Clone ID: 701136240H1
aaacgatggaactgagcaaacgttggttgctgaattgagtgccttggatgaacatctcaaggcccatggtccatacattgctggggagaaagtcactgctgttgatctgagtttggcacccaaactgtaccatcttgtggtagcactgagtcacttcaagnattggaatattccagaaagtttgacacatgtccacaactacactaagctgctcttctcccgggagtcatttgagaaaacaaagcctccaaaggtagaatatgttattagt

SEQ ID NO: 48929 - DNA, 270 bp, Glycine max
  unsure (1)..(270): unsure at all n locations; Clone ID: 701136241H1
cttcccaaaacttgctctacaatgagtttccttcgttcttttgcangaaacaaggatatatcaaaagtaggacgcagaggtatccattgcatgcagaaactatgtgcagaaaaaatatctccngattcnctagngaaggcccaaaatngngnganaaatgcnggcnncnaanttntncgggnaantnacangggttaagaaagncccnggcnnntttggggggccctgggaaattaaactnctntggagtgcccttngggtaatnntcgc

SEQ ID NO: 48930 - DNA, 270 bp, Glycine max
  Clone ID: 701136248H1
atggctcccaagggtttaacctttctggctgtgttaatatgcgtttcagcactgtcactgagtccttctgttgcgggggaagggcaaaataatggccttgttatgaacttctacaaggaatcatgccctcaggctgaagacatcatcacagaacaagtcaagcttctctacaagcgccacaagaacactgctttctcctggctcaggaacatcttccatgactgtgctgttcagagttgtgatgcttcactgttgctggactccacaaga

SEQ ID NO: 48931 - DNA, 274 bp, Glycine max
  unsure (1)..(274): unsure at all n locations; Clone ID: 701136249H1
agactctatccctaatccctatcttcttctctgctctctccgcacgctttggctcctnctgatctcagtttctggttttgaattgtaggtgttgttggcttggtatccgtgcaagttctgctgtagccgatttgaaggtgaaggtgtcaccttaaagtttctttcatgtttgatcaggctactatccatttgggagcaactgagctgcttggagagtatttttcttcttctagaaaaaattacagaccctcatcccagagagttagctgtatgc

SEQ ID NO: 48932 - DNA, 170 bp, Glycine max
  unsure (1)..(170): unsure at all n locations; Clone ID: 701136250H1
ttcanaatgaanaaccgttgttatggttngttgtgtgacctaacatggagngcgaggnagccanagaacacanacggatctgccangatnnaatgcgacatcctatccttctggcatggtcatanatanatctgatttacacgcattnatcagtttccacacnacngagt

SEQ ID NO: 48933 - DNA, 118 bp, Glycine max
  unsure (1)..(118): unsure at all n locations; Clone ID: 701136252H1
gaagangagagaggaatgngttcaccgacatcaaggattgtcttccgtattgtggtggtggcgcttnctgcttcttctnctctntctacattgggtcgcccgctgtatngganaatcc

SEQ ID NO: 48934 - DNA, 272 bp, Glycine max
  unsure (1)..(272): unsure at all n locations; Clone ID: 701136255H1
gcctgctcttgctttgcttcctcttctatttgccttcttgttagctgccactacggaatgcaagaaaagatccaggggaatattggaaaatgatcatgaaagatcaggaaatgccaganggacttcaaggtcttgtttcatttcaatctgaaaataaccctaagactcaagagcagcttggtaaaggttccaaaaaccattgtgaagagtctctagttacaaatacacaagttaacagtgacttcgaacccataccaagtgttaccaaatat

SEQ ID NO: 48935 - DNA, 270 bp, Glycine max
  unsure (1)..(270): unsure at all n locations; Clone ID: 701136256H1
ggaattcacaaaagacgttaccatgtcggacgatgagagagaggagaaggaattggatctcacttctccggaagttgtcactaagtacaagagcgccgctgagattgttaacaaggccttgcagttagttatttcggaatgtaaaccaaagacaaagattgttgacctttgcgaganaggggattcgtatattagagagcaaactggtaacatgtacaagaatgtgaagaggaagattgagagaggtgttgccttcccgacatgtgtgtc

SEQ ID NO: 48936 - DNA, 267 bp, Glycine max
  Clone ID: 701136257H1
gatttgatcaagggtggatttcccagcggaaaatacctctttgctggagtggttgatggaaggaacatctgggccaatgaccttgctgcttctctcactaccttgcagggtcttgagggcattgtgggcaaagataagcttgttgtgtccacctcctcctcccttcttcacactgctgttgatctagttaacgagaccaagttggatgatgagatcaagtcatggctagcttttgctgcccaaaaaattgttgaagttaacgcatgg

SEQ ID NO: 48937 - DNA, 246 bp, Glycine max
  unsure (1)..(246): unsure at all n locations; Clone ID: 701136258H1
ggtggattcccaagaaaagaaggactggagaggaaggatacgatgactaagaacntctccatttacaagtcccaggcttctgcccttgaaaagcatgctgctgccaactgcaaggttcttgntgttgctaacccagnaaacaccaatgcattgatcttgaaggaatttgctccatcncattcccgagaagaacatttcttgtttgactagattggatcacaacagggcattgggccaaatctctga

SEQ ID NO: 48938 - DNA, 258 bp, Glycine max
  unsure (1)..(258): unsure at all n locations; Clone ID: 701136259H1
cgagngtngagcnaanngnagcttagnganttncaagttagagctgcananatgcnacgcncattgntggatctntataacatgnnnngaaannttgttaagtgcatccaagtaccacataattactggtgtggcntcatganagacttatntgcagtncggantagtgatanggctgtgggaggaagctggangcatgaaaattattcatgaaagatggaagagtggatgtatctggncntgaacaatgcctttaag

SEQ ID NO: 48939 - DNA, 254 bp, Glycine max
  unsure (1)..(254): unsure at all n locations; Clone ID: 701136261H1
aanatacgnngtgttgttactgctgtctttctcttntcttttctcttnagtnntctcttcccctttcnntntctntntcttcttctncngagcttgtttaagcttntctccattaacatattatcacaatgtgtggtattcttgctgttcttggttgttctgatgactctcgagccaaaagggtccgcgtgcttgagctctctcgcagattnaancaccgtggccctgactggagtgggctccatcaacatggt

SEQ ID NO: 48940 - DNA, 81 bp, Glycine max
  unsure (1)..(81): unsure at all n locations; Clone ID: 701136263H1
gnacaatcctcgtctctctnntgaganccgtnngttacgtaaccggangcngaatatgcacnaattgcagcagtacacacc

SEQ ID NO: 48941 - DNA, 261 bp, Glycine max
  unsure (1)..(261): unsure at all n locations; Clone ID: 701136264H1
atcctctgtcctctcgaagctttcatcgttcaacatnttctcaccatctcagtccatgggcctgctatcttgttttaggtctaccgtcctgagaaaatgttccaaaggaagctctggcatgtcaagattcctgtatacgaacaattttcaacgaaacttgatttcgtctggtggcaatgaatcgtattatgggtattttaacaggagatcatacacttcactttatatgggaactggaactgtgggtgggattacaagtgc

SEQ ID NO: 48942 - DNA, 224 bp, Glycine max
  Clone ID: 701136265H1
gggcggccggtggtgacattgttgctgccattatggagttaactaattaattgtctggtttgtctgaattttagaatgtgtagctatttttctttgttgattgaaatttttgttttccttgaatttgaaatactggtttcagtggtttgtcaattgtctgtaattgtttgcacggaaagaaaaagactgtagactcatttgcaacccagtttcgatcttgagtg

SEQ ID NO: 48943 - DNA, 272 bp, Glycine max
  unsure (1)..(272): unsure at all n locations; Clone ID: 701136266H1
ggtgcagctaccaacgatggtgaagggtcgtcaaggagagcgcgtcagactctacgtgaggggtacaatccttggatacaaaaggtccaagtccaaccagtacccaaacacatccctgatccaaattganggagtgaacaccaaagaagaagtaggatggtatgctggcaagaaaatggcctatatctacaaggctaaggtgaaaaaggatggaagccattnccgctgcatatggggcaaggttacgaggcctcacggcaacagtggtgttg

SEQ ID NO: 48944 - DNA, 270 bp, Glycine max
  unsure (1)..(270): unsure at all n locations; Clone ID: 701136268H1
ggcagtggcagcataaccagaaaaaggttnccagaaattctggtaaggaacgaagcaaagcaaacgcagcgtttcgtttcgtgtcgctgctggttatggatggaatgtacggagtgccggcggagtacgccgacaaggctctcatgacgccggagaatctgattttcccgccggactaccaccacgacttcctcgccgccggccggattccgctgttcggatccgacgagttcttctcctcctccgccggaattcaccggcagcaggaag

SEQ ID NO: 48945 - DNA, 269 bp, Glycine max
  unsure (1)..(269): unsure at all n locations; Clone ID: 701136269H1
gcaacttccaacaccatagtgaaatggcttccaaggctgcacttctcttgtgtttcaatgttctcttcttcaccgtggttagctccacatatgtgccatgcaacccaccccccaaaactccaaaacacccacctgtcccaaagccaccttccccaaagcaagcaagttgccccaaagncactattaagtttggtgtgtgtgctgatgtgttaggtttgatcaacgtgcaattgggaagccaccaaagaccccatgctgcaacctcattg

SEQ ID NO: 48946 - DNA, 269 bp, Glycine max
  unsure (1)..(269): unsure at all n locations; Clone ID: 701136271H1
caagtggtacaagatgcaccaccctatccagggatagaacatgttgaaggagatatgtnaacnnagtgttccaaagggtgatgccattttactaaagcttgtatgtcacaattggttagacgaagactgtgtaaagtttttaaggaattgccacaaagctttgccacaacatgggaaggtgattgttatagactatataattccagaagttccggattcaagcaaaatttctatgcaaacttgtgttgctgatagtctcatgtttttag

SEQ ID NO: 48947 - DNA, 267 bp, Glycine max
  Clone ID: 701136272H1
aagcggtaaggatggggaacacggagaagctgatgaaccagatcatggaattgaaattcacttcgaaatcgctgcagcgtcaatcgcgtaagtgcgagaaggaggagaaatcggagaagctgaaggtgaagaaggcgatcgagaaaggcaacatggacggcgctcgaatctacgcggagaacgcgatccgtaagcgcacggagcagatgaactacctccgcctggcctcgcgcctcgacgccgtggtcgcccgcctcgacacgcagg

SEQ ID NO: 48948 - DNA, 259 bp, Glycine max
  Clone ID: 701136276H1
agcggctaccctaatcctctcctcttcctctctactaatttcagctatggccgacgaagctgtggttgttccagatcccacccagatcgatgtcaagctctttaaccgctggagcttcgacgatattgagattactgacatttctctggctgattatatcggagtggcgacatccaagcacgccacgtatgtgcctcacaccgccggcaggtactcggtgaagcggttcaggaaggcgcaatgccccattgttgagagg

SEQ ID NO: 48949 - DNA, 263 bp, Glycine max
  Clone ID: 701136278H1
gaactaccctccctcactcaaaaccctcgacgctcactccctctctcacatcgcaagccagccaccgcctccactggtggcactgtcataatccggcgcgaagttgccccctcaacgtgggagagtgtcgctgaagaagttgtttcgggtacggctaagagatttctgggaatctcatcctgaggaatgccagcacacaaaccagttgttgggttatcatggcaaccacagttgcctattccatcatcattcaaagccactga

SEQ ID NO: 48950 - DNA, 265 bp, Glycine max
  unsure (1)..(265): unsure at all n locations; Clone ID: 701136279H1
ggnccgcatcaacggctccctccacatgacnatccagaggaggcgttntcattgagannntcanngnccttggngncgaggtncgntggtgctcntgcaanatcttctccacccaggancacgcnnacgcngctattgcccgcganagtgcngccgtcttcgnctggaagggtgagaccctccaggagtactggtggtgcaccgagcgcgcnctcgantggggccccggtggtggaccganctcatcgtcgacgaggtggtgang

SEQ ID NO: 48951 - DNA, 131 bp, Glycine max
  unsure (1)..(131): unsure at all n locations; Clone ID: 701136280H1
gtttttntggttttcttttccttataattttatagtaattgcaggctcacatagtctgagtctaagatgtagtaatactgacatgatattcggaattgagtaaaataattgaactctgtgattccaatgcg

SEQ ID NO: 48952 - DNA, 271 bp, Glycine max
  unsure (1)..(271): unsure at all n locations; Clone ID: 701136281H1
gttctctggcaattaaggtctcatccaaataagcacaaatgggtagccagagttacttcaaggctttgattatttgccttatagcactaattggatcaactcaagctcaattgcagcttgntttctatgccaaaagttgtccaaaggctgagcaaataattctgaagtacgttgttgagcatatccacaacgctccatcactagcagctgctctcataagattgcacttccatgattgttttgtcaatggttgtgatggatcagtgctgtg

SEQ ID NO: 48953 - DNA, 270 bp, Glycine max
  unsure (1)..(270): unsure at all n locations; Clone ID: 701136282H1
cgtttccctcaatttggcactgtctttcttnactcgattgtnccccaccaaattctcattcctcatcatnatccnncttctcctnagcctgttgtatggnctattgggtcgaaccctaagcaagtanagaacacaaattgggggtgttgggtccaagtttacagcaatggggntgtttatgagggtgaatttcaaaaagggaagtgttgggggagtggggtttatcactatcacatgcatgggaggtatgagggaggatgggttgatgga

SEQ ID NO: 48954 - DNA, 269 bp, Glycine max
  unsure (1)..(269): unsure at all n locations; Clone ID: 701136283H1
gcacttcgttgcttggtgatgtccctttctgtnctcttcactcttggtcttgcgagagaaagccatgccagagacgaagatttttggcatgctgtttggccaaacactcccattccaagttcattgcgagancttctaaagcctggccctgcaagtgttgaaatcgatgatcaccctatgcaaattgaagaaacacagtacccgaaaaccttcttctataaagaagaccttcatccaggcaaaacaatgaangtacaattcagcaagcc

SEQ ID NO: 48955 - DNA, 266 bp, Glycine max
  unsure (1)..(266): unsure at all n locations; Clone ID: 701136285H1
cgaatatcttgttgtttggagcgatccgaganaaactctgtaaacatgttggtttaccaggacctccttacaggtgatgagcttctctctgactccttccgttacaaggaaattgagaatggaatgctgtgggaagttgaggggaagtgggttgttaaaggagcagttgatgtagacattggtgcaaacccttctgctgagggtggaggagaagatgagggagttgatgatgcagctgttaaggttgttgacatgttgacacattc

SEQ ID NO: 48956 - DNA, 268 bp, Glycine max
  unsure (1)..(268): unsure at all n locations; Clone ID: 701136286H1
cactttgtaggatcatctcctagcattgatcgattganatggcagacgaagctanccagaactgctttccttgaaattcaaagtcgcatgatcgatactactggaaaaataaaacaggtgcaaacccagatgcgttccaaagaagcagaaaaaaagcgtgcttttctgaccatggaggagctgaagcaagttcctgatgatacgaatgtttacaaatccattggaagaatgtttgtattggagaccaaggcaacattaatgaatgaac

SEQ ID NO: 48957 - DNA, 267 bp, Glycine max
  unsure (1)..(267): unsure at all n locations; Clone ID: 701136287H1
cttgtagtttatactgaaagatgggtttgaagatggcgttactgatcctaggcctttccctcatgctccttttggtctcctctgaggtggcatccacgaatacaaaagaggaggcaaatggagtggatgatgccaaatatcccggtggaagctatggagggggttacccaggtcatggcggtggcggttatcctggccatggcggtggcggttatcctggccatggcggtggtggtggctatcctggtcatgnnggtggccaccctg

SEQ ID NO: 48958 - DNA, 267 bp, Glycine max
  unsure (1)..(267): unsure at all n locations; Clone ID: 701136288H1
ggtgttgttactgctgctcttttctcttttcttttctctttagttctctcttcccctnnnnnnnnnnnnnnnnnnnnnnnnngagcttgtttaagcttttcttccattaacatattatcacaatgtgtggtattctgctgttcttggttgttctgatgactctcgagccaaaagggtccgcgtgcttgagctctctcgcagattgaagcaccgtggccctgactggagtgggctccatcaacatggtgactgctttttggcacatca

SEQ ID NO: 48959 - DNA, 265 bp, Glycine max
  Clone ID: 701136289H1
atggaaccaaagcctaaagactcgccttcagaaaaaaaagtgaaaactccaaacatttttgagcgagctaaggaggagattgaggcagtgtttcatcgcgacaaatcgccacaccatcacaaagaaactcatgggacaagtgatgacattgatgagggaacttcacctgatgaaatcaaagcgcctggtgtgtttgaacgggtgaaggaggagattgaagctgttgctgaggccattcatcccaagaaagaatctgaatctggca

SEQ ID NO: 48960 - DNA, 252 bp, Glycine max
  unsure (1)..(252): unsure at all n locations; Clone ID: 701136290H1
anaacatgctgccaatgaggcctggccaatattacgcgcacaaatcatataatgtggacaatgtngacagatttcaagtaccaatatgcacaaacctggtttcggcaattggacaantttattcactatgttaatcaagatggccgtgttcatgccttatactcgactccatcaatatatactgntncaanacatgctgccaatgaggcctggccaataaagaccgatgacttctttccgtatgcagatcgt

SEQ ID NO: 48961 - DNA, 258 bp, Glycine max
  Clone ID: 701136291H1
ggtggagctaatggtagcttaagatttgaagttgagctgaaacatggagccaatgctggacttttaaatgcattgaaacttcttcagccgatcaaagacaaatattctggtgtgacatatgcagacttatttcagttggctagtgctacggctgtggaggaagctggaggccccaaaatccctatgaaatatggaagagtggatgtatctggacctgaacaatgccctgaagaagggagacttcctgatgctgggccc

SEQ ID NO: 48962 - DNA, 259 bp, Glycine max
  unsure (1)..(259): unsure at all n locations; Clone ID: 701136293H1
attcatacgtggtgttgttactgctgctcttttctcttttcttttctctttagttctctcttcccctnnnnnnnnnnnnnnnnnnnnnnnnngagcttgtttaagcttttcttccattaacatattatcacaatgtgtggtattcttgctgttcttggttgttctgatgactctcgagccaaaagggtccgcgtgcttgagctctctcgcagattgaagcaccgtggccctgactggagtgggctccatcaacatggtg

SEQ ID NO: 48963 - DNA, 263 bp, Glycine max
  Clone ID: 701136294H1
cggagacccattcattgcattgcccacaaaaccaccctctctactctttctctttctagttgatagattggtgtaaagggagacatgggaaggcttttcttgatcaatcttgaaggagacttctatagctgcaaacactgccgaacacattttgctcttgaggatgatgtcatttccaggtctttcatttgcaggcatgggatggctcatctttttgataaagttgtaaatgtcacttttggcgagaaagaagaacggatgat

SEQ ID NO: 48964 - DNA, 264 bp, Glycine max
  unsure (1)..(264): unsure at all n locations; Clone ID: 701136295H1
ctccatctcaaaaaaatgggtggtttagctagcaatcttcctctaattgttatggtgggtctgcaaattcattatgcagcacttgctatattcacaagagccgctttgttagntggattgagtacgacggtctttgtagtgtacaggcaaggcatagccactttggctttggcgcctatgtttttctctcctaagcggagacaatcagtgaaagattctttgggattcaggagcttctttttgatgtttgtgaccgctcttgtt

SEQ ID NO: 48965 - DNA, 280 bp, Glycine max
  unsure (1)..(280): unsure at all n locations; Clone ID: 701136301H1
gcccctctccgatcaaatggccaccgtaatcnacggcaaagccgtttgcgcaaaccatccgatctgaaatccgccgacgaggtgcgccagttctctcaaaaatacggcaaggttccgggattagcggtggtgatagtagggaacagaaaagattcacagagctatgttggaatgaagagaaaggcatgcgctgaattgggaatcaaatccttcgatgtggaccttcccgaacaagtctcccaagctgaactaatcaaacaagttcaccagttgaatgcta

SEQ ID NO: 48966 - DNA, 273 bp, Glycine max
  unsure (1)..(273): unsure at all n locations; Clone ID: 701136302H1
tatatagcaagcatggcagtcacactctacgaccttagctctgcctctgggttgaagaagcttgatgagtaccttctcccacgcagctacatcacnnggtaccaagctacaaaggatgatcttactgtttatgcagctttgccaactgctccatcagatgaatatggaaatgtttccaggtggtacaagcacattgatgctttgttgagaatctctggtgtttctggcgagggatctggtgttattgttgagggatccctggttgcgganctg

SEQ ID NO: 48967 - DNA, 269 bp, Glycine max
  unsure (1)..(269): unsure at all n locations; Clone ID: 701136305H1
ttcagaatgagatcttctcctagggcttagccctgtctttttgggaaatggcccttttccaggactgccacctaccactttggagggtttggctgaccgtgctcggagtagatggntagagaacaatgggagccaagttgatagcaagaaacaatttcagctcaacttggataagattaanagctggtgaagatacaaggactacattaatgataangnatatcccgaacaaatacacctctaaaatgttattagctgccatgntgaaa

SEQ ID NO: 48968 - DNA, 245 bp, Glycine max
  unsure (1)..(245): unsure at all n locations; Clone ID: 701136306H1
tgcccatagcaatcaacactgacacgcctaagtctcaacantatgaattaccaaccgcnntcttcaagctcgtcctcggaaacaatctcaaatacagctgttgttatttctcttctgcctcaatgacgctggatgatgctgaagaagcaatgttgaaactgtactgcgagagatcaaacctgaaanatggtcatacagtgcttgatgtgggatgcggttggggatcgttggctctatacattgcc

SEQ ID NO: 48969 - DNA, 245 bp, Glycine max
  unsure (1)..(245): unsure at all n locations; Clone ID: 701136307H1
cttccacacatgggagcagttaaacctcaaggatccacatcttatcactccaaatgcancttcatacaaatcagcaatgagagagaatctgttgaggcagggatacagaattgttggaatcattggagaccaatggagcgatctgcttggagaccacagaggcgaaagcaggacctttaagcttcctaatcccatgtactacattgagtagtaccttcacctctctcaacaatctagctagagtt

SEQ ID NO: 48970 - DNA, 262 bp, Glycine max
  unsure (1)..(262): unsure at all n locations; Clone ID: 701136308H1
cagatttcgtcttaacgcacataaattcaggttcaaaatctcacctttgttgattttggcgaggattttnagaatggttgtggctgggggtgctaagttcaatttgagaagaggcaatggttcttctcataatgttgtcaatggctatancagtgatggagatctttgcagaattagcaaaagtgggtgtttttcgtcggtggctgaggtggatagagacccttcttgcgtttcattcaccactttcaacattctggctccg

SEQ ID NO: 48971 - DNA, 259 bp, Glycine max
  unsure (1)..(259): unsure at all n locations; Clone ID: 701136310H1
cttgggctctctcttctcttctcttctctctcaaaatcgtttctctgcattttcagctaaacctgagcacacccaactgagattttagcttcagattccgaggtaagaggagaaagaagagaactaagtgctacccagagttcgatttttnggttggtcaacaaggtcaagatgtttctgagcttgatgggtatcatgtagatcaagaggggtgcgtntgtggattggggaagcaatttgtttatgaagttgaagaagc

SEQ ID NO: 48972 - DNA, 259 bp, Glycine max
  unsure (1)..(259): unsure at all n locations; Clone ID: 701136311H1
gaaaattgaaacactacaccatgctgacaaagacaaaacagaagcttatatacttgaactggtcnttggcttcatcatctagtgagccaagtaagagttggtaatggaggaataaggtcccagtcaaatcgcccatccgttctcctacccaaaagacagggcagttatttacacagaaagcctgctcttcccccatgttaacggttgaagatcaacaaatgcttcgcgacgtcagcaagaggaaactaacacctggcat

SEQ ID NO: 48973 - DNA, 268 bp, Glycine max
  unsure (1)..(268): unsure at all n locations; Clone ID: 701136315H1
aaaaatttgcatattggcaagcaaagcgggggtaaacaaaaacaatggcgacatcgctctccgtttcgccatctctcctctctcaacactctcttcttcgnccaaagcgcttcctctatctcgtccctccttctctctctccctctccccaaatccctcctctctctntccacgcgccgccgcanctcacgccgtncgcgccgaatcccaaaacggcgccgatgccgtccacacaacatacgatcgnnncnntcaggagcntcagcnc

SEQ ID NO: 48974 - DNA, 265 bp, Glycine max
  Clone ID: 701136316H1
gccgtcgtcgctgtttgtgtgtgtatcaggtgcagctaccaacgatggtgaagggtcgtcaaggagagcgcgtcagactctacgtgaggggtacaatccttggatacaaaaggtccaagtccaaccagtacccaaacacatccctgatccaaattgagggagtgaacaccaaagaagaagtaggatggtatgctggcaagaaaatggcctatatctacaaggctaaggtgaaaaaggatggaagccattaccgctgcatatgggg

SEQ ID NO: 48975 - DNA, 276 bp, Glycine max
  unsure (1)..(276): unsure at all n locations; Clone ID: 701136317H1
caacccacccaaccctaattcaactncttccgatctgatcactgtgagtaaaaattctaaatgagccgggcacaggatgcaaaccgatcattcttcccttttggaaatcctttaggatgatatcaccgaaaggcccaaaaatttcttcacagctgttgttaatattacatgcttttgaagcaactttggaagagaggctgaaaaagcttattcccaagagcaaggatgagatcctcagcttgtcttggatgactttggccatgcaggcactttgtg

SEQ ID NO: 48976 - DNA, 275 bp, Glycine max
  unsure (1)..(275): unsure at all n locations; Clone ID: 701136318H1
gcttgacattatttccaatgctagctgcacaaccaactgccttgccccgctncgccaaggttatcaatgacaggtttggcattgttgagggtttgatgaccactgttcattccatcactgctacccagaagactgttgatgggccatcagccaaagactggagaggtggaagagctgcttcatttaacatcattcctagcagcactggagctgccaaggctgttggaaaagtcctccctgctttgaatggaaaattgactggtatggcattccgt

SEQ ID NO: 48977 - DNA, 251 bp, Glycine max
  unsure (1)..(251): unsure at all n locations; Clone ID: 701136319H1
cganagtttcnccatcagccttatcacgtttagggtttcggnnccttaccctacctttgacntatcgaaaccttaaatttgggattaggtctgagcaatctggttggtagaacctttggtcttagagagtcaagttttatgtctggattagacgatcaaattcctactgccttcgatccttttgctgatgcaaatgctgatgactcgggtgctgggtcaaaggagtatgtgcatattcgcgttcagcagcg

SEQ ID NO: 48978 - DNA, 168 bp, Glycine max
  unsure (1)..(168): unsure at all n locations; Clone ID: 701136321H1
accaccanccctgactcaccgtncatcccaatctctccgcgccctccatgttggagcggactctctcctgcccgccgcgtcaactcctgcgccgacgggacgccagcggagacgccgacgnatccaagacaaagaagaaccaacacattctcttccacnnaacatacg

SEQ ID NO: 48979 - DNA, 202 bp, Glycine max
  unsure (1)..(202): unsure at all n locations; Clone ID: 701136323H1
gaaacatgcacactactcacctgcactgcacttgtgccttgttatatttgtnttatatcttgtcacaatctgtgactgttccgagttatccgaggcccctgctttatatgggtccgttgataaaatggcttgcgacccttttaacaaagatgctttgggtcaccgattgatacacccttcttgcgttccacactcannagnc

SEQ ID NO: 48980 - DNA, 265 bp, Glycine max
  unsure (1)..(265): unsure at all n locations; Clone ID: 701136324H1
cttcacgactaggagatggcaaagtcgaagaaccacaccgctcacnaccagtcctacaaggcccataagaatggcatcaaaaagccaaagaggcatcgccacacttccaccaaagggatggatccaaagtttctgaggaaccagaggtacgcgaggnagcataacaagaagagcggtgaaacagccaccgaagaagagtaaagtgccactctcaaatgggcctattaggatttgatttgttatttaagccccatatgttttgtgt

SEQ ID NO: 48981 - DNA, 260 bp, Glycine max
  unsure (1)..(260): unsure at all n locations; Clone ID: 701136325H1
gtcctgttatttctcagcgcgtaaagcatggctttgttggtggagaaaaccacgagtggtcgcgagtacaaggtcaaggacctttcccaggccgacttcggccgcctcgagatcgagctggccgaggttgagatgcccggcctcatggcctgtcggaccgagttcggcccctcccagcccttcaagggggcccgcatcaccggctccctccacatgaccatccagancnncgttctcattgagaccctcaccgcccttgg

SEQ ID NO: 48982 - DNA, 264 bp, Glycine max
  unsure (1)..(264): unsure at all n locations; Clone ID: 701136329H1
gaactatcagtacccggcgtcgtaccctgactccggcgagtcctccccgcgctcgcgcganatccgacttcgagaacccgccgccgtgggacgagcagcagaaccaaaactacaaggccaagttcatgtgcagctacggcggcaagatccagccccgcacccacgacaatcagctctcctacgtcggcggcgacaccaagatccttcgccgtcgaccgctccgttaagttctccgccttcctctccaagctctccgccctctgc

SEQ ID NO: 48983 - DNA, 104 bp, Glycine max
  unsure (1)..(104): unsure at all n locations; Clone ID: 701136330H1
gaacctttcaaaatacacatgctgcaaattgctgcacccaattcaccagccncgggagaggttgacgcaggcattncatccaagaacccaccacacaacatagc

SEQ ID NO: 48984 - DNA, 269 bp, Glycine max
  unsure (1)..(269): unsure at all n locations; Clone ID: 701136331H1
ctttaattggttaatttcaaaccttgtggagtttgattctgtntncgctccatcatcttccgtttctcccacattcaaattcagttccccacacactccaattannaggaaacaaacaaaacaaccccttttccccaaaagaccgtaaaacctatcnaaagtanaaatttgccactgtaccgacccgaaatcaattcgggttcgggttggaccaccgattgacgggtcgttttatgacccgattcttcgtcttctttcttntctcnntg

SEQ ID NO: 48985 - DNA, 264 bp, Glycine max
  Clone ID: 701136340H1
acactaatggctgtcaccttctcagatcttcacaccgaagagggcatcaaatccctgcgatgcaattcctttctgggaaaacctatatctctggggatcaattgacaaaggatgatatcaaagtgtatgcagctgttgtggaaaagccaggagactcttttcctaatgctgctaagtggtacgatgccgtctcttctcaacttgctaccaagcttccctgggcacgctcaaggggtaagattcagtggcgctgctgctccagct

SEQ ID NO: 48986 - DNA, 264 bp, Glycine max
  unsure (1)..(264): unsure at all n locations; Clone ID: 701136348H1
gagaaagcagaaagcagaaagatggggttggaatcggtgggagatttagcgattaacgtgattctgaaaaaattaggagcccaagacattgcgagantggcgtgtgtgagcaaaaggttcagttcttccgcttccgatgacactctttggatcaatctctgcttcaatgaactcgctttgacacaacccctcgatcatctcggaaaccctctctcttccttgcaaggaatgctatctagcatggagaggagcttttgttatgtt

SEQ ID NO: 48987 - DNA, 272 bp, Glycine max
  unsure (1)..(272): unsure at all n locations; Clone ID: 701136349H1
ttgacactnaacccattgggatagggaaggatggcacaacaagaggaggagaancaagataattagctcttgtttaatgggtgaactcggncctcaaagtcaatgtccactgtncccagcnaggncctaggcaataacaagaggaggagaagcaagataattagctcttgttgttgcctatgccctgctggnacagtggacattgactttgacactgaacccattgggatagggaaggatggcacaaagatcttcttcagggatatttgcnt

SEQ ID NO: 48988 - DNA, 240 bp, Glycine max
  unsure (1)..(240): unsure at all n locations; Clone ID: 701136356H1
gtttttaggaatatcacgattttcntttcgccaattcgtgnaatcgaaagattcccacagaattgtacgaattattgttcatttttttgtctctactgtcgtgctccaacttggtaaactagaagttcatttattgttttcattcttcaatgggggatgctgagaatgcccttccacctacaaagaaaagtcgctgctggaagggagctcactcgagacactcccattgatgatgaggaa

SEQ ID NO: 48989 - DNA, 257 bp, Glycine max
  Clone ID: 701136357H1
gtttttcgctatgttcgcaggcaagtgagacgatccatcaatgcccttatctgctttgaaagaaccggtgtcatccaaacatggtgaagaggtggcaactggatcaataatagctgaaacttctactgtacagggttcggcttgcccaactgtccaagcttgagatctattttagaatatgcttaacacaacacatgcaattcgaacgttgttttcttggaaagatttgaaagtaactccgttgggttcaatgcccg

SEQ ID NO: 48990 - DNA, 257 bp, Glycine max
  unsure (1)..(257): unsure at all n locations; Clone ID: 701136358H1
tttccaccaggcacgcagatncctctccttccttctctctatccaaattttgattctttcgatanaacccgcaacacccacctcaccaaaaccctacgcancccatcnatnacgcttggcttaggaggatccagtgtcgtgnctcctaggaacttcagattgctggaggagcttgaacgtggagaaaaaggaattggagatggcacagttagctatggaatggatgatggtgatgacatttacatgcgctcttggat

SEQ ID NO: 48991 - DNA, 259 bp, Glycine max
  Clone ID: 701136359H1
ggagcagcctcaggaggagaaggatgtctcacaggaagttcgagcacccaaggcacggttcactgggatttcttcccaggaagcgtgctgctcgtcacaggggaaaagtgaaggcattccccaaggatgacccatccaaggcacccaagctcactgcattcttgggttacaaggccggtatgactcacattgttagagaggtcgagaagccaggatcaaagcttcacaagaaggaaacttgtgagcctgttacaattat

SEQ ID NO: 48992 - DNA, 256 bp, Glycine max
  Clone ID: 701136360H1
gaaacccttgaatcagatatcgctgtgggatggtataattccttcaaaagatcatgctaagttttggattcatacatccaataagtaccgcttcattgatcagggaagcaatttgcgcggtaaagaatttaatttgacaatgcactggcatgttatgcccaagactggcaaaatgttcgctgacaaaatagttatgccaggatataaattgccagaggaatacagatgaagcttgcatttgttaatgtattgaagt

SEQ ID NO: 48993 - DNA, 261 bp, Glycine max
  unsure (1)..(261): unsure at all n locations; Clone ID: 701136361H1
atggcacttcgttgcttggngatgtccctttctgttctcttcactcttggtncttgcnaganaaagccatgccaganangaagatttttggcatgctgtttggccanacactcccattccnagttnnttgcganatccttctaaagcctggccctgcaantgttgaaatcgatgatcaccctatgcaaattnaagaaacacagtacccgaaaaccttcttnctatanagaagaccttcatccagggcaaaacaatgaaagt

SEQ ID NO: 48994 - DNA, 226 bp, Glycine max
  unsure (1)..(226): unsure at all n locations; Clone ID: 701136362H1
agccatcattcatgggagcagtgattctcccagatctcggcaccgagattttgattccggtctgcgncancattggaatagggttcgccctcttccagtgggtcctcgtctccaaggttaagctctccgctgccagagacgcttcccctaacgccgccggcaaaaatggctacaacgattacctcatcgaagaagaggaaggcctctacgatcacaacgttgtcct

SEQ ID NO: 48995 - DNA, 99 bp, Glycine max
  unsure (1)..(99): unsure at all n locations; Clone ID: 701136363H1
gggnnctcgnncccccaanngacacgtgccgttggtgaacctcgtgaggcggnttagccctacgagacgccttgaagcgcaattcccatcgagcggcgg

SEQ ID NO: 48996 - DNA, 254 bp, Glycine max
  unsure (1)..(254): unsure at all n locations; Clone ID: 701136364H1
gccccgatgagtaggagggcgcggcggtcgctgcaaaacccagggcgcgagccgganncggagcggtcgtcggtgcagntcttggtggtagtagcaaatattcaaatganaactttgaaggccgaagaggggaaaggttccatgtgaacggcacttgcacatgggttagtcgatcctaagggacgggggaagcccgtctgatagcgctctgtgcgcgtactccgaaagggaatcgggttaaaattcctgaaccg

SEQ ID NO: 48997 - DNA, 270 bp, Glycine max
  unsure (1)..(270): unsure at all n locations; Clone ID: 701136365H1
aaagccttccctgtttgcntttntcacaattcacttcttttccagaganttagggaagaggaatagaganaganaaagagaaagagcgtgaganagagaaacagcacaaggatggagctttctcaacttggttttctggatgagctacttgctccaagaaaagacactacttggagtaatgctttgtcaactgggttgaatgagttactactccctagtggttggngcttgactctttngatgagaaccaaggtttagctactttgaatc

SEQ ID NO: 48998 - DNA, 269 bp, Glycine max
  unsure (1)..(269): unsure at all n locations; Clone ID: 701136367H1
gctctttgaagaaagaagggtctttngcttgattttggagatgtctctggctctcagatctcatcaaccttaacctctccgataccancgagaaggtgatcgcagagtacatatggatcggtggatcaggnatggacctgaggagcanagcaaggactctcccaggaccagttagcgacccttcagagcttcccaagtngaactatgatggttccagcacaggtcaagctcctggtgaagacagtgaagtgattttatacccacaagcc

SEQ ID NO: 48999 - DNA, 261 bp, Glycine max
  Clone ID: 701136369H1
cttggtttcactgtctatccttcaccccaagtttcgacctctgttgttgagccttacaacagtgtcctctccactcattctcttcttgagcacactgatgtggctgtcctgctcgacaatgaagccatttatgacatctgcaggcgttcactggacattgagatgccaacctacaccaaccttaatcgtttagtttctcaggtgatatcatcactgactgcttccctgaggtttgatggagcctgaatgttgatgtcaatg

SEQ ID NO: 49000 - DNA, 259 bp, Glycine max
  Clone ID: 701136372H1
gcgagtctctcttcctacgacaaccgtttcctctcgccggaaaaccgacattgatctctctctccgccgatccgtccgccatgagttccggcgagctcctccacatacaaccccaggagctgcagtttccctttgaattgaggaagcagatctcatgctctttgcagttgtctaacaagactgacaactatgtggctttcaagtaacaatgcaagcccaaaaggaggcacctcctgacatgcaatgcaaggataagttt

SEQ ID NO: 49001 - DNA, 254 bp, Glycine max
  Clone ID: 701136373H1
cctctgctgagaatttcacgagtatcaggtggtttattcaaccaacagtggatcttcaatttgttggtttcagtgttcttgtatgtgtgttttcattttgatgagttcatgtttatgagccacaaatgcaagtgggaacgaagaatggggtttggagttagtttggacaagtggtgtggtgtggtgtcctatgtaatgagtgcacatatgtgaagtgaaaatcctcatccttttcctcttttttcacgccttaa

SEQ ID NO: 49002 - DNA, 142 bp, Glycine max
  unsure (1)..(142): unsure at all n locations; Clone ID: 701136376H1
acttatcccctttctccttctaangagtgaggaaanatggcgcgtaagaagatcagagagtntgactcaaagaggttgttgaaggagcactttaaganactctctggcaaggagttgccgatcaagtctncacaaattaccg

SEQ ID NO: 49003 - DNA, 256 bp, Glycine max
  unsure (1)..(256): unsure at all n locations; Clone ID: 701136377H1
ggaaactgagttaaggcttggactgcctggaaacggaggcactgaagaagtgctcatcaggaagaggggtttctctganactgaaactggtcatgaagatgagtctgccaccactgtggatttgatgcttaatctttcttctaaggagnnnnnnnnnnnnnnnnnnnnnnnnnnnnnnnnnnnngataagcacaagactttgcctaaggagaagacccttctgccagcagatcctgctaagcctccagccaagacg

SEQ ID NO: 49004 - DNA, 259 bp, Glycine max
  unsure (1)..(259): unsure at all n locations; Clone ID: 701136380H1
attctcttctcttaaagattcttttctctttctttctcacttctttttctttcctttttccgtttgtttcccgggaaaatctccaaccgcaacctcttcttcgatctttcccgctccctccaatcgcttcttgctccgtttttcccctcccgcatttcacctcactcgcatttnccgcctcgtacggcatcgctgtccacagtgcaattatntnncgggaaagtngggggtttttctggaaaacagancatctnccgat

SEQ ID NO: 49005 - DNA, 272 bp, Glycine max
  Clone ID: 701136381H1
cttgaggttgaagattttaaagatgtcaaatcaggctactcaatcacctttaatttcaatgccaattccctatttcgaggatacaaaacttgtaaagacttatacctttcttgaggaaggaacaactaaggttactgctacacccataaaatggaaagagggcaaaggcatacccaatggagttaatcatgaaaaaaaagggaacaagcgtgctcctactgatgtcagcttctttagttggtttagtgacactgagcagaaagatgatattg

SEQ ID NO: 49006 - DNA, 265 bp, Glycine max
  Clone ID: 701136383H1
tcttcttgtatgatggagaagatccagcacagtgaggtggaagtgaagggactgaagcttcacgtggcagagattggaagtggctccaaaacagtggtattcttgcatggattcccagagatctggtacacatggaggcaccaaatgatttctgtggcaaacgctggttatagggctcctgcctttgatttcagaggctatggactttctcagcaaccagcagagcctgaaaaggaaaccatgtttgatctggttcatgaaattg

SEQ ID NO: 49007 - DNA, 204 bp, Glycine max
  unsure (1)..(204): unsure at all n locations; Clone ID: 701136384H1
gaaacactaagcgacccaagtattcaaagtttactcagcaagaacttccagcgtgttatttcggcattcttgcttgtcagcattgtattcgttcctattggagttgcttcactaattgcttcaaggaaggttgttgaaattgtttctaggtatgcatactagctctgtgcattctnctctcgctctctgccttccanacaacat

SEQ ID NO: 49008 - DNA, 59 bp, Glycine max
  unsure (1)..(59): unsure at all n locations; Clone ID: 701136385H1
cctcctttcgnntcttcnactttctctctctctccctagttgcatgtnttcccatgttc

SEQ ID NO: 49009 - DNA, 255 bp, Glycine max
  Clone ID: 701136386H1
gcctgtgacattggaacttggagggaaatcacctttcatagtgtgtgaggatgctgatgttgaccaggctgtagaacttgcgcactttgctttgttctttaatcaggggcaatgttgctgtgctgggtctcgtacctttgtacatgagcatatctatgatgagttcttggagaaagcaaaggctcgtgcttgaaacgtgttgttggggatccctcaaaaagggtgtcgaacaaggacctcagattgatgtggaac

SEQ ID NO: 49010 - DNA, 260 bp, Glycine max
  unsure (1)..(260): unsure at all n locations; Clone ID: 701136387H1
tgcaactatgagcaaggattatctaatcatactttctctccttctttccacggtgcttgcaannnnnnnnnnnnnnnnnnnnnnnnnnnncctctatcttgggaagggcttctcccatcgcaaattgtctcccagttatcacattcacaaaaccattgacgncatcctatgcagttatcttcgatgctggtancacgggaagccgtgtacatgtctatcgttttaaccaacaattagatctccttcgcattggccaagac

SEQ ID NO: 49011 - DNA, 260 bp, Glycine max
  unsure (1)..(260): unsure at all n locations; Clone ID: 701136388H1
cttccatgcagaaaaanggcaacaagttctgttgccatagctgatgngaattcaaatcccccaaagcctaagaaagcgcggtttaaaaggaagtcttccaagaggaaaccctctagagataagatgggccaaattcatactgaaaacttgggcattggagaaattatcaatcatgaggtagaaacacatgcaagtgttaatggtgaatctggcctccttgaaaagaaaaccgaaacattcacttcagaagccaccaacaa

SEQ ID NO: 49012 - DNA, 235 bp, Glycine max
  unsure (1)..(235): unsure at all n locations; Clone ID: 701136391H1
gacccaggcaggtgtcgcagtacgacgagaaaggacgctanctaaatatatttgtccccgatgctctctatttcagccactcgtatattcttcctccgctcaacaactataagattannnnnnnnnnnnnnnnnncttcaattcttctccaatcccaaccgcaccctcttccgtccctttcttcacacttccttcaaaccacttccttcgtctttctctttccgaacagatcaca

SEQ ID NO: 49013 - DNA, 255 bp, Glycine max
  unsure (1)..(255): unsure at all n locations; Clone ID: 701136392H1
gctggttcctatgctgatgagctcgttaagaccgcgaaaacagtggcttcaccagggaggggnattttggccatggatgagtccaatgctacctgtgggaagcgtttggcttcaattgggctagagaacactgaagctaaccgccaggcgtaccgtaccctccttgtgacagttccncgacttggtcagtacatctctggtgccattctctttgaggaaactctctaccaatccacaactgatggcaggaagatt

SEQ ID NO: 49014 - DNA, 256 bp, Glycine max
  Clone ID: 701136393H1
ttacttttcattgattgagccaaagctttgtattttctgcgataatttcccattgggtggaagaaagtctcaacctttattcgaaagagcaaggatctgagttgagttgagtgatcatgtgtggtggtgcgattatctccgacttcataccggcaggtcccgccagcggggcgcggcgcgtgaccgccgacatcctgtggccgagtttgaggaagcgcttctcgaagccgctgctggacgatgatttcgaggctgg

SEQ ID NO: 49015 - DNA, 261 bp, Glycine max
  Clone ID: 701136396H1
cgcaaactagtaacagagagaaagcatttcaaagaagaaacaaaacgatgtcgtttatgcgaggggattttctttctcgaacgaggaagctcgtgaagggtttggccaaggcgcaacccgcgtggctcaaagccatggaacaggcaccacctgcaacgtttcctcggtctgccgggaaaattccgaccattactcttcccgaggatgtttatgtgaagaagttttataagaaatatccggaatccaaatcccatgacgcca

SEQ ID NO: 49016 - DNA, 268 bp, Glycine max
  unsure (1)..(268): unsure at all n locations; Clone ID: 701136401H1
gagaaagagagaattcgtaaaccctaatttcggaaagatcggcgatgactgcctccaaggatcgcgagaacttcgtctacatcgccaaactcgccgagcaggccgancgttacgaagagatggtggaatcaatgaagacgttgcgaatctcgacgttgaactgacggtggaggagcggaatttgctttctgttgggtacaagaatgtgattggtgctcgcaganggtcctggaggatcctgtcttccattgagcagaaggaagaaaca

SEQ ID NO: 49017 - DNA, 266 bp, Glycine max
  unsure (1)..(266): unsure at all n locations; Clone ID: 701136402H1
aaggtnattgatnacaacctgaatcctatttggaatgagaaattcgagttgattgcagaagacaaggagacncaaaaactcattnatgaggttctgataaagacattgggcaagataagcgattgggaatagnaagntacnccttattggtctagaaatacaaactgnnaaggagatcgaattgaggntgntgtnctcacttgatananttaaggtgnaanatnagaaagatcgaggaancttaacagtgaaggtcatgtatntat

SEQ ID NO: 49018 - DNA, 264 bp, Glycine max
  unsure (1)..(264): unsure at all n locations; Clone ID: 701136403H1
cgccgaccgaccctgatcttctgtgaagggttcgagtgagagcatacctgttcgggacccgaaagatggtgaactatgcctgagcggggcgaagcagaggaaactctggtggaggcccgcagcgatactgacgtgaaatcgttcgtctgacttgggtataggggcgaaagactaatcgaaccgtctagtagctggttccctccgaagnttccctcaggatagnnggaancccgcgggcgagttctatcggtaaagcaatgatta

SEQ ID NO: 49019 - DNA, 265 bp, Glycine max
  unsure (1)..(265): unsure at all n locations; Clone ID: 701136404H1
gcttccttctcaaaaaaagaaaatgaggcaaaaacagaggaaggcagaagcaagagctaagaaagaggcagaaganaaaaatgaagaatcaagtgctggtgggatatcaaagtctggaaaacggcatgcaaaaccgttgatccggatccatgtggtgaaaaattgttgcaggtcgaagatcctttgtnggaagccacaaaatacttgaagctgctgcagaagaactcacctgattcattggagacacactttctctcttttgaat

SEQ ID NO: 49020 - DNA, 266 bp, Glycine max
  unsure (1)..(266): unsure at all n locations; Clone ID: 701136405H1
agcattgcaagctcagcatgggggtgagatcagagtcatgaggtgaaattccgattctttgangtgatacccatttggtttctgaccctgaaattgagcttggatggggaaagtntggattctgatggtgtntgtntggtgggtgtggttggcattgttgaaggggcaaggaagcacccatcatcagggaggaggatccacactctgttctctgtggaatgtcagaactacttcgactgggcaaacagtggggctgatgaacagtt

SEQ ID NO: 49021 - DNA, 266 bp, Glycine max
  unsure (1)..(266): unsure at all n locations; Clone ID: 701136406H1
atggtatgggggcgtggtgaccgagggctcgaaaggnggaaacttttnagctacaganagtagtttcttagtcgggtgtctttcaaaaaaatggtgcagagtntctgtttgatggnttctcatggttaccctnctggccttgncttgcatccacaagtactgggcttgccctgtagtaccatgaagggctaccaaacattctntccttctccagtagcaaaagcagagctgatcagatatcagnctncttggcttgatncaagtcc

SEQ ID NO: 49022 - DNA, 266 bp, Glycine max
  unsure (1)..(266): unsure at all n locations; Clone ID: 701136407H1
atggctcccaagggtttaanctttctggctgtgttaatatgcgtttcagcactgtcactgantccttctgttgcgggggaagggcaaaataatggccttgttatgaacttctacaaggaatcatgccctcaggctgaagacatcatcacagaacaagtcaagcttctctanaancgccacaagaacactgctttctcctggctcaggaacatcttccatgactgtgctgttcagagttgtgatgcttcactgttgctggactcnac

SEQ ID NO: 49023 - DNA, 265 bp, Glycine max
  unsure (1)..(265): unsure at all n locations; Clone ID: 701136408H1
ggtccccgccgcgangaanangagaaatgggtcccantgancaaactgggccgcctggtgaaggagggaagaatccgaagccttgaacagatctacctccactcgctcccgatcaaggagcaccagatcatcgacacgtcgtgggncccancctcaaggacgaggtgatnannatcacgcnggtncagaagcagaccngggncgggcagangacccngttcaaagccttcgtcntcgtcggaganaanancgtcactctggctgg

SEQ ID NO: 49024 - DNA, 270 bp, Glycine max
  unsure (1)..(270): unsure at all n locations; Clone ID: 701136409H1
angtaananaaaattgcgtacaggnatctgcagttctgggtggatatggtaaantgaggacatcaaggggtgangacttcatagagaaatcaagtagtngtgacattctngncgatganagagaaantgtctgctgcagagatggattggcnggtatatgtggttctctttcatccgaggctatgagttcctgnatagcangtcagttgattcctgtagaaggnaacagggatangaagttcctgaaagtatacccntgatgcnantccc

SEQ ID NO: 49025 - DNA, 265 bp, Glycine max
  unsure (1)..(265): unsure at all n locations; Clone ID: 701136410H1
gagagttgagaagtactgggatctcttgagtccaaaaatcacatcaaacacattgaggaatattatggatatgaaagcaaacatgggttcatttgcagctgctcttagagacaagaaagtttgggtaatgaatgtgtacctcaagatggaccaaacacacttaagctcatatatgacagaggccttataggaactactcatgactggtgtgaagcatnttcaacatacccccggacatacgatttacttcatgcatggactgtct

SEQ ID NO: 49026 - DNA, 266 bp, Glycine max
  unsure (1)..(266): unsure at all n locations; Clone ID: 701136411H1
ctcctcaccatatataaagcaaaaccttggacttgtcatatactatccgtgtacgcttcctattcctttcgttgtgaaatatcgtttctctctcaaaggtaacaatgtcggaagctaagacccaaattgaatccataagaagtgggtcgtcgagcacaagctccgtactgtngggggtcaatggntnagtggnatnncgggtncgnncgcttacaatnggnctcgacccaccatgaaaactagtgttaagatcattcacgctaggt

SEQ ID NO: 49027 - DNA, 269 bp, Glycine max
  unsure (1)..(269): unsure at all n locations; Clone ID: 701136413H1
tttggggaagaggtcgagtttcacagcagcaatggngtacgtcaaggcttcagaaatcaaaagcctactttcaaganntattcaagtcaagctcaagagaagangngagggaaaaaccgattaccgngccaggattcggttgantaatcaggacaagaacaaatataacactccgaaataccgatttgttgttcgctttagcaacaaggacattgttgcacaaataatatctgctagcattgctggcgatattgttcttgctgcagcat

SEQ ID NO: 49028 - DNA, 267 bp, Glycine max
  unsure (1)..(267): unsure at all n locations; Clone ID: 701136414H1
caaaaaccaaaatcaatttagaggaaaaagttggaagaagcatggattctaggcggcgtggtaaaaacgcatctatgcaacgcaagtngcaacaacttcgatcggttacaaattccagtgctgtgaacaaagcctcaattattgtggatgccaccagatacatagaggagctgaagcaaaaagtggatggattgaactcagagctaggaaccgcggaatcatcaatctcccaagacgaactacccatggtcactgtagaaaccctag

SEQ ID NO: 49029 - DNA, 235 bp, Glycine max
  unsure (1)..(235): unsure at all n locations; Clone ID: 701136416H1
gttgtcgcgcacacattccttcattccgcagcaacaaacanaactcttntaccttaaacaacaatggccgatgccgaggatattcaacccctcgtttgcgataatggaccggaatggtcaaggctggttttnctggagatgatgcaccgagggctgtgttccctagcattgtggggcgtccacgtcacactggggtgatggttgggatggggcagaaggatgcgtatgttgggga

SEQ ID NO: 49030 - DNA, 263 bp, Glycine max
  unsure (1)..(263): unsure at all n locations; Clone ID: 701136417H1
ttcagggcattgatattagagaaatgcttgcnggtgcatcattgatggatgaggctaatagaagtactgtgttaaggaataaccctgcagctntgctggcttangnaaggtattgggctacagatggtgtaggaccaagganatggttattcttccgtacaaggacagcctngtattattcagtagatacntgcagcagctggtcatggaatctctaggcaaggagtttgacttggatggtaatcgggttaatcaaggaatag

SEQ ID NO: 49031 - DNA, 261 bp, Glycine max
  unsure (1)..(261): unsure at all n locations; Clone ID: 701136418H1
gttctggattccgactcgncgnattgactcggncngggttggggtcncctcagttcggtnggacantctctcgcgaatctaatctatagganaanctaagggcacattcacaatgaangcntgatnctggtngggggtttggaacaangctgangtnactgacactcagtttnccgaagactctnggtgatttngctaacaaacctatgattctgcagnagatagaggtccttaaggnnattggaatatgnggtggngtna

SEQ ID NO: 49032 - DNA, 265 bp, Glycine max
  unsure (1)..(265): unsure at all n locations; Clone ID: 701136420H1
aancatcctttgcaattgcaagaatcttctanttttnnnatttcttncccatcagtgtgctctttcagttgantgcctacttttaangcaggtacaaagaaggaagaagcacgcgtgggggtgtgggtgaatatatggcgaaaagantaccagtatgaganttgttggngttggtgttattattnttggcancaaanacncggcaatgagcataacaggaggtcatactanaagcaggggcanagagtcctctggttctagtgat

SEQ ID NO: 49033 - DNA, 269 bp, Glycine max
  unsure (1)..(269): unsure at all n locations; Clone ID: 701136422H1
cttcttctattacaacaacgtcnggncaagaccatgaccatggccanggccacgatcctgctgcctgttcanggtcttcgcggtttcatnggccctagacatgtcgataatctcgtacgacaacgcccacgccgccactcgcgcaggagaaggtatgctgatgtccatgtacgagcagtggctagtaaagcacggcaaggtgtacaacgcgctcggngagaaggagaagaggttccagatcttcaaggacaacctgcggttcatcgacg

SEQ ID NO: 49034 - DNA, 267 bp, Glycine max
  unsure (1)..(267): unsure at all n locations; Clone ID: 701136423H1
ctcgcaccgtgcagaagagtagtctgaaagccagacttttggagtgctaggatgganagccagaaggttcagttgcgccatgttcttaaacagaagatttagatgtgatgtgagcataggcagagattcccacctgtaaaatgaagaatgacccacaagcggcagatttgttttgaattgtgaaagtacaaatctactgctgctagaaaaactctcagaaatgatgggggccatgaataaatacatctttcctgcctcagactttgg

SEQ ID NO: 49035 - DNA, 268 bp, Glycine max
  unsure (1)..(268): unsure at all n locations; Clone ID: 701136424H1
ctttcacttcacttgtggtttttcactctctctgtctctcaccacnccacactgaggagggagatagtggaaggaacactcaaatgactcaaccagccatggctaccttctccaaggaacgcgagaactttgtctatgttgccaagttagctgaacaagctgaacgctatgatgaaatggtggatgccatgaagaaggtggcgaactgggacgttgaattgagtgtggaagagaggaacctgttctctgttgggtacaagaatgtggt

SEQ ID NO: 49036 - DNA, 268 bp, Glycine max
  unsure (1)..(268): unsure at all n locations; Clone ID: 701136425H1
cgagatcccctttttctcctaagaaaagccatggctaagggtcccggtctctactctgacatcggcaagaaagccagggatctgctgttcaaggactaccacagtgaccagaagttcaccatcaccacctactcaccactggagttgctataacagcatcaggaaccaggaaaagtgaactntttgtggctgatgtcaacacccagttgaagaacaaaaacatcactactgatatcaaagttgatacagattctaatctcttcacaac

SEQ ID NO: 49037 - DNA, 266 bp, Glycine max
  Clone ID: 701136426H1
aaataccacaccacaccagttaagcgccgccgtctagccggaagcaccgtatctgtggtgatcgcacgttaaaattctcgaaatctaaaacccttcgttctcttcatttcttagaaagaacaaagaggagaaaatgaacaaggataagatcttcaagctagcgaaggggttcaggggtagagccaagaattgcataaggatagcaagggagagggttgagaaggccttgcaatattcctacagagaccgccgtaacaaaaagaggg

SEQ ID NO: 49038 - DNA, 266 bp, Glycine max
  unsure (1)..(266): unsure at all n locations; Clone ID: 701136427H1
caacatattccaggtatccaaatttgcaacctaagatctgtacctttatggtaaaggaattgcattgatgtttggnnnctttaataccatagttggntggntagtacttagttctaagttctaactttccatcaagtactaagcaaatagaagaaagtaaaaatgggactttcttctacaacactgcttccaattgttgtgctgctttctcttctttgcacagcctgtgccagaaattcagctgaaaacaactttgttcatgcctt

SEQ ID NO: 49039 - DNA, 264 bp, Glycine max
  unsure (1)..(264): unsure at all n locations; Clone ID: 701136433H1
caagaggaaaganataaagagtcttggtatttgtgcacattcactgatgaaatccagccaaagttgcacgttcttggttttggtaactgatattataaagaatnaacngctggttccaaggctattccatctgaattaatgaatgacagcactgcacttgttccaatgcaccaagttctctgaaacggtggctcttgtccttttcttttattatttttatgggattcaaaaattggatcacggacattgaagttgacctatgtg

SEQ ID NO: 49040 - DNA, 267 bp, Glycine max
  unsure (1)..(267): unsure at all n locations; Clone ID: 701136439H1
tccaatccatggccaagggagagaaaaaacctgcagagaagaagcccgcggcggagaaggctccggcggagaaaacaaaagccgagaagaagatcccgaaggacgcagcctccggcgnnnnnnnnnnnnnnnnnnnnnnnnnnagcgtggagacgtacaagatctacatcttcaaggtgctgaagcaggttcaccctgacatcgggatctccagcaagggccatggggatcatgaacagcttcatcaacganatcttcgagnnagcc

SEQ ID NO: 49041 - DNA, 264 bp, Glycine max
  Clone ID: 701136440H1
gtttttcgctatgttcgcaggcaagtgagacgatccatcaatgcccttatctgcttcgaaagaaccggtgtcatccaaacatggtgaagaggtggcaactggatcaataatagctgaaacttctactgtacagggtcggcttgcccaactgtccaagcttgagatctattttagaatatgcttaacacaacacatgcaattcgaacgttgttttctcggaaagatttgaaagtaactccgttgggttcaatgcccgctagtccc

SEQ ID NO: 49042 - DNA, 254 bp, Glycine max
  unsure (1)..(254): unsure at all n locations; Clone ID: 701136441H1
gctcttgctcagactgaaaatttccctttgccantcaaagntgtgaatcctggaaattggttngttattgaagggtggatgaaaccttctctctttgatgnaataaccaacaaagatcttttggatgaactcaagtgcaattcatgtctacaaagttacaaaagtatnnagtgcagaanatggaggaggaagtgttgttgttgccaaccgcaccaaagctttgggttgggaaactttcaggttgtggagggtca

SEQ ID NO: 49043 - DNA, 267 bp, Glycine max
  unsure (1)..(267): unsure at all n locations; Clone ID: 701136442H1
cacncttccacanannatgacgannannnntnnanagatcanctcatncacattgangnatattatggatncnnanagcatacatgggttcatttgcngctgctctgagagacaagaaagtttgggtaatgaatgtttacctcaagatggaccaaacacacttaagctcatatatgacagaggccttataggaantactcatgactggtgtgnagcattttcaacatacccccggacatacgatttacttcatggcatggactgtct

SEQ ID NO: 49044 - DNA, 263 bp, Glycine max
  unsure (1)..(263): unsure at all n locations; Clone ID: 701136444H1
acttggcaggctttcatcttccttcaacaagcctttacgtcctctcttcaatgctggctcagtttactacaagtcctctttgcctgctgaagctgcgtangacaatgagaaaagctgtgatacggaattgaatgtccacttgaggttgttgatcctgagattgctgatataattgagcttgaaaaagctagacaatggaagggactggaactgataccctccgagaatttcacttctgtctctgtaatgcaagctattggctc

SEQ ID NO: 49045 - DNA, 266 bp, Glycine max
  unsure (1)..(266): unsure at all n locations; Clone ID: 701136447H1
ccananctaaaaaacnanacatcatcgtactatttcccatttggcggcgcggngatggtggangcgcagacatggacgacgcggcgaatgagnaaccctcggctggacancagcacganggaccaagtactggagattccccccananccccgggggagntccgcaanagcttcggatngaancctaacnanctctcaccnagtnctgtnaantgntctcatcatttcatcttggtacctctcgaagatcggagttctctctnaaa

SEQ ID NO: 49046 - DNA, 196 bp, Glycine max
  unsure (1)..(196): unsure at all n locations; Clone ID: 701136448H1
gagcttgtttaagcttttcttccattaacatattatcacaatgtgtggtattcttgctgttcttggtgttctgatgactctcgagccaaaagggtcnncgtgcttgagctctctcgcagattgaagcaccgtggccctgactggagtgggctccatcaacatggtgactgctttttggcacatcaacggttagcca

SEQ ID NO: 49047 - DNA, 259 bp, Glycine max
  Clone ID: 701136450H1
gaaaaccggaaacaatgcctatctcaaccttatccccctccttgtcggcaatgtgggattgattttcaccaagggtgacctgaaggaggtcagtgaggaggttgctaagtacaaggttggagctcctgctctgttggtttggttgctccaattgatgtcgttgttcctcctggcaacacagggctcgatccctctcagacctctttcttccaggtgcttaacattcctaccaagattaacaagggtactgtggaaatca

SEQ ID NO: 49048 - DNA, 138 bp, Glycine max
  Clone ID: 701136453H1
cagttcttgacagaacttttccacgttatcgtattttaactgcttgacttgagccaatgagggagtcgtcataaagttgctttgaagggattatattttccgtcacatttagattaaagtatttgttgaaggttttct

SEQ ID NO: 49049 - DNA, 261 bp, Glycine max
  Clone ID: 701136456H1
ttgatagcagccctggtgaagaaggtttcaagttttgaaacccccatacatatcctaacccacttcgttgattacgttacaaaagaagtgactgtgaatccgaatccaaatctgaatgggttatcttcaattggcagacatggtgttaggcaggtccttagatttagagatgctagttgtgataatgttgtggtaaacccactcttatatgcttcccaaggacttcgttacaagaggaagctccaagtcatccttacaact

SEQ ID NO: 49050 - DNA, 209 bp, Glycine max
  unsure (1)..(209): unsure at all n locations; Clone ID: 701136457H1
cnccctgctatcnngggaagggcttctcccatcgcaaattgtctcccagttatcacattcacaaaaccattgacgnatccatgcagttatcttcgatgctggtagcacgggaagccgtgtacatgtctatcgttttaaccaacaattagatctccttcgcantggccaagaccttgagttgtttgtcaagactatgccaggtttaagtg

SEQ ID NO: 49051 - DNA, 252 bp, Glycine max
  unsure (1)..(252): unsure at all n locations; Clone ID: 701136462H1
tgtgttttcanacgccgtctccgatctccgacaatggcgacccaaatgagcaagaagagaaagttcgtagctgatggagtgttcttcgctgaactgaacgagggtctgacaagagagttggccgggacggntactccggcgtggaagttagggttacgccgatgcgcaccgaaatcataattagagccaccagaacccaagctgttctcggtgagaagggaaggagaataagggaacttacctctgtggttc

SEQ ID NO: 49052 - DNA, 196 bp, Glycine max
  unsure (1)..(196): unsure at all n locations; Clone ID: 701136463H1
gtactgtctctggtagtgcncgtgcgaaaaggtcananacagtgncttnngcttgcaccctnananaaggaaaacngcattatcttangncgcgcctgcactgnaccgagtacatcacttctcnatgntattgcccacttaagtgcttctcaagacttcacntnttcccnctttatattccaaacncncnntgtna

SEQ ID NO: 49053 - DNA, 265 bp, Glycine max
  Clone ID: 701136464H1
gggagaacaccaatcaggatctgaaaagtgacttgaaagatctctacataaaccaagctattcaaatggatgtggctggtaatcgcaaggctgtagtcatctatgtgcctttcagattgaggaaggcattccgcagattcatcttcgacttgtcagagagttggagaagaagtttagtgggaaggatgttgtcttgattgccacaaggaggatcgtgcgaccgccaaagaaaggctctgctgttcagcgaccccgaacccgcact

SEQ ID NO: 49054 - DNA, 71 bp, Glycine max
  Clone ID: 701136465H1
aaaagggcagaagatttattaaagccgcgtaagagacaacaagtaggtacgtggagtgtcttaggtgactt

SEQ ID NO: 49055 - DNA, 248 bp, Glycine max
  unsure (1)..(248): unsure at all n locations; Clone ID: 701136467H1
caatattcattccttgtgcttgtgcttgctatggtgatcacattgatgaaccctaccaatgcaaccctctntccccatttctatgataaagtttgccctcaggcattgccagttataaatcagtggttcaacgagcaattatccgtgagcgacgcatcggagcatctcttctgcgcttgcatttccatgattgttgagtaaatgggtgtgatggatcaatatnactagatgacacccgaaacttcact

SEQ ID NO: 49056 - DNA, 259 bp, Glycine max
  unsure (1)..(259): unsure at all n locations; Clone ID: 701136470H1
gaaaattcaaactttnggttcgtaaaaaccccaaattcgaaccttctctcataatctacacccaaaaagggaanaaaaaagagagaatggggannnnnnnnnnnnnnnnnnnnntggtggctgaagttgagcagtggaagccgtgtatggaaccgattgcgtccttctccgttcattccctccccatttccacatctctctcaaacnaagaaccgctgatgtttcatcccaacagtttgtggaagctgttctggagata

SEQ ID NO: 49057 - DNA, 260 bp, Glycine max
  unsure (1)..(260): unsure at all n locations; Clone ID: 701136472H1
aacacactcttagaaagaagagtagcaggaggaaaagcgatggccgtgttagctccgtttcaattgaggacgttcgcgatttcgaggagctccaggctgtcgacgcctttcgccaatccttgatcatgggcgaattgctccccgaagcctttgatgattaccatatgatgttaagatttttgaaagcnaggaagtttgatattganaagggcaaagcatatgtggactgacatgcnacaatggaggnaggagtttggtgc

SEQ ID NO: 49058 - DNA, 128 bp, Glycine max
  unsure (1)..(128): unsure at all n locations; Clone ID: 701136473H1
gaagnttnnggtttgaatcgaatcgaatcgnagcgattgcatcgatncgatccgatggctcttgtangagttgaactgaagcatgcggcggagggcgtaccggaggcgaattgctccgccaagcccac

SEQ ID NO: 49059 - DNA, 258 bp, Glycine max
  unsure (1)..(258): unsure at all n locations; Clone ID: 701136474H1
tttcacagcagcaatggtgnacgtcaaggctcagaaatcaaaagcctacttcaagagatattcaagtcaagttcaagagaagaagagagggaaaaaccgattaccgtgccaggattcggttgattaatcagacaagaacaaatataacactccgaaataccgatttgttgttcgctttagcaacaaggacattgttgcacaaataatatctgctagcattgctggcgatattgttcttgctgcagcatatgcacatgg

SEQ ID NO: 49060 - DNA, 258 bp, Glycine max
  Clone ID: 701136475H1
cgggtggtgacttgtgctcatgtcctacagggatatggtctgactgaaacctgtgcgggaacctttgtctcattaccaaatgaaatagaaatgcttggaacagtgggccctcctgtaccaaatgtggattttgcctggaatctgttcctgaaatgggatacgatgccctagcaagtacaccaagaggagaaatttgtgtaaagggaaaaaccttgtttgcagggtactacaaacgtgaagacctcactaaagaggttc

SEQ ID NO: 49061 - DNA, 85 bp, Glycine max
  unsure (1)..(85): unsure at all n locations; Clone ID: 701136476H1
gttttntngcttgcnttgatcttcactgtagttgcnggcgttggagcccaaggcccattcccaccttcttcccggcgcctnncca

SEQ ID NO: 49062 - DNA, 250 bp, Glycine max
  unsure (1)..(250): unsure at all n locations; Clone ID: 701136477H1
ctcctccgcatctngcagccgacaacgtaacggttcgcggtacccgttgctgacgccgccgatctttctcagcctccaccgccagatttacctcttctcctttcggattcgcatttctctntctccaccgcaacacactcatantcagggatacaaaatgataggatcctttcngacctgggcccttgtgatggtttttggctatgcttatccagcttatgaatgctataaagtggttgaaaagaataag

SEQ ID NO: 49063 - DNA, 259 bp, Glycine max
  unsure (1)..(259): unsure at all n locations; Clone ID: 701136478H1
gtttaaccctagggttncctcaagccgtcgcaaganccgcaaggtcacttcaccgctccgtcgagcgtgcgccgcgtcctgatgagcgcgcctctctccaccgatctccggtcaaagtacaacgtgcggtccattccggttcgcaaggacgacgaggttcaggtcgtgaggggaacctacaagggccgcgagggcaaagtggtccaggtctatcgccgcaagtgggtcatccacatcgagcgcatcacccgcgagaagg

SEQ ID NO: 49064 - DNA, 242 bp, Glycine max
  unsure (1)..(242): unsure at all n locations; Clone ID: 701136479H1
attttccttcgttttctctctcttacctcagtttctcagttactcagtcatcaccatcgcancagcaagatgtggaaccaaccattcggaaaaaccgatttggaaagcggttctcggcctctgtatccgatgatgctcgagagccctgaactgcggtggtcgttcatcagaaaagtgtactccataatcgccatccagttgctcgtaaccatcgtcgtcggcgccgtgtcgtacgacgggcc

SEQ ID NO: 49065 - DNA, 74 bp, Glycine max
  unsure (1)..(74): unsure at all n locations; Clone ID: 701136480H1
cngcgggagtnatcgtctctagtgaattgtgatctcccgaatccgaaananaacacaanaaacaaagcttcaga

SEQ ID NO: 49066 - DNA, 256 bp, Glycine max
  unsure (1)..(256): unsure at all n locations; Clone ID: 701136481H1
gctcagtcatctcttttaccantctcntctctcttgctcttgcaggagagagccatgtncatgcatcgctaatgnggaagattattgggaagcngtttggccaaacactcccattcccactggacgcgagaggctctaaagcctctccctgcaggtgttgaaatcgatgaactccctaagcaaattgatgatacacagtacccaaaaacattcttctataaagaagaccttcannccaggcaaaacaatgaaagta

SEQ ID NO: 49067 - DNA, 256 bp, Glycine max
  unsure (1)..(256): unsure at all n locations; Clone ID: 701136482H1
ggaagtcaataatagggnacccaatccaaattgaatcccttaaggatggttcatcggataaactttttttctgcaattgatgactttagtaacgatgggactggctttgagggaagtagtgtacttccaccagcttggaggactgcaaggagaacagcaaattcttccgtgttcctncgtccccttgtattgccatctaatggtgctgntagttatgnaganttccnattgatntagaaagggatatngnatatng

SEQ ID NO: 49068 - DNA, 191 bp, Glycine max
  unsure (1)..(191): unsure at all n locations; Clone ID: 701136483H1
acacagatcaaagncnnacncagtaggaaccgtgtccttggacagtggagtggactcatgataccctgttgacccaattgagtatttcgattgtgacaagaaaacaatgccaaggtagttatcacgtgtgcacacataagcattggcacgagtaggggcactaaganagggacaataacaaagcttgtgaa

SEQ ID NO: 49069 - DNA, 256 bp, Glycine max
  Clone ID: 701136484H1
caggatgccagatatgggatctgtaacggcaaaacaagaagatgctgctgctgcagcagcgcaacctgaagaagaggaggaggttgatgaaactggtgtcgagccccatgacattgatttggtgatgacacaggcaggagtgtcaagaagcaaggctgtcaaggctctcaagactcacaacggggacattgttggagccatcatggaactcactacttaattggggtttatgttctatttgtttgttttttgggaa

SEQ ID NO: 49070 - DNA, 254 bp, Glycine max
  unsure (1)..(254): unsure at all n locations; Clone ID: 701136485H1
gcgttttgtttctttctggaagcttcgttcgggcatcaatggcgtccttcgatgaagctcctcccggaaactccaagaanggcgagaagatcttcaaaaccaagtgcgctcagtgccacaccgtcacaaaggtgccggccacaaacaaggacccaatctgaatggtttgtttggaagacaatctggtacaactcctggatattcctattctactgctaacaaaaacatggccgtgatttgggaggaaaagaccc

SEQ ID NO: 49071 - DNA, 213 bp, Glycine max
  unsure (1)..(213): unsure at all n locations; Clone ID: 701136486H1
tagtgcctccttgccagaagttaaaatggcccaagaaactttcctattcacatctgaatcagtgaacgaggggcaccctgagaagtctgtgaccagatctccgatgctgtgctcgatgcatgnttggagcaggaccctgacagcaaggttgcctgtnaaacctgcancaagancaacatggtgatggntttncggagagatcacaaacanngc

SEQ ID NO: 49072 - DNA, 235 bp, Glycine max
  unsure (1)..(235): unsure at all n locations; Clone ID: 701136487H1
gatttccaaagcctttacaacgttaccttttgatcaagggcacaacagcatcttttccttctcagccatttacaggtctagttgaagctagcaatctaaagatggagtgtaaaccagatcgatcatccattataatttgttggtggattaggtcactcggagtgcctttgtcatgattttttctttnttctttttcgagtacataacatatattggttgtatactgctccgtaga

SEQ ID NO: 49073 - DNA, 260 bp, Glycine max
  unsure (1)..(260): unsure at all n locations; Clone ID: 701136488H1
ttganaagatgcttagtgcaagtncatgctggtcgaattggtcgcntggtctttaccaaaagcatgtgctgnagcatatttccctccaatctctcaaccagagggccttcctttacgaatccaagatgtnaaaggaaaagaatggatgtttcaatttagattttggccanataataacagcaggatgtatgttttagaaggngtaaccccctgcattcagtctatgcaattgcaagctggagatactgtaacatttagcc

SEQ ID NO: 49074 - DNA, 259 bp, Glycine max
  unsure (1)..(259): unsure at all n locations; Clone ID: 701136489H1
gaaagtgagaacacactttattatatgaaaaccgagagcatccanatacaatagtgcagaagttcaggcaataattacgcatagacatgcataaagtctatgttattcagaagtacaacatagataaggaaaccacaaactctttttaattagatagagatactgttgggaattcctttgaaagtcaacccttcctcacttgaacgatgtacgcnaagtgtatggcagctgaactggcccagtccggtttctcagactt

SEQ ID NO: 49075 - DNA, 234 bp, Glycine max
  unsure (1)..(234): unsure at all n locations; Clone ID: 701136490H1
ctttaactaaggcaatggcaaatgcngcataccctgcatatacgttggagactagaaaaacacgctccaggtcttcgtttagtggataagtgggcggtattaattggggaggtcggaaccataggatgggtttgtttgatatggtgatgataaaagataatcatatatcagcagctggaggtgttgctgatgctcttaaagctgttgacctgtatctggagcaaaacaatcttc

SEQ ID NO: 49076 - DNA, 256 bp, Glycine max
  unsure (1)..(256): unsure at all n locations; Clone ID: 701136491H1
tggaaccaaagcctaaagactcgccttcagaaaaaaaagtgaaaactccaaacatttttgagcgagcnaaggaggagattgaggcagtgtttcatcgcgacaaatcgccacaccatcacaaagaaaccatgggacaagtgatgacattgatgagggaacttcacctgatgaaatcaaagcgcctggtgtgtttgaacgggtgaaggaggagattgaagctgttgctgaggccattcatcccaagaaagaatctgna

SEQ ID NO: 49077 - DNA, 257 bp, Glycine max
  Clone ID: 701136492H1
gttaatccctcttttgttgttggtcctctgcttgcaccacaaccaactagcacactgctcttgatactaagcattgtcaaaggcatgaagggagaatatccaaatacaacagtggggtttgtacacataaacgatgtggtagctgctcacttgctggctatggaggaccccaaggcatctggaaggcttatttgttcaagcacagtagctcactggtcgcaaatcattgaaatgcttcgtgccaaatacccttccta

SEQ ID NO: 49078 - DNA, 255 bp, Glycine max
  unsure (1)..(255): unsure at all n locations; Clone ID: 701136493H1
gttttttcaattgngcttttgctcagttcaactgtgggagcaatcacaggagtcactggtgttgtgtgggttagcacacaaaaggcatggcattggggttttttcatcataaccatagcttcctccgtggctttgtgacccttgctcttggtaaacaattctaccgcatcaaaactccaggagatagccccactttgagaattgctcaggttattgttgtgtctttaagaaccgnaagttgtcattgccggagtc

SEQ ID NO: 49079 - DNA, 227 bp, Glycine max
  unsure (1)..(227): unsure at all n locations; Clone ID: 701136494H1
actagaacagcgtcatggttttctaccccattctctgttatcgtctcccggtggccgtggctgcgcttcntctaccggctcgaaccattcaagccgggtcttttgccggtccagctgggccggtccaccgtggcggttccggctcgtaacggccacatgcaagatggatcggaacgtgtgggtgagggacacttggagggcccggaagacttggcctacgacgctgc

SEQ ID NO: 49080 - DNA, 255 bp, Glycine max
  unsure (1)..(255): unsure at all n locations; Clone ID: 701136495H1
aagcgtcgtcgtttactagcaatgattgcttgtgtgggaaccccttgaagacttgctagttntagtgggtgacccgggatccgaatacgtacccggatagatacccgatttgtttacaaggtgtgggtaataattttatnttattttgttgttaagtggtgtaagtgtaatataacgttttagtgagaaagttgaaagagagaaaggaaaagaagtgagggcataggcatctgcgtgcacgtgcacgacaagaca

SEQ ID NO: 49081 - DNA, 259 bp, Glycine max
  unsure (1)..(259): unsure at all n locations; Clone ID: 701136496H1
ggtttgcaaagctgcttccagagccgcgaggtcccttctctccgcttccagagcctcccatggacgtgcggttggggctgctacggctgtttcattgagctgcaaagtgcctcttttctacggaaagaaggttctggaagtggtnnnnnnnnnnnnnnnnnnnnnnnnnggatttcaggagcacttgctcttcctgccgcagcttacatgttccaagatcaggaggtgcgcgcactggagctggagcgcnctttcattg

SEQ ID NO: 49082 - DNA, 211 bp, Glycine max
  unsure (1)..(211): unsure at all n locations; Clone ID: 701136501H1
tcagaatnggtaggttcacatttggaggatganaccagntgcccctgttngctcctgcnancccttttacaaagntntagttacagntggccgagcaacgtcatcccaaaggctgtgcnaagccttcaggnagtgttganaaccttnaggngaacggtggccctggnaccatcaagaagatcantttcgttgaggatggagaaagcaagtt

SEQ ID NO: 49083 - DNA, 193 bp, Glycine max
  unsure (1)..(193): unsure at all n locations; Clone ID: 701136502H1
gcgttcnagatantattggcattgacaatnanggcctgctcttgctttgcttcctcttctatttgctttctngttagctgccactacggaatcaagaaaagatccaggggaatattggaaaatgatcatgaaagatcaggaaatgccagaaggacttcaaggtcttgtttcatttcaatctgaaaataaccct

SEQ ID NO: 49084 - DNA, 182 bp, Glycine max
  unsure (1)..(182): unsure at all n locations; Clone ID: 701136503H1
gctcagattgcantggnnnncanaactgaaacctngtctaaagtnatnttgttgtcntntgnaganactcttttnncactcactcagtccccatttntcgcatcccaanaacgccaaagcgtactcccaccaccgtagttcganccacttcctctttcgggtctcgcctcgaagacaccatc

SEQ ID NO: 49085 - DNA, 198 bp, Glycine max
  unsure (1)..(198): unsure at all n locations; Clone ID: 701136509H1
ggagcgatatggaggtcgtactcaaagagttgcacgccgatcttcaatctctgagccaatcgcttcccgatccatctcaccatgatttgctccgcaagattcaattggcgtgttgaggaccttgcgaanttgcagaggctgcacctgttcgtcgctctaaagttgaggatatgagtgctgaggttgtagatagcaatc

SEQ ID NO: 49086 - DNA, 187 bp, Glycine max
  unsure (1)..(187): unsure at all n locations; Clone ID: 701136510H1
ctcaggaagaaaaagatggggaggtacctagggttttgcagcgctacacagctgaaaaactttcatgctttggagaacttgctctaatgtataataaacccctccaggcttctgtacgtgctgtaacaaaaggaactctttgggctttaaaacgngangattttcgagggattttaatgtcagaatt

SEQ ID NO: 49087 - DNA, 142 bp, Glycine max
  unsure (1)..(142): unsure at all n locations; Clone ID: 701136514H1
acacantctcactctctntccctcancttccataatgcagctcntcnggccactgctcgcngcggcgctgntcntgcctcgccannntctcngacgcggcacaanatgancagaatcntcgcaaagcaggccgagctntnca

SEQ ID NO: 49088 - DNA, 197 bp, Glycine max
  unsure (1)..(197): unsure at all n locations; Clone ID: 701136515H1
gcccacgtcctgaaacctgacatgggtccaaaaacatatattgcatatgggattaaagaagagcttggtagaggagactctntaacaaagcttcattgtgatatgtcagatgcggtgaatattttgacccatacagctgaggtgatattaactgatgagcagcactttactatatcaaagttgaaagaagcacacag

SEQ ID NO: 49089 - DNA, 195 bp, Glycine max
  unsure (1)..(195): unsure at all n locations; Clone ID: 701136518H1
atgggcatagctttgagnagcaattgtnatcttatcagctatggcggagaaacacaaccttaagaatccagctgtgaagcggattctccaagagcctcaaggagatgcaatcaaacccatccgatgactacctgagcctccctcttgaggaaaatatatttgaatggcaatttgctataagggggcctcgtgata

SEQ ID NO: 49090 - DNA, 177 bp, Glycine max
  unsure (1)..(177): unsure at all n locations; Clone ID: 701136522H1
cactcacaacactttcacaaacactttcnganaaacaattcgtntcttttccntaccatggccagatcacaacagngataccgaggcgtccgacaaaggcattggggctcttgggtctccgaaattcgacaccccatattgaaaactaggatatggctagggacttttgaaactgct

SEQ ID NO: 49091 - DNA, 186 bp, Glycine max
  unsure (1)..(186): unsure at all n locations; Clone ID: 701136523H1
tggagtatcccatgtgtccgcagataaccacatgtggacatatnntcctncttcccatgtatngctacagtacttattnntnggtgaagaggatcacaaaggtgatagctggaaaaggtgtcctttgtgctttgtgatgatatctgccaaggatttatataccttgcacatcacaaatgtaaaaca

SEQ ID NO: 49092 - DNA, 189 bp, Glycine max
  unsure (1)..(189): unsure at all n locations; Clone ID: 701136524H1
cttccgcctcccttcccttcaactccacggcncagatccgaggagtctgggaaaccctaattcattcctctttgcttcttctatctctattcctcctaacaccagtgatggcaggtttggctccagaangattcgcagtttgatgctcggcaatatgattctaagatgaatgaattgctttccgccgat

SEQ ID NO: 49093 - DNA, 199 bp, Glycine max
  unsure (1)..(199): unsure at all n locations; Clone ID: 701136525H1
cacacattgcccttcttgtccaggaatntgagatctaacattaacaacaactatctaagcactagcaagctagttagcaaggcaataatgaagttcttgttccagtgcccctgctgctcttgcttttgcttcatgaagccaaagcaagggaaggcaaaggtcaaggaagtcaaagaaaccaaggtggaaganaaaaagg

SEQ ID NO: 49094 - DNA, 188 bp, Glycine max
  unsure (1)..(188): unsure at all n locations; Clone ID: 701136526H1
agagagagagaaatggagcttcaagaccatgatttcttggaggaattaatgtctctaagaagaganacatgggataccaatccatgttcacaaganaaccagcttttgctctaatggctggngttttgattgttttgaggatcaaaactatcatcaagcttttcctccaaactctttctcctgccaac

SEQ ID NO: 49095 - DNA, 196 bp, Glycine max
  unsure (1)..(196): unsure at all n locations; Clone ID: 701136530H1
cgactatgtacaggttggcaaggaaatgggtgtgaagatgtattcacncatggtcntnttcaaactatgganancatattctatgaagtnccagaggcaaggtagaatttccttctacctcacccaaatgggggaagaagcagttaacattgcatctgctgctgcactttctcctgatgacatcatattgcctcag

SEQ ID NO: 49096 - DNA, 202 bp, Glycine max
  unsure (1)..(202): unsure at all n locations; Clone ID: 701136533H1
ttcataatgggtattttcacatttgaggatnnaaccanctcccctgtggctcctgctaccctttacaaagctctagttacagatgccgacaacgtcatcccaaaggctgtcgaagccttcaggagtgttgaaaaccttgaggggaacggtggccctggaaccatcaagaagatcactttcgttgaggatggagaaagcaagt

SEQ ID NO: 49097 - DNA, 245 bp, Glycine max
  unsure (1)..(245): unsure at all n locations; Clone ID: 701136534H1
tngcgttcganatgantgactgcaaanaggaggttgttggacagggaggcactttagagatnatcttttctgggtcaaagngagttggcccgattcaaagttctggcacaaattaactggcatncaaactggatttgcaactngagnctcancaaagcanaaagaaaaccccctgggctttncatncttgctcaatattggttgtgaaaccctgnacatgttatttggaaaggcgtgggcaaaag

SEQ ID NO: 49098 - DNA, 181 bp, Glycine max
  unsure (1)..(181): unsure at all n locations; Clone ID: 701136535H1
cacccagattcagtggtcaacaccactcagcatggctatcanctagaactaaaacccttcanttttgaatttcagacctcagaagcaaaatagaagcatcagaatccgatcaccctntgcctccaacccgaaccagaatgagtcttcttctcccggattatactctgccaagaaattcgac

SEQ ID NO: 49099 - DNA, 198 bp, Glycine max
  Clone ID: 701136536H1
atttgaagtaacactgaaaagaaaggaaagtgaagttgagagtttaagaagaacaagaaatgggggttggttcccaggatgccatcaagcagttccaggcattcattgaccaagttgaggagcctttgcgaacaacgtttcagtggttaaggaactaaaaggataaaatagcactgcctataagatcatggaatgttc

SEQ ID NO: 49100 - DNA, 195 bp, Glycine max
  unsure (1)..(195): unsure at all n locations; Clone ID: 701136538H1
gttgaaagtagcaaagatgtttcctttcgggcaaaagggtcaaaagataaaggggactatggtggttatgcagaagaatgtnttggatatcaacagcatcaccagtgttggagggatcgttgaccaaggcttaggcttcataggcagtgcagtcgatgcacttacttttgcagccaccaaaatctccatccagtt

SEQ ID NO: 49101 - DNA, 196 bp, Glycine max
  unsure (1)..(196): unsure at all n locations; Clone ID: 701136540H1
ccctttganagttagaatggctgctgctattgaaatccccacaatagtgtttccaaactcctctgcccaacagaggatgccagtggttggaatgggatctgcccctgacttcacatgcaaganagacacaaaggaggctatcattgaggccgtgaaacagggttacagacacttcgacactgctgctgcttatggc

SEQ ID NO: 49102 - DNA, 194 bp, Glycine max
  Clone ID: 701136541H1
accactactactcactcactggcagatctcaattgcatcgctgtccatggctaccatcgttagcatcaaggcccgccagatcttcgacagtcgtggcaatccaactgtcgaggtggatttgacttgctccgatggtacttttgccagagctgctgttccaagtggtgcatccactgggatttatgaggcccttg

SEQ ID NO: 49103 - DNA, 189 bp, Glycine max
  unsure (1)..(189): unsure at all n locations; Clone ID: 701136542H1
tgaaatttctgatctacggtcgcagcggttggattggtggtctactgggtangctctgcgaagagcgcgggatccaatatgagtacggcaccggcagattggagaaccgctcgtcgttggaggcggacatagcggctgtgaagcccagccacgtgttcaacgccgcgggtgtcacgggtagacccaatg

SEQ ID NO: 49104 - DNA, 198 bp, Glycine max
  unsure (1)..(198): unsure at all n locations; Clone ID: 701136543H1
catgcctcaactcctccgtctctctctccctcgccgcaccaactcaccgttctccccttgtaantttcgtggtncncacttccgattgggctnaacaagaagaagaacagagcctcgctgaaaccgaagcgggcctggaaagttgggagcccaacggcgaagacgccgggcgatgagagcttcgtcgaaccgccggaa

SEQ ID NO: 49105 - DNA, 195 bp, Glycine max
  unsure (1)..(195): unsure at all n locations; Clone ID: 701136548H1
gcaanattcagaatggaacgtgatcatncngnagctgaaagagctcagcatcataaaacaaattcatgattctgnaagtccatattcaagaaaaagataggnaacttattgagttgcaggaacaaaatagggttgctcaggagaccattatgtttaaagatgagcagttcagagaggcccaagcatggatagctc

SEQ ID NO: 49106 - DNA, 186 bp, Glycine max
  unsure (1)..(186): unsure at all n locations; Clone ID: 701136551H1
gccttctatgnanaaacaganattacaaaattcagccaacaggagtatgaaagacttcanaatgagaaagtgttatgcagaatttgttttgagggagagattaacgttgtattgctcccatgtaggcatcgtgtcctttgcagcacttgctcacagaagcgtaagaagtgccctatttgccgtgat

SEQ ID NO: 49107 - DNA, 195 bp, Glycine max
  unsure (1)..(195): unsure at all n locations; Clone ID: 701136553H1
gtttatcgtgaggagaatatgaagttgtttgtnttctttgttgctgcagtagttttngtagcatggccatgccatggcgcaggctancaaaggttccctctccgaatgaaaactggctatggtgagcgttcttncggaggtaaaatgcgcaagttttaggctgctgtggaagcacacaacatncgacttccnacc

SEQ ID NO: 49108 - DNA, 172 bp, Glycine max
  unsure (1)..(172): unsure at all n locations; Clone ID: 701136554H1
ggttgacgcagcattcatccaagacccaccacacaggncaaagcnaancnagcatccaagccgaangaattcccataattgatgtctctgccaataaccaaccacagagtttcagacccttctgctattgaaggcttagtgaaggagataggtagtgcatgcaacgagtggg

SEQ ID NO: 49109 - DNA, 89 bp, Glycine max
  unsure (1)..(89): unsure at all n locations; Clone ID: 701136555H1
agnctccctagnatttaacnggattnctggtggagaaccttggtggcggtcaatattgcagcttccaagttccttggctttccttgagg

SEQ ID NO: 49110 - DNA, 194 bp, Glycine max
  unsure (1)..(194): unsure at all n locations; Clone ID: 701136556H1
atgcnntattacttagntggnanatctttnnnntnntnncaagtgtctcccatctatccagacgaagccacnaacangttaagtgtaananaaaggtntatnatccanatattgacttgnaaggaaatgtttgttctcaacatcttacgagaagattggaaacctgtccttaatataaacantgtcatctatgg

SEQ ID NO: 49111 - DNA, 190 bp, Glycine max
  unsure (1)..(190): unsure at all n locations; Clone ID: 701136557H1
tgatcccctggatgtcttgattattatgcaggagccggttcttccaggttgctttcttcgggccaaagcaattggtnctcatgcccatgattgatcagggggagaaagatgataaaattattgctgtctgtgctgatgatcctgagtatagacattacaatgatatcaaagagcttcctccacatcgttt

SEQ ID NO: 49112 - DNA, 190 bp, Glycine max
  unsure (1)..(190): unsure at all n locations; Clone ID: 701136558H1
gnccagtagtcatatgcttgtcctcaaagattaagccatgcatgtgtaagtatgaactaattcagactgtgaaactgcgaatggctcattaaatcagttatagtttgtttgatggtatctactactcggataaccgtagtaattctagagctaatacgtgcaacaaaccccgacttctggaagggatgca

SEQ ID NO: 49113 - DNA, 195 bp, Glycine max
  unsure (1)..(195): unsure at all n locations; Clone ID: 701136559H1
gtgcctacaagtatgtttcggagctatggcgcaagangcagtctgatgttatgagattcttgcagcgggtgangtgctnggagtatcgccagcaaccttctattgtccgtttgacaaggtctactcgcccagataaggctcgtcgcttgggtnccaaggctaagcagggttacgtgatttaccgtgttcgcgtac

SEQ ID NO: 49114 - DNA, 190 bp, Glycine max
  unsure (1)..(190): unsure at all n locations; Clone ID: 701136561H1
gtttctncttcncactgaaccaaancanntccattttcatcnagcttngcttttncaatccattgtttctcagataccgcatggntcacaatnacatcnncaccgantcaggnnctcnctcgtcgcatagttcgtgcnttcctccacttcctcaactccgncgaacngggtcctggggttgatgctgagg

SEQ ID NO: 49115 - DNA, 173 bp, Glycine max
  unsure (1)..(173): unsure at all n locations; Clone ID: 701136564H1
cttctcagccaggtcgttgagatncacctaaaccccttatncgctgagtaacgaattcgctgnctgttncatagtttctttctttgattagttatcttcaaatacaaaagacggattgagggaagtcctcgttgtatttattctcctctagatcacagggaagattaaatcaa

SEQ ID NO: 49116 - DNA, 203 bp, Glycine max
  unsure (1)..(203): unsure at all n locations; Clone ID: 701136565H1
ttcataatgggtattttcacatttgaggatgaaaccacctgcccctgtggctcctgctaccctttacaaagctctagttacagatgccgacaacgtcatcccaaaggctntcgaagccttcaggagtgttgaaaaccttgaggggaacggtggccctggaaccatcaagaagatcactttcgttgaggatggcgaaagcaagt

SEQ ID NO: 49117 - DNA, 192 bp, Glycine max
  unsure (1)..(192): unsure at all n locations; Clone ID: 701136566H1
ttcgttttctacgaggaaggaaaataacaataacagaggaagaaagaaaattncacagtttcaatttcagtatcagctacactttttagaaatggctactctatcaagcttcatcgctacgccgaagaatcccaatacccactttctctcaggttcctcattgacgatggacaaatgcttcttgaaaatcag

SEQ ID NO: 49118 - DNA, 191 bp, Glycine max
  Clone ID: 701136572H1
cggagatgatccagcataggccttacacacaaaaagtggatgtatatagctttgggattgttctatgggaactcatcactggtatgcttccatttcagaacatgacagcagtacaggccgcatttgcagttgtcaacagaaatgttcgcccaatcatacctaacgattgcctagcggttctccgtgacatc

SEQ ID NO: 49119 - DNA, 186 bp, Glycine max
  Clone ID: 701136573H1
ctggaagggcattgtgccagggttacatcgtcaatgtttgtatggaggcttaagaattgggttatatgaacctgttaagactttctatgtggggaaagaccatgttggagatgttccattgtcaaagaaaattcttgctgcatttacaactggtgcttttgcaattgcagtggcaaatccaaccga

SEQ ID NO: 49120 - DNA, 192 bp, Glycine max
  unsure (1)..(192): unsure at all n locations; Clone ID: 701136574H1
gcagccccctctcttttctcancttccccattcttcttctcctctctttcanggatgtggacatagtgaaaacttccaacaacannaacaacntggacgtnatggcaatgatgatgcanatggaaaagttccccgaattatnantctgcgangancctttttatancaccacacccacttaccagcnaccga

SEQ ID NO: 49121 - DNA, 189 bp, Glycine max
  unsure (1)..(189): unsure at all n locations; Clone ID: 701136580H1
gctctttagtacagcngaagaacgaagcctcnttcgttcttcttcttctgcgtttcttctctccctctctagaaccgtaaccgtcgnnnnnnnnnnnnnnnnncctcaaccagagataangagtcaccttcttatttttctgaatctcgcggcgttgttctttctgctgctgcggctgtggttccggcg

SEQ ID NO: 49122 - DNA, 191 bp, Glycine max
  unsure (1)..(191): unsure at all n locations; Clone ID: 701136581H1
caaagtgctctacntcctctgtntatattctcnntctnnttatgnntanngntagnagananntcntnattganngtatctngncgccgcatgttgttgaaggtcataatcctcggagacagcggggttggtaaaacatcactgatgaatcagtatgtgaatcgtaaatttagtaatcagtataaggcaac

SEQ ID NO: 49123 - DNA, 192 bp, Glycine max
  unsure (1)..(192): unsure at all n locations; Clone ID: 701136582H1
ccgggaaccatggtgagcacctccttcatgaggaagcnacctatgacgaccaacagcctaaagacattccccaacgctctttttggtctgaaaggtggacgaggtggtcgtgtaacttgcatggcctcgtacaaggtgaagctcataaccccagaaggagaagtggagtttgaatgcccagatgatgttttc

SEQ ID NO: 49124 - DNA, 191 bp, Glycine max
  unsure (1)..(191): unsure at all n locations; Clone ID: 701136587H1
gntctctctttnttcttcttctctntcacattggttattgatntcagagaagagagagatttgcnattgngcaatggcctcttccgcgacaatgcggttnaacngcgacctccacnggagccgaggnggctnttcctcgccgcaactnccgtcgccggattcatcggcgtngcggcgagatcctccgccaa

SEQ ID NO: 49125 - DNA, 188 bp, Glycine max
  unsure (1)..(188): unsure at all n locations; Clone ID: 701136589H1
ctcaggaagaaaaagatggggaggtacctagggnttttcagcgctacacagctgaaaaactttgcatgctttggagaacttgctctaatgtataataaacccctccaggcttctgtacgtgctgtaacaaaaggaactctttgggctttaaaacgngaagattttcgagggattttaatgtcagantt

SEQ ID NO: 49126 - DNA, 184 bp, Glycine max
  unsure (1)..(184): unsure at all n locations; Clone ID: 701136593H1
ctcaactcctgaaaggcaagagtgagagagaaatggagaatgcggangagatgatgcagcaaaacgacgaggttttgtcggttgaacttccagctccttccggttcgaataaactgtttttccctaagaaactgggaacaccaagaaaaagtgagattgtattcattgctccaactggagagga

SEQ ID NO: 49127 - DNA, 187 bp, Glycine max
  unsure (1)..(187): unsure at all n locations; Clone ID: 701136595H1
ctttccacttgtctccgaattanttatcttgagaaacattnaaccncattgctatatattatggctagcatgaaggttacatgggtggctgtgatcatgtgcatggccgtggtgggtgcaccgatgatggcgcaagccatggacatgcaatgatgtgacggtgaacatggcacagtgcctatcctac

SEQ ID NO: 49128 - DNA, 187 bp, Glycine max
  unsure (1)..(187): unsure at all n locations; Clone ID: 701136596H1
gcacttcgttgcttggtgatgtcctttctgttctcntcactcttggtcttgcgagagaaagcntgccagagacgaagatttttgggcatgctgtttgggccaaacactcccattccaagttcattgcgagatcttctaaagcctggccctgcaagtnttgaaatcgatgatcaccctatgcaaattg

SEQ ID NO: 49129 - DNA, 285 bp, Glycine max
  unsure (1)..(285): unsure at all n locations; Clone ID: 701136603H1
aaanttctcagtcggcgtagcgnnaatggcggtatccctagcgacgaggctcgtncngnggcgatcgccaccggcttctctggcggcgcagcttttctatgtcggcagtggacgccgaaaaggaagtcgtggtcgtgncggagcttccaccgttcgattagtccccgccgccatatgcgggccccaccgctgaggagattctggcgaangcanggagtntcttagtcnttccatcttgcattcatacaagaaccccgtgaacatagtggagggtaagaaacagtt

SEQ ID NO: 49130 - DNA, 283 bp, Glycine max
  unsure (1)..(283): unsure at all n locations; Clone ID: 701136604H1
aanaangcgtccagcagccgagcncggccgaattcgcaccctctccgatctgaaccgtcnctccgccgattccgacagcgactccgatggccctcaggagtattacaccggcgncgacaagagtggaatgcttgtccaggatccttcaaagggaaatgatgtggatgaaattttcaatcaagctaggcaacttggggctgttgaaaggcctcttgatcagcttcaggagcctccaaggtcaactagctttactggaatggcaggttactctcaggggaaacta

SEQ ID NO: 49131 - DNA, 282 bp, Glycine max
  unsure (1)..(282): unsure at all n locations; Clone ID: 701136605H1
gctcnctgagagagctcgtcgcggcggttgcagaagangattgcnagatgaacttcaacatgcgcgaatcccaccactggatgccagaagaagctcgagatcgacgacgatctgaaactgcgagcattttgggacaagaggatctcacaggaggtcatcggagatgcactcggtgaggaatttaagggctatgtcttcaaaattaccggagttgtgacaaacaaggatttccaatgaagcagggagtgctgactcctggtcgtgttagacttttnttcacac

SEQ ID NO: 49132 - DNA, 284 bp, Glycine max
  unsure (1)..(284): unsure at all n locations; Clone ID: 701136606H1
gcattncatccctcttnatttgtantntgtnttgtgctttagataaaagttctgccaaatcaagaggggttntaagatcatagtgtgtgttttgcaacaatggctnagttcttgctgctatnatcttggcactctnngccanttccatacttcaaacagtnaacaatggctgctaatgaacaaggaggccacttgtatgacaanaagagcnaatatggaagtggaagtgtcaatngttaccaatgcccatcacaatgnncgntncagatgtagccagacncnat

SEQ ID NO: 49133 - DNA, 157 bp, Glycine max
  unsure (1)..(157): unsure at all n locations; Clone ID: 701136607H1
ctctactcttgttcactccatatattcctcttctncgctctgttaaacaaaagcaaatgagganntaaataattattttaattttgtantctcattgnttggttctggttctcaggaatggtagatttgaggtgaagacgttccacncaacatacga

SEQ ID NO: 49134 - DNA, 290 bp, Glycine max
  unsure (1)..(290): unsure at all n locations; Clone ID: 701136609H1
cntttncctcaatttgggcactgtactttctncactcgattgttcnccaccaaatnnnnnnnnnnnnnnnnnnnnnnncttnctcctcancctgttgtntggnctanngggtcgaaccctaagcaagtngagaacacaaattnggggtgttgggtnccaagtttncagcaatggngntgtttatgagggtgaatttcaaaaagggaagtgtngggggagtggggnttatcactatcacatgacatgggnngtatgagggagnatgngttgntngaaagtatgatgggtac

SEQ ID NO: 49135 - DNA, 284 bp, Glycine max
  unsure (1)..(284): unsure at all n locations; Clone ID: 701136610H1
cttgctgactacttcaacatcccgggngttttctacgttggaagcnttcctanctatcctaacgggggcnataatgcctatctccaaacttctgtncatgngggctaatttccatgaattcgtggagattgtgttccnaaattcggaggactctgtgcagtcatggcacatcgacggctattccttctttgttgtagggtttggtagcgggcagtggacagcagacagtagagtacactacaatctgagagacacagttgctagatgcaccactcaggtatatc

SEQ ID NO: 49136 - DNA, 283 bp, Glycine max
  unsure (1)..(283): unsure at all n locations; Clone ID: 701136614H1
tgangcctaccctactattatccctttccttcctgcctatctttnctttcctggctctttcagaagatgttgaacaagttgtggacataagtggcaaccccattttcccaggtggcacatattacattatgccatcaacttggggcgctgccggtggtggattgaaactaggccggacaggaaactcaaactgcccagttactgttttgcaagattactcagaaatcttccgtggcacaccagtcaaattcagcatacctgggataagccctggaatcatctt

SEQ ID NO: 49137 - DNA, 286 bp, Glycine max
  unsure (1)..(286): unsure at all n locations; Clone ID: 701136615H1
gccagagatggcattgtttcgctaggaggtccccatatccctcttaagactggaagnagggatggtagaaggagcagagctgatgtggttgagcagttcctcccagaccanaatgagtccatntctgcagttcttgacaagtttggtgccatgggaattgacacccctggcgtccgttgcactgcttggagcacacagtgttggtcgaacccattgtgtgaagttggtgcaccgtttgtacccagagattgatccagctctgaaccctgaccacgtccctcacatt

SEQ ID NO: 49138 - DNA, 285 bp, Glycine max
  Clone ID: 701136616H1
ggactggtggacgccataggcaacactcctttgattccgatcaacagcctctccgccgccactggttgccaaattctcggcaagtgcgagttcttaaaccccggaggcaggcgtcaaagaccgcgttgctgttcaaattattcaagaggctctagaatctggccagctacgtccaggtggaatagtcactgaagggagtgctggaagcactgccattagcattgccactgttgctcctgcctacgggtgcaggacccatgtggttataccagatgatgctgccat

SEQ ID NO: 49139 - DNA, 287 bp, Glycine max
  unsure (1)..(287): unsure at all n locations; Clone ID: 701136617H1
cggcanaccagtacttcctgtgtaaattatctctcttgatgctccttntncttatccctttttccccagattattacctttgaccagctatggtgtctcaggtcattgnaatcatcgtgatgtgcattatggagtatggtaagttgaacattagtattgatcaatatcaaaganctatagcggaaaaatctggggatatagtagcatgattggatggacttagttcaaggaagaaaattgttngtttctaaatgctctcaaaaagctaacaaaaacaagtgttattt

SEQ ID NO: 49140 - DNA, 263 bp, Glycine max
  unsure (1)..(263): unsure at all n locations; Clone ID: 701136618H1
gtttcttcatattgttnttttnacgggttctgttggcaantgcagtaatgatggtggtgatactgccacaanccctaananatttatcgaactttgtatcggaaactctantgncttctttttcttgcntcaccttttcncccaatcactcgntaattccatggagatatatgtgctgcatcatgcacactctatatttcgtggtatcattataatnttnattttcantanttgtctttngatttacatgtcagtttcttccc

SEQ ID NO: 49141 - DNA, 283 bp, Glycine max
  unsure (1)..(283): unsure at all n locations; Clone ID: 701136619H1
gntcgatgggaattgcgcttcaaggcgtctcgtagggctantccgcctcacgagggtcaccaacggcacgtgcctttgggnggccgaggcccctactgctnggtccncaaacggacggcgggcgcacncgtcgcttntagcccggattctnacttagaggcgtncagtcataatccaacgcacggtagcttaccgccactggcttttcaaccaagcgcgatgaccnattgtgcgaatcaacggttcctctcgtactaggttgaattactattgcnacactgtc

SEQ ID NO: 49142 - DNA, 282 bp, Glycine max
  unsure (1)..(282): unsure at all n locations; Clone ID: 701136624H1
tgcnnncttatgctgtagacctgaacatgtcagcactnctntggatgccgagtccttctttggncngncaccctcgccttgtntanaagcactttgcaactnnatatttcatgttcatatttgatagttctgaaaacgagcttgctatgcttgacttgatacaagtgtttgttgaaacattggacaaatgcttcagaaatgtatgtgagcttgatntcgtggtcnactatagtaagatgcataccatactagatgagatcattctcggaggccaggtgttgg

SEQ ID NO: 49143 - DNA, 271 bp, Glycine max
  unsure (1)..(271): unsure at all n locations; Clone ID: 701136625H1
ccgcttgctttctttcttcancatntcacttgctgggaaaatcaccactgaaatcncgggttcatgcaatcgctacanagtggttcaacctcttcncaacacaactccatcatgttcaaaacctaactnatagagtgcatggaaccaagctggcatcaaggtgaagactggcatcacaacgagacagtcaagcactggncttataccatagatggtaaggttacaaatgtctcgagagtattgaatcnattgatgancanngcaanacant

SEQ ID NO: 49144 - DNA, 282 bp, Glycine max
  unsure (1)..(282): unsure at all n locations; Clone ID: 701136628H1
atttgaacaatcnattacttttntctgtnttctttttatgnagtgcncccaatactaccantgtctaaaggtnctccgttaccagancaaaaatntccggcttctgtataattgtgacgagatggagttcaattcatctntctgaaatggnagactaagnatgcagacnttnatcagacgaatctttgtcagccacgcaactaggcantattantattcagtntgtnaatntctttggtctatgacataataagagcattttnaagnatgcgtctatnaanc

SEQ ID NO: 49145 - DNA, 287 bp, Glycine max
  unsure (1)..(287): unsure at all n locations; Clone ID: 701136631H1
tgatantgtgaaaactgcaagatttaaggagttggctcctnatgatcctgactggtactatgtcagagctgcttccatggcaaganagatctacntgagaggaggacttggtgttggtggcctttcagaggatttatggtgggagcaagaggaatggtagccgccctcctcatttctggcaagagcagtggtgctgttgctcgtcacattcttcaacagttgcagaacatgaggcatcatgaatggacaccaaggggtggcaggaaaatcacttccagtggccggcg

SEQ ID NO: 49146 - DNA, 289 bp, Glycine max
  unsure (1)..(289): unsure at all n locations; Clone ID: 701136633H1
cnctccctgcaggtgtngaaatcgatnaactccctaaggcaaattgatgatacncagtacccaaaaacattcttctataaagaagaccttcatgcnggcaaaacantgaaagtacaattcaccaagcgtccctatggcncaaccttatggngtatatacatggttaacggatatnaaagacacctctaaagaaggatatagttttgaagagatatgcatcangaaagaagcgtttgagggagaagagaagttttgtgcaaaatccttgggaacagtaattggttttgcc

SEQ ID NO: 49147 - DNA, 282 bp, Glycine max
  unsure (1)..(282): unsure at all n locations; Clone ID: 701136641H1
gggcgaagttgtctccaccattccaagttcgtactcgatctcctntacatttanctnaatcttaacgtctactgcttcgtnttgcttctntncttctagcatntttggttttgtnagctaccgtctaccgagcgatcttgttttgaattttaggttccttaatagtatctgatttaattgaatgagctcgcttgtatttataaatantataattnttngtgtcctngatnanngctgtgctgtgtggttccttggttaaaaatgtagacaaaattttgcntc

SEQ ID NO: 49148 - DNA, 286 bp, Glycine max
  unsure (1)..(286): unsure at all n locations; Clone ID: 701136648H1
ggacacacgtggacaacagtnttatagtggctcgggatgctattggggtcacttccttgtacattggatgggggnnagatggntgctgtttggntttcatgagaactgaaaggcctgaatgatgnantgtnaatactttgagtgttttcccacctggtcanttgtanctctagnaaagaaagagggttccgcanatggtacaatcctccttggntntctgaggctattccatgtgcnccttatggatcctcttgntttaagacacgcctttgagcaggcagtcata

SEQ ID NO: 49149 - DNA, 279 bp, Glycine max
  unsure (1)..(279): unsure at all n locations; Clone ID: 701136656H1
caatttctcgcgagtgtttcttcnanatgcnaccgatcnttgnagttgntccacgcgccggnggatttcantnntgattgtccgccaangtnttagctgntgtnactttgggtcttccgngagnagggancnatatatagaaagtattntatggtgcgccgatgancanaactgatgtnatnggcagtagaaggaggnggattcttctctgcttcggcttcagggtatactaagggcctgcagcttctcctcttgggtcanagaaatgaangataaacc

SEQ ID NO: 49150 - DNA, 278 bp, Glycine max
  unsure (1)..(278): unsure at all n locations; Clone ID: 701136659H1
ccgatctggaggccatggcggggtctgggagttccatgctatattcctttcttctcttcacagtcattctctcacttcaaganatgtaccgagggaaactagcatcatcagaattatacactatacttggagggttcgttagctctctcctatttcttgtgctcctaactttcattggaaattttcaggaaacaattggtgcaagaactggttggggagctgtcattgttgcagaagctgttgctctgattgctgcaagcctgtcccaccgagtttgc

SEQ ID NO: 49151 - DNA, 279 bp, Glycine max
  unsure (1)..(279): unsure at all n locations; Clone ID: 701136660H1
ggcgtccgccttgggcacttcttcaattgcngttctgccttcgcgctacttctcttcttcttcttccaagccttccattcacactctctctctaacttcagggcagaactatgggcggaagttttatggaggaattggaatccatggcataaagggaagggctcagctctcggttaccaatgttgccactgaagttaactctgtagaacaggctcagagtattgttctaaagaaagcccagaggccagtatacccattttctgccatagttggacaaga

SEQ ID NO: 49152 - DNA, 280 bp, Glycine max
  unsure (1)..(280): unsure at all n locations; Clone ID: 701136662H1
tgttccgccaacaaatcagttctctgatcagcatgtcaatggtcataanggtgttactgttgaagccatggncttagattctttgcatcatcccgcaaacagctcaaggaatganggggtccatcgtgatcatattgcacnacatcctggaatttctttggataagctcatgctggctgttaaaaatcttattgatgaaggtgccatttatganaccataggtgatcactataagtcaatcatcaatggttgataccttgttggataaggacaacgattt

SEQ ID NO: 49153 - DNA, 291 bp, Glycine max
  unsure (1)..(291): unsure at all n locations; Clone ID: 701136664H1
ccacggttnaaatcaaatgggttcaaggacacagccagcatgnagctgatcgtgtctacgaagannttgtaccattgtatgaatncggatataaatgaaanggcttgtcantgttatgctaccaggtnntagaagggatcaattgaaggtncaagtgacctcaaanctcnaccctaaggctaatgggtgaacgactgatncactgnacaacagatggcgtcgttncaatctagaattgcctcttctttgctgattatgacaccgacaatgtgactgccaaatttnagggtg

SEQ ID NO: 49154 - DNA, 284 bp, Glycine max
  unsure (1)..(284): unsure at all n locations; Clone ID: 701136665H1
gnttnantcancagacntttagnaatnntgatggagtatgcagcatggggagagctctttgagaggatatncagtgctggcaggttcantgaagatgagganagatatttctttcagcagctgatctccggtgtccatttctgtcataccatggcaaatatgccacagagatttgaagctaganaatacncttcnagatggaagtcctggtccctcggttgaaaatttgtgactcggttattccaagtcatctnttgnctgcattcgcgaccgaaatcantgtt

SEQ ID NO: 49155 - DNA, 281 bp, Glycine max
  unsure (1)..(281): unsure at all n locations; Clone ID: 701136673H1
aactcccttcancattggntgaanaanccgngaaagcttttctgaagcagccaaaagtgtttcttcagcacnaagaanactgggaagggaaagagacctggaaaaggtgggaaccgcttttggaagtccattggggcttggatttaagactccccagggnagccatcgaaggaacctatattgacaagaagtgccncttcactggcaatgnttccatccgtggccgtgttctggctggnaacntgtccacntggctangatgaacaggnactnttattgtt

SEQ ID NO: 49156 - DNA, 279 bp, Glycine max
  unsure (1)..(279): unsure at all n locations; Clone ID: 701136674H1
caagatttnncttnagntcattaccggtaacattgcagtcaacaagttacatgatgcgtctanaggggngtggttcnnagcaaancttgcnttanatcactatatacgatanagaacgggtgactaagattattgaccncatccatngtgcgtggatnaggacctantggangaggtatgggntatggcaattgtngnccaatgcaggttcgaatcccaagcnttnganacacccncnattggggcatgnctngagagcattaggaaaatccattganc

SEQ ID NO: 49157 - DNA, 101 bp, Glycine max
  unsure (1)..(101): unsure at all n locations; Clone ID: 701136683H1
cgcacgtatactttgctctgctccttactccaaagtgcccctctctcgcgcttcgtctttcaccaccgtacaatttttccgcngcttccacacaanatacg

SEQ ID NO: 49158 - DNA, 279 bp, Glycine max
  unsure (1)..(279): unsure at all n locations; Clone ID: 701136687H1
cttncttgncaaagtgatccttaatcttaaatatatagatccaacttaacatnattcgggcaattccaggcaatgcatccgaccatgtctactgtnnacttcttgcttcagagtgcagtccatggtgcaatggcagggtatactggatttacagttggactggtcaatggcagaacatccttatattccattcattagaatcaatgagaggcagaacaaggttgtgattactgacagaatgtgggcaagactcctttcttcaaccaaccagcctagttt

SEQ ID NO: 49159 - DNA, 275 bp, Glycine max
  unsure (1)..(275): unsure at all n locations; Clone ID: 701136688H1
ggnaagagtgagcgnnaaagatgccttcggcgaggctttcagggtcaccaaggctcgacgttgctatngacatgggcaatccatttgctcaatctcactgttgatggtttcnttaagatcggagctgtcgcagccacgcgattcagctgctgaagatacttatcatatnatccgaaacgggaatatctcaagtcatgatttcgagaaaacgttgaagaagatgtgtaaagaaggtgnatattggggaactttagctggtgtttatcttggaatgg

SEQ ID NO: 49160 - DNA, 278 bp, Glycine max
  unsure (1)..(278): unsure at all n locations; Clone ID: 701136689H1
ccancattgggatcatggatgcggcttacttcgtcggcagatctgagattctttcttgggatcaactcnactctgcaacttcaatctctccaaagtcgaagaggcttgttccggcgccgttcattgtcagcttctcgatgccgctcatccagggatcgtgcctatggcacaaggtcaatttcgacgccaagagcgagtacgagatgattcagaatacaaggtccttcaagatgtctncaacaaacttcaaaatcaccaangcacatcgaggtcagcaa

SEQ ID NO: 49161 - DNA, 275 bp, Glycine max
  unsure (1)..(275): unsure at all n locations; Clone ID: 701136691H1
ggacccatttggtttagaaccaaatgttgcattgacagancagggccttgtctactgtgtctgaaggttgccccaagctccaatcagttctatatttttntcgtcaaatgtacgaatgcagccctacatacaattggcgcggaacaggaactaatttgactcgttttcggctttgtattattgagcctcggactcctgactatctaacccatgaacccctggattctggttttggggctattgtagancaatgcaaggntcttcaangctatcct

SEQ ID NO: 49162 - DNA, 205 bp, Glycine max
  unsure (1)..(205): unsure at all n locations; Clone ID: 701136692H1
gttgcagctagaaggctnncttctctctcctcctcctctccgtgggcggcccaaccacgccgcntccgcttatgtntctcgaaangcagtcgttgatgaaccgcagatccgatccttccctcncatcccctttttnccttcagaggttttgctactgaaatccctgatccacccantagaaaacagcattattctgagattcctg

SEQ ID NO: 49163 - DNA, 272 bp, Glycine max
  unsure (1)..(272): unsure at all n locations; Clone ID: 701136693H1
cttcaatgtcaaaatttgatgcttccaatgaacgtatgagaaacctttatcaccgtagaaatgaagcaaacaccaacaatgttgatnaaaaactgtatgagcttgatttaggtcgcatattgcgtggggaagacagccganctacacttatgataaaaaatattcccaacaagtatacttcaaagatgcttcttgctgcaatagacgagcaatgtaagggaacttatgatttctgtatttaccgnttgatttcaagataaatgtatgttggc

SEQ ID NO: 49164 - DNA, 275 bp, Glycine max
  Clone ID: 701136694H1
tgcttgttttgtttgttgctacagttttggtagcatatgaatgccatggctcagactaccagaagttccctctccaaatgaaaactgggtttggtgggcaatacagcaatgaggtggcatgtgccagttggaggcttggcgtggaagcaaacaacgtagtcaagtggcaaactgttcctgcagcttgcggagagtacatagctgactacgttctaggagaccaatatagatcagattccaaaacagttaaccaacaagcttatttctatgctaaa

SEQ ID NO: 49165 - DNA, 275 bp, Glycine max
  unsure (1)..(275): unsure at all n locations; Clone ID: 701136695H1
tcttgctttgcttcctcntctatntgctttcttcgttagctgccactacggaatcaagaaaagatccaggggaatattggaaaatgatcatggaagatcaggaaatgccaganngacttcaaggtcttgtttcatttcaatctgaaaataaccctaagactcaagagcagcttggtaaaggttccanaaaccattgtgaagagtctctagttacaaatacncaagttaanagtgattcgaacccataccaagtgtnaccaatatgatgatttggc

SEQ ID NO: 49166 - DNA, 289 bp, Glycine max
  Clone ID: 701136701H1
cgctgtcatttacaaggactgggttttcactgatcaagcattacctaatgatcttgtaaagagaggagttgctgttaaggacccatctgctccccatggagttcgtcttttgattgaggactatccttatgcttctgatgggctagagatatgggatgccatcaagtcctgggtgcaagaatatgtctcattctactacaagtcagatgaggaactccaaaaagaccctgaactccaagcttggtggaaagaacttgtagaggtgggtcatggtgatttgaaagataag

SEQ ID NO: 49167 - DNA, 283 bp, Glycine max
  unsure (1)..(283): unsure at all n locations; Clone ID: 701136703H1
catctgcaccctcctatcccacagtatttggcaatattccagtanctccttcaacctcaacctcacctcaactcacatcaacttttcaacttctcatcattggatttatgatatgtgcgcacttcgcttccttaatgtgaaattaaaatgtccatgtctttgttgccatcgagancgtagatcaattgactcaagattattcaagcttaattggtaatgttgaggtggaatttggaaatgcatatatgtcaaagagaaaactttatcaagcatcatgatctat

SEQ ID NO: 49168 - DNA, 278 bp, Glycine max
  unsure (1)..(278): unsure at all n locations; Clone ID: 701136706H1
caagtcgttgccatagagctgccacttnnatacggnccattcatttagtcantgaacaatagagggctgaacctcnctgangtggtgtgttccacatttcacaatggggnggtttggagaaaccaaggacanaaggacagtgagantggaatgcttcatgaganaaagcagccccaatatctgngtgaggcctatcagtggactcacaatggtggttgaccttganctcatgaagatcgtncatntcacgacngtgggcttatnnnngttccaactgc

SEQ ID NO: 49169 - DNA, 261 bp, Glycine max
  Clone ID: 701136707H1
gcgattcagagagaaagagaaatacggagaacgaaaaggactcccaattgctctggggcacttggcgatgctcctcttcttcattgcttcttcctcttcctctcacctcgttcgtgccttccgatgacgccgacgacgcgatcttctacgagtcattcgacgaggattttgacggacggtggattgtgtccgacaaggaggattacaacggtgtctggaagcatgctaagagtgatgggcatgatgattatggacttcttg

SEQ ID NO: 49170 - DNA, 283 bp, Glycine max
  unsure (1)..(283): unsure at all n locations; Clone ID: 701136708H1
gncaattctgactttcccattttacttgcattgatgaagtcagaattgtcacttgacgaggttccatcctcaaatttggaaaacaacatagatgttgacaacaccgaaagangtgattatgaaagcacatcacagcttactgtgccacagatactttcagctgaggtggctagtcatggggtnaaaacttcaaaaacggagcttttcctaatttctggtgctgcatgcttgcctcatccctctaaggcattgacaggtcgagaggatgcttatttcatttctc

SEQ ID NO: 49171 - DNA, 288 bp, Glycine max
  unsure (1)..(288): unsure at all n locations; Clone ID: 701136709H1
cgcacagtgacacatacataaaaaaaaacgaaacacaaacagaaacagagttattggaaaacacgaaacactaattgatttgaattcgattcgattgaggattgctgtttgggtgtcttgatggtgtcggtgaacccaaaccccgctcaaggcttctacttcttcgatccctccaacatgacccttccccggcgtcaacaatcttnnnnnnnnnnnnnnnnnnnnctccggctgctcctgccggccgtcgaggatccgaataagaagatccggaaaccctacacgatt

SEQ ID NO: 49172 - DNA, 282 bp, Glycine max
  Clone ID: 701136710H1
gattttcatcagttgagttgagagaaggaaagggaaaatgggtaaggatctgagcgaggaacaagtgtcttccatgaaggaagccttctctctattcgacactgacggagacggtcggatcgctccgtcggagctggggatcctgatgaggtctctgggaggtaacccgacgcaggcccaactcaaagccatcgtggctgaagagaacctcacggcccccttcgacttcccccgattcctcgatctaatggccaaacacattaaacccgaacccttcgatcg

SEQ ID NO: 49173 - DNA, 282 bp, Glycine max
  Clone ID: 701136711H1
ctcaatttccgatcactgcattggttctgttgacgagggttttgttctacttgacttgcatacttgatggcgtcaaagttgcagaagttgcagtccgcagcatgtcaagcatctcaatttgtatccagtcgtggaactaactactacaggcaattgctggaacagaacaagcaacacattcaggagcctcctacagtagagaaatgcaacctgctggcaaagcaattgttttacacccgccttgctagtattccgggtcgtaatgagtccttttggaaggaa

SEQ ID NO: 49174 - DNA, 280 bp, Glycine max
  unsure (1)..(280): unsure at all n locations; Clone ID: 701136712H1
caccgtcaganattgccgaagatattgcacaggacaaggtgtttacgcaaggactcgacaagaagggtcgacctatagttgttacctttgctgcaaaacattttcaaagcaaaaatggtgccgatggtttcaaacggtatgtggtgtttgttcttgagaagctttgttcaaggatgccaccggggcaagaaaagtttcttgccattgcagacattaaaggatgggcatacgtaaacagtgaccttcgtggatacctaattctctatccatttgcaggatg

SEQ ID NO: 49175 - DNA, 296 bp, Glycine max
  unsure (1)..(296): unsure at all n locations; Clone ID: 701136716H1
gccgctcgatggngaattgcgcttcaaggcgtctcgtagggctaatccgccttcacgagggtcaccaacggcacgtgcctttggggggccgaggccccctactgctggtcggcaaacggacggcgggcgcacgcgtcgcttctagcccggattctgacttagaggcgttcagtcataatccaacgcacggtagcttacncgccactggcttttcaaccaagcgcgatgaccaattgtgcgaatcaacggttcctctcgtactaggttgaattactattgcgacactgtcatcagtt

SEQ ID NO: 49176 - DNA, 282 bp, Glycine max
  unsure (1)..(282): unsure at all n locations; Clone ID: 701136717H1
aattccactcccacgaaacggtttctccaaacccaattactcgacaaaacgcccatgtttcaccccttcagcttcaacactcagaatttcttgctctggagtggctgantttgatggatctcatcagaaaaaaggaggtttgtttaatttcaatggaatcaagggcgtggcttgtggtattcttgcagcttgtgctgttacttctgctgcatttcctgttactgctgctactcagaggcttcccccattgtcaatgagcccaatcgtgtgagcgtgcattgt

SEQ ID NO: 49177 - DNA, 281 bp, Glycine max
  unsure (1)..(281): unsure at all n locations; Clone ID: 701136718H1
ttctccctcgacaaaggatgacactcgaggaattgcgtgaagaagtttggtatgctgcaattagccttttgttattagcttttaatgcttttnnatttgttgtagttgtgaattgtatgtattcatggctgttcataactttttaacattctgagttgctaattattgtcttangggcaatggttaaggaatcaaaactgatgattttttattgaaaaatgtaacattatttgtnaccaatgcatttccaccatgactgctagtaaagcttctattcattg

SEQ ID NO: 49178 - DNA, 286 bp, Glycine max
  unsure (1)..(286): unsure at all n locations; Clone ID: 701136719H1
atcactcttcaccttcctctgcgncaatttgtgcgcactcngtcgccgtcacctccgcggcatatgccttgccatccccggcacggaaaccggagagtgctccctccgcggcgtcggcgtcggcgacggtgttctggtccctccgcggcgagaagtgtacgaggaggggcgaatcttcganatcacccacaggtatgtccccgagatgccggtgtgggactcgacgganggncttcnggcagcacttcctgttggctcgaaaagancatgaagaatggctcgcgcg

SEQ ID NO: 49179 - DNA, 275 bp, Glycine max
  unsure (1)..(275): unsure at all n locations; Clone ID: 701136720H1
ttgagttgaattgaaacttttggagagagaaaagancaaaaaaaatcaatgctancattttggcattggggtcttgtttagtttgttccaatccaacgttggttgtgtgtgtttgtgttgggaggattgggattgggattggaatcagcgaccccatgagacctcagagaacgtcncatccacgccgtcacgacatgggtgaggcgacagcccccaaaggtgaaggcttttctcgccgtcgtttccggcatggcggccctcgtcctccttccgtt

SEQ ID NO: 49180 - DNA, 280 bp, Glycine max
  unsure (1)..(280): unsure at all n locations; Clone ID: 701136722H1
gagtgctcaaagcaagcctacgctnctgtatacattagcatgggataacaccacaggattctgatcctattgtgttggccttgcgggatcggagtaatgattaacagggacagcaccggaggcacgacccggccagttaaggacaggagcgcatcgccggcagaagggacgagccgaccggtgcacaccggaggcggaccgatcgacccaacccaaggtccaactacgagccgcacagcttcaatcnccgaccacaccacccatcaanccatnctttctt

SEQ ID NO: 49181 - DNA, 225 bp, Glycine max
  Clone ID: 701136723H1
ggaagcagtggcaagattgtgaattctaatgaggggcagagcaagcccaagcgccagatgaaaaccccttttcagcttgaaaccctcgagaaggctatgctgtggataattacccttcggagacgatgagggtggagctgtctgagaaattggggttgtcagatcgacagcttcagatgtggttctgccacaggaggttgaaggacaagaaggacttgccgtcta

SEQ ID NO: 49182 - DNA, 281 bp, Glycine max
  Clone ID: 701136724H1
cattaccctcacaaagtaagcaatggcataccaaaactacaacaactatgggtggcgatgcccctctgacgagtaccaagtgtacgaccccccagtagaggcaacatatcctaggcaaaatcatcacaagaagggtcatgtggcattcagaaccaactatgaggattctatagctgaagtagaatccaacgttgaggctcgagaacataacagcaggttatggaatcacagtgcttacaaaagcgtggaccaagaggctgaggcgtttattcagtatgagc

SEQ ID NO: 49183 - DNA, 279 bp, Glycine max
  Clone ID: 701136726H1
gcagcttcagttcccgtgtttgctcagtaaagccaccaaacacttaagtggtacattgcatgcataataccaccaactttgattccgtgtctgaaaactaggtgctccgcaatttcgctacttgatctctatcagtattattaagtatcattaatgatgattattacatgctaattacaattttgtctgaagatgcatatgcatggttttctttataatctaatcgtgagtcaaataaattaaactagtatttccactaatttaaatactacagtatat

SEQ ID NO: 49184 - DNA, 284 bp, Glycine max
  unsure (1)..(284): unsure at all n locations; Clone ID: 701136729H1
ggacaggatctctttgagaaggaacaaaataatctgcttgctgatttgatggatattccaaagaaggcatgcgatcgtcggatcaatgaatttgtgaaacgtgcaagatctgctanaattcatgcatatataattagccatcttaagaaggagatgcctgctataatgggcaaagccaaggctcgacaaagacttcttgataatcttgaggaagaatttgcaaaggttcaaagggagtttcatctaccagccggtgattttcccaatgttgaacacttcagaga

SEQ ID NO: 49185 - DNA, 288 bp, Glycine max
  unsure (1)..(288): unsure at all n locations; Clone ID: 701136730H1
ctttgnatancctcnatatatngtnctctggcaattaaggttctcatgccaaatangcacanatgggtagccagagttacttcaaggtttgattattggcctgatagcactaattggatcaacttaagcgcaattgcagcttggtntcnatgccaaaagttgtccaaangctgagcaaataattctgaagtacgttgttnagcatatccanaacgctccatcactagcagctgctctcataagattgcacntccatgattgtnttgncaatggttgtgatgnatcagt

SEQ ID NO: 49186 - DNA, 270 bp, Glycine max
  unsure (1)..(270): unsure at all n locations; Clone ID: 701136732H1
gtttactttccattgattgagcgncaagtttgttttttctgcgatcattttccattgggtggaagaaagtctcaacctttagtcgaaagagcaaggatctgagtgagtgagcgatcatgtgtggtggtgcgattatctccgacttcattccagcgggtcccgccggcggggcgcangcgtgaccgccgacatcctgtggccgaatttgaggaagcggttctcgaagtcgctgctggacgatgatttcgaggcagggttcagagaattcga

SEQ ID NO: 49187 - DNA, 284 bp, Glycine max
  Clone ID: 701136733H1
attgggatcatggatgcggcttacttcgtcggcagatctgagattctttcttggatcaacttcaactctgcaactcaatctctccaaagtcgaagaggcttgttccggcgccgttcattgtcagcttctcgatgccgctcatccagggatcgtgcctatgcacaaggtcaatttcgacgccaagagcgagtacgagatgattcagaactacaaggtccttcaagatgtcttcaacaaactcaaaatcaccaagcacatcgaggtcagcaagctggtgaaaggaa

SEQ ID NO: 49188 - DNA, 272 bp, Glycine max
  unsure (1)..(272): unsure at all n locations; Clone ID: 701136737H1
gctagctggggacttgtnctgaattcattcgcggagttggagaagccttatnttnantactctgagaaaggaattggggcacgatcgtgtgtgggcggncggaccgttggctcccngaggncgcgaaagangagcganganggtcgagttcggtgtccgtgaacgacgtcgtttcttggttggatgaaaaggaagatttaaaagtggtgtatgttgtttcgggagcatggctattctgtccaaggatcaaacggagcgnttcaaacagcgtt

SEQ ID NO: 49189 - DNA, 275 bp, Glycine max
  unsure (1)..(275): unsure at all n locations; Clone ID: 701136738H1
ctcagtgtgggaaaacgatagataccattaccatgttggttggataactgagagatgatgatgatttcaacttcaaccatggctttggcttctttactacccaaaacggcaccgcatgtcctttccctcacaaacccttccgcttccactcccttcatcttacctttcagtttccactgtttgnctcaccctcctcttctctctgccctcaaagctagttcctccggtggcgacgatttacgcggcaagcccctgctttctcagggaattggaaa

SEQ ID NO: 49190 - DNA, 275 bp, Glycine max
  unsure (1)..(275): unsure at all n locations; Clone ID: 701136739H1
cttgtnggtaaaattagtactgaanttngggttcatgcaactnncngcaaagtggttcaacctctttgcaacgcagctccatgcatgttcaaaaccttactgatagagtgcatgaaaccaagctgcatcatggtgatgactggcatcacaacgagtcgatcaaacactggactgtacaatagatggtaagattacaacatgtctggagagtantgaatccgttgatgaaccgaacaaaacaatcacctacaagctcttcggaggagatattngtc

SEQ ID NO: 49191 - DNA, 276 bp, Glycine max
  unsure (1)..(276): unsure at all n locations; Clone ID: 701136740H1
gttttgtttgttgctacagttttggtagcatatgaatgccatggctcagactaccagaagttccctctccaaatgaaaactgggtttggtgggcaatacancaatgaggtggcatgtgccagttggaggcttggcgcggaagcaaacaacgtagtcaagtggcaaactgttcctgcagcttgcggagagtacatagctgactacgttctaggagaccaatatagatcagattccaaaacagttaaccaacaagcttatttctatgctaatccctca

SEQ ID NO: 49192 - DNA, 193 bp, Glycine max
  unsure (1)..(193): unsure at all n locations; Clone ID: 701136742H1
gttttctgctacntntgcgcgtgtgcattcctcttcccttcatagcgagttctagtngtcgtagactcggtgttgtgggactcacccaccancacancaacccctnttnatcccacgngcacagagtnanacccaaacctctcgtntnctctccanacccaacaaacaaacnacaacaanaacngngcttcct

SEQ ID NO: 49193 - DNA, 278 bp, Glycine max
  unsure (1)..(278): unsure at all n locations; Clone ID: 701136744H1
cacccattcatacgtggtgttgttactgctgcnctnttctctnttcttttctctttagttctctgcttcccctntgcnttntcttttcttcttctnctgagcttgtttaagcttttctgccattaacatattatcatccatgtgtggtattcttgctgnncttggttgttctgatgactcncgagccaaaagggtccgcgtgcttgaggnctctcgnagattgaagcaccgtggccctgnctggagtgggctccatcaacanggtgactgtttnnggc

SEQ ID NO: 49194 - DNA, 287 bp, Glycine max
  unsure (1)..(287): unsure at all n locations; Clone ID: 701136748H1
ctcagtgtgggaaaacgatagataccattaccatgttggttggataactgagagatgatgatgatttcaacttcaaccatggctttggcttctttactacccaaaacggcaccgcatgtcctttccctcacaaacccttccgcttccactcccttcatcttacctttcagtttccactgtttgcctcacnctcctcttctctctgccctcaaagctagttcctccggtggcgacgatttacgcggcaagcccctgctttctcagggaattggaaagggaatttggag

SEQ ID NO: 49195 - DNA, 269 bp, Glycine max
  Clone ID: 701136749H1
caaacactttcaatgctgcattaacctccgcatttgttactgattttccaggtgtgaatggtcttggtgtatctgtggcacggttagacatagccaaaggtggatcaatcccaatgcacacacaccctgctgccactgaacttctaataatggtggaaggtcaaatcactgctggttttatgaccccaactgcactttataccaagacactgaaacctggagatattatggtttttccacaaggacagttgcattttcaggttaattct

SEQ ID NO: 49196 - DNA, 274 bp, Glycine max
  Clone ID: 701136756H1
cgcctcttccgtaggcagcagcaatggcctcaaatcccaaaactttgacctttgaggaggtagctaagcacaacaacaaaaaggattgctggattattatcaatggaaaggtgtatgatatcacaccatttttggatgagcatccaggaggtgatgaagttttgctgacgtcaacagggaaggatgccaccattgattttgaagatgtgggccacagtgattctgctatagaaatgatggaaaaatacttcattgggaaggttgacacttccac

SEQ ID NO: 49197 - DNA, 278 bp, Glycine max
  unsure (1)..(278): unsure at all n locations; Clone ID: 701136758H1
ggcntccaagggtttaaccnttctngctgtgttnatatgngtttcagnactgtcagctggagtccttctgttncggngggaagngcaaaataatgggcctgttatgaacttnctacaaggnatcatnccctcaggctgaagacatcatcacagnacaagtcaagcttctntacaagcggcanaanaacactgctttnctcctgggntcaggaacattctnccangactntggtgttcagagttgtgatgttcactgttgctggactccacaagaagga

SEQ ID NO: 49198 - DNA, 280 bp, Glycine max
  unsure (1)..(280): unsure at all n locations; Clone ID: 701136763H1
gntttagcgcagttcgtctngatttaaggaagatgggnaaggaaaaggttcacatcagtnttgtggntattggccatgttgactctgggaagtccactaccactggccacgccntctacaagcttggaggcattgacaagcgtgttattgatagatttgagaaggaagctgctgagatgaacaagaggtctttcaagtatgccngggtgcttgataagcttaaggctgagcgtnaaagaggaatcacaattgatattgcttgnggatntttgaaaccacc

SEQ ID NO: 49199 - DNA, 276 bp, Glycine max
  unsure (1)..(276): unsure at all n locations; Clone ID: 701136765H1
cctagaccccacaaagggtgttggtcgattaanacagcaggacggtggtcatggaagttcganatccgctaaggagtgtgtaacaactcacctgccgaatcaantagccccgaaaatggatggcgctaaagcgcgcgacctatacccggccgtcggggcaaggaccaagccccgatgagtaggagggcgcggcggtcgctgcaaaacccagggcncgagccggtgcggagggtcgtcggtgcagatcttggtggtagtagcaaatattnaaatgag

SEQ ID NO: 49200 - DNA, 273 bp, Glycine max
  unsure (1)..(273): unsure at all n locations; Clone ID: 701136766H1
gaganattgagtttccgagataaccagttttctctttgattcatcaatggcaactgcgaggaccgtgaaggatgtttcgccncacgatnncgtgaaggcttatgcttcccacctcaagcgttccggcaagatggagcttcctgagtggaccgatattgtaaaaacagcaaaatttaaggagttggctccatatgatcctgactggtactacattagggctgcctcaatggcaagaaagatctatttgagaggtggncttggtgttggtgcttt

SEQ ID NO: 49201 - DNA, 153 bp, Glycine max
  unsure (1)..(153): unsure at all n locations; Clone ID: 701136770H1
ggagaatatgaagttgtttgtnttctttgttgctgcagtagttttggtagcatggccatgccatggcgcaggctaccaaaggttccctctccgaatgaaaactggctatggtgagcgttcttcggaggtaaaatgcgcaagttttaggcttgt

SEQ ID NO: 49202 - DNA, 269 bp, Glycine max
  unsure (1)..(269): unsure at all n locations; Clone ID: 701136771H1
gtanggtctgaaattgatgggtggaccaattttggggatgatgacataatgcaacagcagtatacaattcaggctgaggaagccaaganggttccatttgtgggtgacaangaaccactgagtagcttagctgctgaatataaattaggcagtcctatcttgctggaganaataaaggtgcttgatgagcaatatgctgccantcgtcgtactcngggagatggaaactgcttctttcgangcttatgttttcatatcttgagcatatt

SEQ ID NO: 49203 - DNA, 274 bp, Glycine max
  unsure (1)..(274): unsure at all n locations; Clone ID: 701136772H1
gcaaatctcaatcgaatctcagaaaaatgagagaaatcatcagcattcacataggtcaggccgggatccaggtgcggaaactcctgctgggaactctactgcctcgaacatggcatccagcccgacggcatgatgccttctgactccaccttcggtgtagcccacgacgccttcaacaccttcttcagcgaaaccggatctggcaagcacgtcccccgtgctgtcttcgtcgacctcgaacccaccgtnatcgacgatgtccgctgcggnacct

SEQ ID NO: 49204 - DNA, 265 bp, Glycine max
  unsure (1)..(265): unsure at all n locations; Clone ID: 701136773H1
gctacaccaaagtcagttcttgagctcatggatgtgaaggatctcacattagctcatgttcaaaagccatttgcagatgtatcgaactgttaagaccactgacaagcctgctgcttcttcaggcctttcagatggatcaggagaagatgacatgtctccaatgggaagcagtggtggaatgcgtcaattttcagaccaaagaagcctttctgatcgaccactgcaacaagatagngactactcttcaggcaacaacactctatgg

SEQ ID NO: 49205 - DNA, 269 bp, Glycine max
  Clone ID: 701136774H1
ctctcttcttcactcttcattctcatttctcttctgaattattgacatggctaagagctcattcaagatggaacacccacttgagaggaggcaggctgaagcatctcgaataagagagaagtatcctgacagaattccagtaattgttgaaagggctgagaagagtgatgttcctgaaattgacaagaaaaagtatcttgtacccgctgatttgactgttggtcagtttgtgtatgtggtgcggaagagaatcaagctgagtcctgaga

SEQ ID NO: 49206 - DNA, 117 bp, Glycine max
  unsure (1)..(117): unsure at all n locations; Clone ID: 701136778H1
agctagctagctatctaggatggtgagtgttgaagagatccgtcaggcacaacgtgcagaangccctgccactgtcatggctattggcaccgccactccncacaacnnnnnanangt

SEQ ID NO: 49207 - DNA, 281 bp, Glycine max
  unsure (1)..(281): unsure at all n locations; Clone ID: 701136779H1
ctgcgcctttgcatttcagcagcacaccacaatggccancaatgcattcactgggcacatctnctctccatgcgttctgtcattcctcaaacacaggcatttgcctcaatttctggcccgacatctgcttcaatttccagctttgggagaaagaatgtttctttagcttgcagccacgcttaattcgccttaaaatttcctgtgctgccgctaaaccagagacagtagagaaggtgtgcaaaatagtaaagaagcagctggctatgcctganactgatgtg

SEQ ID NO: 49208 - DNA, 281 bp, Glycine max
  Clone ID: 701136780H1
gtgaggttgtaacaaccaatcctactgttggtagcaacgtcgaagagctcgtctacaagaatatacgatttgaggtctgggatcttggtggacaagaaagactgaggacatcatgggcaacatattaccgaggaactcatgctgttattgcggtgatagacagcagtgatagagccaggatctctatcataaaggatgaactttttaggttgctggggcatgaagatttacaacattctgtcattcttgtctttgctaataaacaagatatcaaggatgct

SEQ ID NO: 49209 - DNA, 270 bp, Glycine max
  unsure (1)..(270): unsure at all n locations; Clone ID: 701136781H1
gcaaagcgcagttgttgctctttgaactcgaacgaagtctccgaagtcgaaacactcgttcgattcgctgaactctgaagttaatntttcttgcgaaaatgtcggtggcgaagaagttgattagatgcgtcatccttgacttggacggcacgctgctcaacacagatggcatcgnaggcaacgttttgaaggttatgttaggtaaatacggaaaggaatgggacggaagagaagctcagaagataattggaacgacgccgtttgaggccg

SEQ ID NO: 49210 - DNA, 264 bp, Glycine max
  unsure (1)..(264): unsure at all n locations; Clone ID: 701136783H1
ctgaccaaaggcaaatccatttgtatctgtagctggaattttcgtcattcttactttaccttccttcctcaccttctaattctccaacaagttccaaactttcanatctcnccgccccaaaaattcttttttggttacccatttgacttagcctctgcaacagagtctcagatctctgcattccaattcccatggctggtcgctatgacagtaacccctcgatgagaagaagttaaccctttctctaatccggaagtgttccgc

SEQ ID NO: 49211 - DNA, 264 bp, Glycine max
  unsure (1)..(264): unsure at all n locations; Clone ID: 701136785H1
cccactttcttctccttttagggtttcctntttgtttctcctttccagatctgcatcttccnttttttaggattaancggtgagattcgtgaatctgagaaatgtcggattcttctcgggaggagaatgtttacatggcgaaattggcggacagggccgagcgttacgaggagatggttgagttcatggagaaggtagcaaagactgtggaggttgaggagttgacggtggaggagagaaatcttctctctgtggcttacaaga

SEQ ID NO: 49212 - DNA, 269 bp, Glycine max
  Clone ID: 701136787H1
gatagccctagaaatgtttcgtgaatctttgtttgctctctttctactttctgccttctcctccttcactcctacctttaaccactgctcaagattacgttctcgacacggacggtcacgcggttgaaaatcacggtacatactatttgttgccagcgaaatcaggaagcggcggtggtggaatagaggtagccgcaactggcaaagaaagttgcgctctcactgtagtgcaatctctgaacgaggactccatggggctaccattgaag

SEQ ID NO: 49213 - DNA, 96 bp, Glycine max
  unsure (1)..(96): unsure at all n locations; Clone ID: 701136788H1
ctttctgctctgctcagtctcaactnctgaaattgctganactaggatttgcgatgcntgccattccctgctgctgctgctttctgttcccaaana

SEQ ID NO: 49214 - DNA, 270 bp, Glycine max
  Clone ID: 701136791H1
gctggaggttctgttaaaggtgatgatgggccaagtttatgctgcaatgaaccaagtttaagtgaagtatatgcggatgtgatgagagtaacaaacaaaccaatgatggggagagattcggcaaaccgtgcacaacaaaccccagtgagggagaaacggaaaaaggccagtaataaaaaggctcccaaacctccaagacccccaaaggctccatcattggatgcagctgaccataagctaatcagggagatatctgaacttgccatgttg

SEQ ID NO: 49215 - DNA, 271 bp, Glycine max
  Clone ID: 701136792H1
tacccactgaagtcgaacccctatttttcctctccctaatggcttctcaagttcttcttcagcaggcactgtttgcccccaagctaagtttcccttcttcttctcgtaacgtggcgttaatttctagggttccttccaccccaatttcatggcgttgcactcccctcattgctaagcctagtttcgtagtgagagctgacaccaacctcgatggcggtggtgaagccaccgaggatgttccttcggataatgctgaaaaagtttcggaagg

SEQ ID NO: 49216 - DNA, 273 bp, Glycine max
  unsure (1)..(273): unsure at all n locations; Clone ID: 701136793H1
ctcaggtaagccaaaaccatggttaagcataacaatgttatcccaaacggacacttccgtaagcactggcagaactatgtgaagacttggttcaatcagccagcacggaagacaaggagacgattggctcgtcagaagnaagctgtgaagatattccccagacctacggctggacctctcaggcccattgtacatggtcaaactttgaaatacaacatgaaagtgagaggtggaaggggattttctcttgaagaactcaaggcagcagggatt

SEQ ID NO: 49217 - DNA, 248 bp, Glycine max
  unsure (1)..(248): unsure at all n locations; Clone ID: 701136794H1
gcttttcttaccatctccttcaattctctctcactaccctnnnttctctcaccaaaacctttcacccaatatcctcaanctactacttctgataaattgctaatttttataaagctagctagagatgatggttcaaaaggaagatttgggtttgagtttaagcctcaacttccctcatcacaataccccaaatcctcaacatccgagtctcatgtcatcctctactcattcctcttctccttctggtt

SEQ ID NO: 49218 - DNA, 279 bp, Glycine max
  unsure (1)..(279): unsure at all n locations; Clone ID: 701136795H1
atcggctaccactactaccagtggtgtagtgctctgaaactgcaacagcaacagcaacgcgatggggagaggaaaaagagggaagagtcgcactcaaagaaagcatttccagcagaacagagagnggctttggacatcttccaaacgctctaaatcagatccttcctccgaaaatcctattcctatctgcaatccctacgccactcaaaacctcgcttcggnttcactattacaaggagcagggaatcgtttcctcagaagaatgggatgcattcgtgc

SEQ ID NO: 49219 - DNA, 281 bp, Glycine max
  unsure (1)..(281): unsure at all n locations; Clone ID: 701136796H1
agaatatgaagttgtttgttttctttgttgctgcagtagttttggtagcatggccatgccatggcgcaggctaccaaaggttccctctccgaatgaaaactggctatggtgagcgttcttcggaggtaaaatgcgcaagttttaggcttgctgtggaagcacacaacatccgagccttnaaaaccattcctgaagagtgcgttgaaccaacaaaggactacattaatggcgaacaatttagatcagactctaaaacagttaaccaacaagctttcttttat

SEQ ID NO: 49220 - DNA, 255 bp, Glycine max
  unsure (1)..(255): unsure at all n locations; Clone ID: 701136801H1
caaattttcttccccaaatcgtagatctacggtttaactggagtagtgtggtaagatgggangtggatttagagtgcttcatttagttaggccgtttctatcgtttcttcctgaagttcaaactgctgacaggaaagtgccatttagagagaaggtcatatacactgtgatctctcttttcattttcctggtttgtagtcagctccctctatatgggatacactcaacaacaggtgctgatccattctattggat

SEQ ID NO: 49221 - DNA, 262 bp, Glycine max
  Clone ID: 701136802H1
agaccacttgcgttacttgatgggaggccgatcaaacattcagaatgaggttctctgtcgtttcacctttgccagaaagacctggtgctttgatgaaatttttggaccccttcagtccacgttggaatatcagtttattccattaccgaggggagggtgaaactggagcaaatgtgctagttggaatacaggtacccaaaagtgagatggatgagttccacgatcgtgccaacaaacttggctatgattataaagtggtgaa

SEQ ID NO: 49222 - DNA, 265 bp, Glycine max
  unsure (1)..(265): unsure at all n locations; Clone ID: 701136803H1
ggagcgtacgcataactccccgccgtccggacatttcttggttcctgaaatttcaaagaataccaatgngctgcacaggcgttgcctcttgataagagggaacctcatgaatcggaagtgccacccatctttcagttatgttctccatagcaatgaagggaaacgtgaatgccctgatgaaaagtcatcttcagctggcattagtaattctatccaaagaaggatgtttgggaactcagtngatggatcaatgcggtttgtttcc

SEQ ID NO: 49223 - DNA, 261 bp, Glycine max
  unsure (1)..(261): unsure at all n locations; Clone ID: 701136804H1
gagtttaattaggccattaacatatcatatgggtgtgactaagcctcatgtagcttatgctgttgatcatcatggttgtctcaattgcagagaaaccatcagtaatagaaggaagggctctttccttganatctggtcaagggtactcaaagatttttgcaacgcttggacttgtatgcaagtgttgtgatggggttggaggtgcctgcactagtacatggacngaatcttgcnataacttgcagtgtttaccttggaaat

SEQ ID NO: 49224 - DNA, 262 bp, Glycine max
  Clone ID: 701136805H1
ggatgtatgttaaaggatacaagtatttcaaaatgtacctcttgtcgtgatgacatgttaagtaaaggggaagtgtctgcagctgttaccaacatacagcctcaggttcctacttcatcttcagaagtgaaattggagtcttctaagttggaaaagcaagagaaaaatacaagttctaaagcatcatcaggccttcgaaagagggcctatgaccctgaattgtttttcaaagtcaatgggcaagctttatcaaaggcttggc

SEQ ID NO: 49225 - DNA, 260 bp, Glycine max
  unsure (1)..(260): unsure at all n locations; Clone ID: 701136806H1
attcttctcaaggtggcagctcaagtccctgacagtggtccttgcgtgacttatattggtaaaggtggctctggtaattttgtgaaaatgatccacaatggcatcgaatatggtgacatgcagctgattgcagaggcctatgatgtgctgaagtcagttggaaagttgtcaaatgaggaactacaaagtgtcttctcagaatggaacaagggagaacttctgagtttcctgattganatcactgcagatatatttggaat

SEQ ID NO: 49226 - DNA, 206 bp, Glycine max
  unsure (1)..(206): unsure at all n locations; Clone ID: 701136807H1
tagtgcctccttgccagaagttaaaatggcccaagaaactttcctattcacatctgaatcagtgaacgaggggcaccctgacaagctctgtgaccagatctccgatgctgtgntcgatgcatgcttggagcaggaccctgacagcaaggttgcctgtgaaacctgcaccaagaccaacatggtgatggttttcggagagatcacaa

SEQ ID NO: 49227 - DNA, 262 bp, Glycine max
  unsure (1)..(262): unsure at all n locations; Clone ID: 701136808H1
gtagaattgtagaagcttcacttcactctcatcaactcanagttgcatagaaatttgtactctattnttgttattttctctcttctttgtggacttttagcaactatattgtttccaatgtccaagatgttgggagtgtttgtgggacttttgttggtggggttggctgcctctgccaagtttgatgaactcttccagcccagttgggctatggaccatttcatccatgaaggagaactcctcaaactcaaacttgataact

SEQ ID NO: 49228 - DNA, 257 bp, Glycine max
  unsure (1)..(257): unsure at all n locations; Clone ID: 701136809H1
gngaatttactccaagcctggttttgccaatcttaacaacaatattaacctgantatcaatcctaagggacacaagttcaaggatgaagatgagctttttcacccatccaaaccttccaagaaannnnnnnnnnnnnnnnnnnngcatgggggcaacaccaataacgatgataacagcaaggattccaaggctgctggcgacaagagattcaaaacgctgcccccagcagagtctcttcctaggaatgaaaccattg

SEQ ID NO: 49229 - DNA, 262 bp, Glycine max
  Clone ID: 701136810H1
gtaaggaggaaagagtggagagacggagattggaaagggagagaagtggtaaattagtccgtgatccaaaagcgatatcatagatcatatctgcatactacggtcaatttggccatgaaattcatcaaattcccatctcagttttctagtcccaaagctcagtcctcatagtcattggcttccatgcaagatctgaccacagagaatttcacactcctcctttttacacttccctcacccctggctcttccaaccccctttt

SEQ ID NO: 49230 - DNA, 264 bp, Glycine max
  unsure (1)..(264): unsure at all n locations; Clone ID: 701136811H1
ttttttcttcccttttctctttctccggcgacgatctcagattccggccactcctctcgccggcgagcccttactacttccctcctccgtcgagccctctccgattcgaatcgttcccagcctcgcaccaccatgaatcccgaatacgattatntgttcaagcttttgctgattggagattctggtgtaggcaagtcatgtcttctcctgaggtttgctgctgatttcataccttgacagctatatcagtaccattgggagtgg

SEQ ID NO: 49231 - DNA, 133 bp, Glycine max
  unsure (1)..(133): unsure at all n locations; Clone ID: 701136812H1
agaagattaaggntcagatagtaaatgaatgtcaaacatntacgatctgtaacccttttgtatttctgaacaaaaggttcaagcacaagggttcgtttgtatttatcaacatatttgtaattgtgcctacatg

SEQ ID NO: 49232 - DNA, 266 bp, Glycine max
  unsure (1)..(266): unsure at all n locations; Clone ID: 701136813H1
aaccctaacccgacgccaccattcatccgatccaatgagttcgagaggngccagcgcgctgctatctcgagccagcaggattacgctcgaagcttcaaacggcgctggaagccaccgttttggaggtggacnacgtgtcgtaccagcacgcgggccacgccgccgtgaagggaagttccgacaaagaaacccacttcnacgtgaagatcgtatcgcccaagttcgagggccagagcctcgtcaaacgacaccgtctcgtctacgac

SEQ ID NO: 49233 - DNA, 266 bp, Glycine max
  unsure (1)..(266): unsure at all n locations; Clone ID: 701136814H1
gtttatcgtgaggagaatatgaagttgtttgtnttctntgttgctgcagtagttttngtagcatggccatgccatggcgcaggctaccaaaggttccctctccgaatgaaaactggctatggtgagcgttcttcggaggtaaaatgcgcannttttaggcttgctgtggaagcacacaacatccgagntcntaaaaccattcctgaagagtgcgttgaaccaacaaaggactacattaatggcgaacaatttagatcagactctaa

SEQ ID NO: 49234 - DNA, 269 bp, Glycine max
  unsure (1)..(269): unsure at all n locations; Clone ID: 701136815H1
gatctccttgttcctatactactganttgataatgtttcatttattaggagtttttcactcttatttatatcatttgattttnctgtcacttctcttatttgattatttcatgttgctatctagtgaagttttcccggtcctggtcttgtatttgtcttcctcaganataaatacctacatgtttaacttattttcaggggacaagctgagaaagaatttaaagtagaggtagaagcaattggtcgagtgcgacacaaaaatcttgttt

SEQ ID NO: 49235 - DNA, 270 bp, Glycine max
  unsure (1)..(270): unsure at all n locations; Clone ID: 701136816H1
gagaatcttattgtcaaggagttttgatggttcattgaaggtttgggatctgcgcaaaacaaaagaaccattaaaagtatttgaggatctgccaaatcactatgcacaaacaaatattgccttcagtcctgatgagcgactctttttgactggaacatctgtngaaagggagagcatgacaggaggtttattgtgcttctttgatagagtaaatcttgagcttgtttcaaaagttggcatatcacccacttgtagtgttgttcagtgttc

SEQ ID NO: 49236 - DNA, 263 bp, Glycine max
  unsure (1)..(263): unsure at all n locations; Clone ID: 701136817H1
ctcatcttaagcattgtggcagacctgagtgagcattttttgagtggaaaatatgagcnccagtggctcctcaatgagttctggtagtggatcttctagaaggacatttgagtttggaaggacccatgtggtcagacctaaagggaaacaccaggcaactatagtttggctacatggccttggtgataatggctcaagctggtcccaactcttggaaactcttcctcttccaaatattaaatggatttgcccaactgctccta

SEQ ID NO: 49237 - DNA, 264 bp, Glycine max
  unsure (1)..(264): unsure at all n locations; Clone ID: 701136818H1
gcttggtgatgtccctttctgttctcttcactcttggtcttgcgagagaaagccatgccancgnacgaagatttttggcatgctgtttggccaaacactcccattccaagttcattgcgagatcttctaaagcctggccctgcaagtgttgaaatcgatgatcaccctatgcaaattgaagaaacacagtncccgaaaaccttcttctataaagaagaccttcatccaggcnaaacaatgaaagtacaattcagcaagcctccc

SEQ ID NO: 49238 - DNA, 261 bp, Glycine max
  Clone ID: 701136819H1
tgggttcttcttcttctatgtggacggtgtgtgtgattttggcatcactggcctctgcagcactctgtgccaacccacgcaggccagtggatgtacaatttggccgaaactacgtgcccacatgggcctttgatcacatcaaatatttcaatggtggttctgacattcagcttcatcttgacaagtacactggtactggcttccagtccaaagggtcttacttgtttggtcacttcagcatgtacataaagatggttcctg

SEQ ID NO: 49239 - DNA, 96 bp, Glycine max
  unsure (1)..(96): unsure at all n locations; Clone ID: 701136822H1
cattcttccttcttctgcttacaccattcattccgagcattcggtnttgaatcttttgaagcgaaantggccagtnggagtccntttggcttgcng

SEQ ID NO: 49240 - DNA, 261 bp, Glycine max
  unsure (1)..(261): unsure at all n locations; Clone ID: 701136824H1
gttcattctccgccgtgtggagagcggagagagaccaccaaccggcgttgacgtggcggtgaagcaggtcttcctctccaaactcaaacctcgcctcaaggcatgtttggattgcganatcaatttcttgtcctccgttaaccaccccaatattattcgccttcttcacttcttccaggatgatggatgtgtgtacctggtcctggagttttgtgctggagggaatcttgcttcttatattcagaatcatgggagagtcag

SEQ ID NO: 49241 - DNA, 259 bp, Glycine max
  Clone ID: 701136826H1
acctatcagtggactgctcattttgtctaagatattctttgcaggggtctctttgtttgcagccattggctttcttctctatggtggaagactattcttaatgctacagcgctttcctgttgaatccaaagggcgacgtaagaagctgcaagaggttggctatgtgacaaccatatgttttttatgttttcttgtcagatgcattatgatgtgttttaatgcatttgataaaaatgcggaccttgatgtcttggatcat

SEQ ID NO: 49242 - DNA, 262 bp, Glycine max
  unsure (1)..(262): unsure at all n locations; Clone ID: 701136827H1
gagactccaggcagctcttggtgaacaaacaganattacaaaattcagccaacaggagtatgaaagacttcaaaatgagaaagtgttatgcagaatttgttttgagggagagattaacgttgtattgctcccatgtaggcatcgtgtcctttgcagcacttgctcacagaagcgtaagaagtgccctatttgccgtgattctattgctgagcgtctgcctgtatatgatgtttagatgtnaacttggtcaactttttttgtg

SEQ ID NO: 49243 - DNA, 225 bp, Glycine max
  Clone ID: 701136829H1
gttgcagtgtgttgtattgtttcttagtgcacttttttttggcatcaaagaggttaaatccatggattctgattatggtattcccagggaactctcagatcttcaaaagattcggtcgttgtaccagccagagcttcctccttgtctccagggaaccactgtgagggttgaatttggtgatgcaaccaccactgctgaccccactgatgcatcaccattagcagg

SEQ ID NO: 49244 - DNA, 268 bp, Glycine max
  unsure (1)..(268): unsure at all n locations; Clone ID: 701136830H1
gaacttgattacttgaacattccctatgacagatgaggtggttcttctggatttctggccaagtccatttgggatgagggtcaggattgcacttgctgaaaagggtatcgaatatgagtacaaagaagaggacttgaggaacaagagtcctcttctcttacaaatgaacccggttcacaagaagattccggttctcanccacaatggcaaacccatttccgaatccctacattgctgttcagtacattgaggaggtttggaatgacag

SEQ ID NO: 49245 - DNA, 268 bp, Glycine max
  Clone ID: 701136831H1
ttggctccaccagaagttctaattgatttagctgcacagcaacaacatgaggccgagcttcttgcagctgctagtcagccccttcctgacgatgatgatgaatcttttgagtaaaattatgccttttgagtcgtgctactgcttatgctacagtatgtattttggggggtgtaatgttgacagttttggatgccggatttgagtgtcagaaatttaatcattttgctttaatcttaaaaaaatctcccaatagtttgacatatccttg

SEQ ID NO: 49246 - DNA, 272 bp, Glycine max
  Clone ID: 701136832H1
cagagactccataacccgaaaatgcctttcaagaggtacgttgagattggaagggttgctcagatcaactatggcaaagagtatgggaggctcgtggttattgtcgatgtcattgaccagaatagggctcttgttgatgctcctgacatggtgaggtcccaagtgaacttcaagaggctatcactcactgacatcaagatcgatattaagaggatccccaagaagaaggatctcattcaagccatggaggctgctgatgttaagaacagatg

SEQ ID NO: 49247 - DNA, 266 bp, Glycine max
  unsure (1)..(266): unsure at all n locations; Clone ID: 701136833H1
gccaacaccaacagctgcacctacacctgcttcttctcctgcaacctcaccagtgcccttccgctagttctccancagcaccaggcacagccggacccgctcccgganncgcaggtngcgccgagccaccaccgccaccctccgccgcattctccgccagcaaggccttcattgctggctccgcactctctggaatcttcgtagccntggtcttggcttaaaaantttcgagagaagcattgtcnttgatgattcgngccacgtgg

SEQ ID NO: 49248 - DNA, 262 bp, Glycine max
  unsure (1)..(262): unsure at all n locations; Clone ID: 701136834H1
anccccacgaccgcatcatggggcnggntctncccnccggcggtcaccntcacccannggtactacaccttncgtgcggnaagnagatctccgncacctccatttncttcgagancntcccttacaaagtaaantccancaccggctacatcnactacggccgcttggagnaaaaagccctagacttcaggcccaaattgataatctgcngtggcagcgctaccctcnggattgggantagnaacgcttcagggnaattgcg

SEQ ID NO: 49249 - DNA, 261 bp, Glycine max
  unsure (1)..(261): unsure at all n locations; Clone ID: 701136839H1
gcnacgtgagcngttcgctgcccgcnacgtcgtgagacgtccactganccttaccatttantggaaggcganananagannaggacagaggcgaaggagaganaaagagaaagaggaagaggagaggaggaagaangagnnnnnnnnnnnnnnnnnnnnnnnnnnnnnnnnnnnnaganggaagaagggagcggtgacgaattcttgggggaatatggtgttattagagaaactgatgtgtggaccaaacnaccngagttc

SEQ ID NO: 49250 - DNA, 261 bp, Glycine max
  unsure (1)..(261): unsure at all n locations; Clone ID: 701136840H1
ggttgctttagtctccgcaattttctgcttgcttcttcacttttttttttcctcngtctcctcctcaancttcattgtcctgttctttcccttggngacaaaccaagactaacacacacagaacatagcttgtgttggtgaggtgagaagataaagaaagaatggcatttgcaggaacaacacagaagtgtatggcctgtgacaaaaccgtttatctggttgataagttgaccgcggataaccgagttttccacaaagctt

SEQ ID NO: 49251 - DNA, 261 bp, Glycine max
  unsure (1)..(261): unsure at all n locations; Clone ID: 701136841H1
ctgngattgacgctaaaagtaggcatgactatatcaacttttgnnatgtagtgtcgtttgataccacctatgttngaaacaaatataagatgcctcttgcattttttgttggagttaacnngcactaccaatttacattacttggntgtgccctgatatcagacgaaagtgctgccacttttncttggctattttggncgtggctganaggagttggtggtcaagttccaaaagtgntcagtacgctggtcanagaatcag

SEQ ID NO: 49252 - DNA, 263 bp, Glycine max
  unsure (1)..(263): unsure at all n locations; Clone ID: 701136845H1
aaaaaaacatcaaaattaanagangcaagcatgggggaatccaatgtcatgaccaagactgaggatggtgcttgtctgtactgcaatgctgcttagtactaatctagtgtaccctgcagtactgaatgctgctattgagctcaacttgtttgagatcattgntaaggcaacaccagctggttcttttatgtcatcccatgaaattgcttctaagctcccaacacaacaccctganntgcctaataggcttgaccgcatgctgc

SEQ ID NO: 49253 - DNA, 266 bp, Glycine max
  unsure (1)..(266): unsure at all n locations; Clone ID: 701136846H1
gnactgcaacaatggtgccgcaacccattttgcatctaacccttttgtcattaatantctctctgaccactctttccttggtcgatgccgccgatcccacatttggcntcacccctcttggattatctagtagctcaaacttgcaaatccaaaagccttacgacgttgcagtcaacgagcgctacagtcttncaaatggagtgcacagattttgggtatactccacggacaagcctcatatgcaaggcagcaatacgaagccacga

SEQ ID NO: 49254 - DNA, 264 bp, Glycine max
  unsure (1)..(264): unsure at all n locations; Clone ID: 701136847H1
gttggggtgctgaattgtgaggttctggctgttctgattgccttggcttcctccgggacagcggtngcgcgtganaatgcggtcggttgtttgtcgaatttgactaattcgggttcgtcggaggaggccgatggtttgttgaatttgagggttatggtggtgaaaganggtggagttgagtgtttgaagaattactgggattcagggaatcaaattcagagtcttgaagtggctgtgnagatgctgcggcatttggctgaaagt

SEQ ID NO: 49255 - DNA, 269 bp, Glycine max
  Clone ID: 701136848H1
ctggaagcttcctttggccggagaagaagacggtgtcgtttgagacttgggggagaggagaatgacagagttgagcagcagagaggtggaatacataaggagacaccacagcaaggcagtagaggacaatcagtgtgcctctgctctcgttaagcacataagggccccacttcctctcgtaattccctttgcatcattaagtaattaagtaattattatattattaattactttatgatttgtaggtgtggtcgttggtgaggagattt

SEQ ID NO: 49256 - DNA, 262 bp, Glycine max
  unsure (1)..(262): unsure at all n locations; Clone ID: 701136856H1
ctatattcttatatatcatcaccaaacaacnaanccatataccaccaaattnanttgnctttctcccacntcanattaacatcattccctatgacngatcctcagtccantttgtnccatgantggttcaacttcatgctcctccaccctcactactcctcttctcaatccaattacccttttgctaataattactcaaacaacaacaggtttggaattcaattacgacaaggagcagcctcntcttcntcttcntctttct

SEQ ID NO: 49257 - DNA, 258 bp, Glycine max
  Clone ID: 701136858H1
ccaacctctattttacacgagtctctcatactatgatactatagctacacttcccactgtgtctcagggtctgtgacacacacagactcacttcaagttcccagcttttgccatttttcccactgtttattgagaagaactgcagaacatggcacagattttggctccctctacgcaatggcagatgagaatctcaaaatcctctcccaatgcaactcccattacatcaaacatgtggagttcttattgtggaaacaa

SEQ ID NO: 49258 - DNA, 267 bp, Glycine max
  unsure (1)..(267): unsure at all n locations; Clone ID: 701136863H1
ctgaacctcctccagctaatgatccagcaaaaccacctgcaaaggcacaagtngtgggttggccaccagttaggtcatttagaaagaacatagttcaaaggaacagcaatgaagaagaggcagagaagagcacgaagaatgctttcgtgaaggtgagcatggatggtgcaccgtatctacgaaaggtggactaaagttgtacaagagctaccaggagctgtcagatgcgctggctaagatgttccagttccttcacgattgaaaagt

SEQ ID NO: 49259 - DNA, 271 bp, Glycine max
  Clone ID: 701136864H1
gtcctcacctgatcctctttccactgccatttccatccgtcaggcgtgcattgagtatggtttcttttaccttgtgaaccatggcgtggagaatgacttggtcaaagcctttgatgagagtaagaggttcttctcacttccaccaggagagaaaatgaagttggcccgcaaggaatttagaggttatactcctcaggatcctactttaggcctccatggtgattcaaaagagagctattatattggtcctatggcggattcagcaagtgtt

SEQ ID NO: 49260 - DNA, 255 bp, Glycine max
  unsure (1)..(255): unsure at all n locations; Clone ID: 701136868H1
gaaaatgaaggtccttgttttcttcgttgctacaattttggtagcatggcaatgccatgcgtacgatatgttccctctccgaatgaacactggctatggtgcccgtactccggaggtgaaatgcgcaagttggaggcttgctgtggaagcacacaacatctntggctttgagaccgcgcctgaagagtgcgttgaagcaacaaaggaatacatccatggcgaacaatatagatcagactccaaaacagtaaccaa

SEQ ID NO: 49261 - DNA, 259 bp, Glycine max
  unsure (1)..(259): unsure at all n locations; Clone ID: 701136872H1
ctctccaccctcccataattcnaaaccccaaaanaacctcttttggccataggctagccctcactatggcaccaccatttcccttcctaatgacccttctacttgctccctttctattctcctccattgcttcctcttactcattcaaagatatccaatcatggtgcaaccaaaccccttaccctcagccatgtgagtactacttgaccaaccatgccttcaacaaacccatcaaaagcaaatccgatttcctcaaagt

SEQ ID NO: 49262 - DNA, 257 bp, Glycine max
  unsure (1)..(257): unsure at all n locations; Clone ID: 701136874H1
gtgggggtcttcaggttctcaagggtggtaacaagtgggtcactgntcagcctctgtcagatgctatccttgttctattggctgancaaactgagattataaccaatggaaagtacaggagctgtgagcatagggcaatcactaatcctgatagagcaaggctctctgtggcaacatttcatgaccctgctaagacagtcaagatttcccctgcttctgaactgataaacgactcatcactagctaantaccgtgat

SEQ ID NO: 49263 - DNA, 255 bp, Glycine max
  unsure (1)..(255): unsure at all n locations; Clone ID: 701136875H1
ttctcaccatctcantcatgggcctgctatcttgttttangtctaccgtcctgagaaaatgttccaaaggaagctctggcatgtcaagattcctgtatacgaacaattttcaacgaaacttgatttcgtctggtggcnatgantcgtattatgggtattttaacaggagatcatacacttcactttatatgggaactggaactgtgggtnnnnntacaagtgctagaatcagggtgccaaatgtaggatgtgaag

SEQ ID NO: 49264 - DNA, 259 bp, Glycine max
  unsure (1)..(259): unsure at all n locations; Clone ID: 701136877H1
cgaacatggaccgcgaaccatccactcaacccatttcaaaacttgagtttgaatttnagagaaggaaattgaccaaagatgatgtaaganagttgatttatcgagagattttggagtatcatccccaaatgctccaggaatatcttcgtggtggagatcaaactagcttcatgtatccaagtggggtcgatcggttcaagcgacagtttgcacatcttgaggagcatatggccaaggtgaacgaagcactccaccattg

SEQ ID NO: 49265 - DNA, 267 bp, Glycine max
  Clone ID: 701136880H1
caccattgttgttcctttcaagatcacttgcacagaacaaaacaagggtgaagtctataaactttctcctgcttctgtctctactagcctttgttccctcctgtcactgcaaaaagaaaataggaggttacctctaccctcaattttacgacggttcatgccccagagctcaagagattgtccaatccatcgttgccaaggctgtggcaaaagaaccccgcatggctgcttcgttgctcagactacatttccatgattgttttgtca

SEQ ID NO: 49266 - DNA, 257 bp, Glycine max
  unsure (1)..(257): unsure at all n locations; Clone ID: 701136881H1
cgaatattccctgtggacatgggcagtgcctctttcagtttcttggtgaagttncnnagggtagctattcagttggaatgtgaggagttggagagatctgaactgattaggagaataggcatgtgccttgaggaggctaaagtgtctgatttattaattcgtnccccagttggtgacacaattttttatgcngatattgtgcaaaggctagtggaagannttgtagcatgtggtcaacaggttcagacggactctct

SEQ ID NO: 49267 - DNA, 256 bp, Glycine max
  Clone ID: 701136884H1
taaggggtgccctgagatcacattgaacaatggtgaaggctgtggccgttcttggcagcagtgagggtgtcactggaactattcacttcgttcaggagggaagtggtccaaccaccgtaactggatctcttgctggtcttaagcctggtctccatggtttccatgtccatgccttgggggacactaccaatggttgcctctcaactggatcacatttcaatcctaataacaaggagcatggtgcccctgaggatga

SEQ ID NO: 49268 - DNA, 50 bp, Glycine max
  unsure (1)..(50): unsure at all n locations; Clone ID: 701136886H1
ctcagtgtgggnaancgattnganaccattaccatgttgnttggataant

SEQ ID NO: 49269 - DNA, 258 bp, Glycine max
  unsure (1)..(258): unsure at all n locations; Clone ID: 701136887H1
cgaagagaagagaaaaattaagatggaggggaaggagcaggatgtntcgctgggagcgaacaagttcccggagagacagccgattgggacggcggcgcagagccaagacgacggcaaggactaccaggagccggcgccggcgccactggttgacccgacggagtttacgtcatggtccttttacagaggcagggatagcagagtttgtggccacttttctgtttctatacattcactgtcttaaccgtctgggagtcg

SEQ ID NO: 49270 - DNA, 261 bp, Glycine max
  unsure (1)..(261): unsure at all n locations; Clone ID: 701136888H1
aaacatttgtgattgtgtcaaatctgtatgagtngcnncnatccncacanaccccangngcttgaggtcttngtnctngctctcaacagtcacctctaactcggtctttncccattgctttgncctgtgtcggaactagctcgtagctaaaatttaaggnatggnganttcaagttatgtttaagatanagatggaggaagaacaaagacctcaagcacctggggtttgtgaggattgctgcnattcaaacatttgtgant

SEQ ID NO: 49271 - DNA, 258 bp, Glycine max
  unsure (1)..(258): unsure at all n locations; Clone ID: 701136890H1
ctcttctccacctcacccnttctctctcttttnctctctgttgcttcacaataccaacancaccacntggntccgggtcacactacttgcccaggatcaggacccttctcatgcaacaaccgnttcaagtgttnttcgcctttcccaaacaacaactatanggaactaaaatcgaccctttggctagataatcacaccancatcaaaaaaatcgttttttgctttgtgggtattgtttgtntgnttnttttggngnng

SEQ ID NO: 49272 - DNA, 230 bp, Glycine max
  unsure (1)..(230): unsure at all n locations; Clone ID: 701136894H1
ctatcancgagtgagagtgagtgagtggttctcttgcagcaacaaggtttantgacaccaaacagacggganatgggtcgtggggtcagtgctggtggtggacagagttccttggattatctctttggcagtggggtacctgccagcagtgcaaatggtgctcgcactcaaaatgcaagtgctccttcaccancggttgataagctaagtccagcaccagcnccagcacc

SEQ ID NO: 49273 - DNA, 265 bp, Glycine max
  unsure (1)..(265): unsure at all n locations; Clone ID: 701136895H1
ctcctatttccagcgtcttttgaaggttaggagggatttaagacttctgcaatcggcaaacatggaggagcttgtatcatcatgtctccttgttatcaaaggagatagaccaaaacagaagcttcatcttttagggngcttaaaaaggagaaaatgtgatggtgataaacataattttatggagcgtctgttaggagctgcacgcttactagctgagatggttgaacctatactgaaggctgcttctgaggtatctgtgttgttt

SEQ ID NO: 49274 - DNA, 269 bp, Glycine max
  unsure (1)..(269): unsure at all n locations; Clone ID: 701136896H1
gcataccttaggtcttccgaattcgaagttaatttgcaagatggctaaggaaaaggctcagatcaacattgtggtggttggtcatgtggaccctgaggaggcaaccaccattaacgagctgaagaagcctgttgtggagaaagaagctccagggcatgccatatgagggcatgcacgtacggcctcggaggggaaccagaaaattatgttaacaaaataatctggaaccctaatgtatcngtgtcatcatcagtgtgtagtttaagcta

SEQ ID NO: 49275 - DNA, 283 bp, Glycine max
  unsure (1)..(283): unsure at all n locations; Clone ID: 701136901H1
acactacccactcaactcactccaaccatggcgtcgtggtggtgctcctctccctccgccnnnnnnnnnnnnnnnnnnnnnnnnnnncgccacttctctctcctttctcacacttcccaatttcgcatccaaaccctcacattcccaccttcctcctttactcgnttaacacggttcaacttgngctccgattagggttccatgctccaaaaaaancgcntgggaaacgnttttcngggganggggtgnttnggggggaaaaggccnaggngggggantcttt

SEQ ID NO: 49276 - DNA, 277 bp, Glycine max
  unsure (1)..(277): unsure at all n locations; Clone ID: 701136902H1
gtgataacacactaacaccaccacttcatcaactttacttgacaacaatattgtaaaactcaaaatctagtttcatactttttttcttcttcttgaaatggctctccaggctgcttctcttgttcctgcttctttctcggttcttaaagagggaaagagtggtgtgtctctcaaggactccacctggtcnggntttnattttangaccctataaagntaanttangnnttccgaattggggtgcaagnggaattcgaanaaagccctggcngtgggg

SEQ ID NO: 49277 - DNA, 279 bp, Glycine max
  Clone ID: 701136903H1
gcatgcagccactgcttgagttcctcaggcttcacagttataagggaaagaccatgatgttgaatgacaaagttcaaagcctggattctctccaacatgttttgagaaaagcagaagagtatctgatttcagttgctcctgaaacaccctactcggaattcgagaacagattccgggagattggtctggagagggggtggggtgacactgccgagcgtgtcctcgagatgatccagcttctcctggaccttcttgaggcacctgacccttgcaccctcg

SEQ ID NO: 49278 - DNA, 259 bp, Glycine max
  unsure (1)..(259): unsure at all n locations; Clone ID: 701136904H1
catttccttcacttccatttcatgacnanaaancccttacttnattcttcgaaaaggaaggancttgggacttgtttctctcagagatggcgttgcctaaggttgatttcgaggttggagctgatggggttgctgtcatcactatgtgcaacccacccgtcaatgctttggccattccaattatcatggggttgaagaacagatttgatgaggcagctaggaggaatgatgtgaaagctatagttttgactggcaaagg

SEQ ID NO: 49279 - DNA, 274 bp, Glycine max
  unsure (1)..(274): unsure at all n locations; Clone ID: 701136905H1
gaagnccctcctgaatctcttgattttaactactggaggttggcattatcagacactgaatccacaaattcaagatccgtaaacagtgtcagctcttgcaagttgaagggtgtcaaagttgttcctgtagaagagagtggtatctcagagcaaacagggggaaatgcaactgaaagtttttctgcacaagaggaagataatgaacggtatcttagttttcttaaagtcttgacagaaggaaacaattggaagaggaatgtagatggttgaacat

SEQ ID NO: 49280 - DNA, 274 bp, Glycine max
  Clone ID: 701136906H1
caactccactcttagctgccattggtttttcttcttccatttctcttcctttctaagcttttttcgattacccatttggagattctgtcctaatggctcttgctccttccaaagtttcctccttttccgggttttctcccaaacccagtgttggggatgctctgaaaaacccaacttgctctgtttctctgagctttgcgaatgtgaaacttggaagcagaaaccttagggtttgtgcctcaactgtgcctctctcaggggtgattttcgaacc

SEQ ID NO: 49281 - DNA, 272 bp, Glycine max
  Clone ID: 701136907H1
gattattgtgttgggctaagcagacaattgaatggatcaattataccatcagaacgtccagatcatatgatgtttgaggtatggaacccactaggaatagttggtgtaatcactgctttcaactttccatgcgctgttctaggatggaatgcttgcattgctttagtctgtggtaactgtgttgtgtggaagggtgctccaacaactcctttgataactattgctgtgacaaagctagtagctgaagttcttgagaggaacaaattacctgg

SEQ ID NO: 49282 - DNA, 245 bp, Glycine max
  Clone ID: 701136908H1
gagaaagaaaagaatggcaaagttaataaaattctttgagttgaacacaggggccaagattccttctgttgggttaggcacttggcaagctgagcctggtgttgtagccaaagctgtcaccacagccattctggttggatacaggcatattgattgtgctcaagcgtataacaatcaagcagagattggttctgctcttaagaagctttttgatgatggtgtggtgaagcgtgaggacttatgga

SEQ ID NO: 49283 - DNA, 274 bp, Glycine max
  Clone ID: 701136909H1
ccaaagaaggactttgatgcagagagagaaaaagaattagaagattataaaaaatctcgtccacctgtgggttcaaatcaccagaatagctcaaatgtagaagaagactaccctaaaggcttaattattgccttcaaattaaagagcatttcagaagaaattccgtctgaacaaaatggtgttgatcaacaagccaaggacaatagtgttgtctccaaaacagatgaaaacccccgctctgaaattacttctggggaaaatgatcaaaaggtaa

SEQ ID NO: 49284 - DNA, 269 bp, Glycine max
  Clone ID: 701136911H1
aggatttaaaatcactgggaggatcagatgattcatccaaacagacagtgatcatgtcttcatgtcaagatagtatgattaaatctccaggacaagatcttgacacggttaaaaatcctgatgctcatgattcttctgtaaaggttgttaaatcttctgaaattacctcatcgaaaattgatgaagtttgcaataactcggggaatgaaactttacttggcacaacagtgcctgttactggggtgatacaggatcaacattcaggtggt

SEQ ID NO: 49285 - DNA, 270 bp, Glycine max
  unsure (1)..(270): unsure at all n locations; Clone ID: 701136912H1
aggattnnaaatcactgggaggatcagangattcatccaaacagacagtgatcatgtcatcatgtcaagatagtatnattaaanctcacaggacaagatcttnacacggttaaaaatcctgatgcncatnattcttctgtaaaggttgttnaatcttctgaaattacctcatcgaaaattgatgaagtttgcancaactcgggnnatgaaactttacttggcannacagtgcctgttactggggtgatacaggatcaacattcaggtggt

SEQ ID NO: 49286 - DNA, 270 bp, Glycine max
  Clone ID: 701136914H1
ccaaacaaaccaagcaacattataatagaaagaggacacaagagaaagaagggggagctatagccataaggagaaaaactttcaaagaagtgaaagcaaaaaagagttgttcttttcctttctgctgataagctgtgtgagtgagttcattgacaagcctgaaatgacaactatgctgacaaatgagcatggtctgagtttgaacctcaaggagactgagctttgcctcggtttgcctggcgggggctctgaagtggaaactccaagggc

SEQ ID NO: 49287 - DNA, 275 bp, Glycine max
  unsure (1)..(275): unsure at all n locations; Clone ID: 701136915H1
aattgntttcttactatcataagcaagctcttcctttgttagttagacttcactttgaagcaaccaattctgaattctgagtgtgcaatgcaatgcatgcataaaaggcgcgcataaagctagctataattggtattcgtctgcctgtgttattggcgtttcgcacacataaagctgnccagttgccatggattctaagaatgttgttgcttttcaagttgtaacattttgcatatgcttggctgtggcaaattcggttgagttcagttacccct

SEQ ID NO: 49288 - DNA, 275 bp, Glycine max
  Clone ID: 701136916H1
ctagggaggtccccatatccctcttaagactggaagaagggatggtagaaggagcagagctgatgtggttgagcagttcctcccagaccacaatgagtccatttctgcagttcttgacaagtttggtgccatgggaattgacacccctggcgtcgttgcactgcttggagcacacagtgttggtcgaacccattgtgtgaagttggtgcaccgtttgtacccagagattgatccagctctgaaccctgaccacgtccctcacattctgaagaagt

SEQ ID NO: 49289 - DNA, 274 bp, Glycine max
  unsure (1)..(274): unsure at all n locations; Clone ID: 701136917H1
gagcagccactagtcctcaagtaccacaacggccagctcctgaagggccgcatcaccgtcaatctcatctggtacggcaccttcaccccgatccaacggtccataatcgtggacttcataaactcgttaagcagcgcgccaaacgcgcctctcccctcgaccgcaagtggtgggaaaccacggagagtacaaggtgggaagaggatcccntgggncccttctagggntgcagttctaaaccgggttanangtnngggaaaatcccaaggagggt

SEQ ID NO: 49290 - DNA, 276 bp, Glycine max
  unsure (1)..(276): unsure at all n locations; Clone ID: 701136918H1
gggagtctgggtnaccatttaaacctgctgcagctttcaaaggtgcatatgaaaatttgggcattgatgctagtggtggaaagtcagtaacgatgcgnaagatatggcaccttgttcagatgctgatgggtgaggaatcagccgtgcaacgtgtttcaaaaaggatgtcattgattattggtgcaagacgccaccttgaatggggacatgagaaatacatcatggataccatacaaagtcatcctgcacaagctgctcttggtggtggtgttggga

SEQ ID NO: 49291 - DNA, 275 bp, Glycine max
  unsure (1)..(275): unsure at all n locations; Clone ID: 701136920H1
ctggattnngttacatcaatgacttggtttnangaatcttgnagcttcttaaanatcatgctcgtnttttgtatattgatatagatgtgcaccatggtgatggtgtanaagaagccttctacttcactgacagggtgatgactgtcagttttcacaagtacggagatttgttcttcccaggncactggcgatgctaaggagaaagagaaggaaagttttatgccataaatgtcccattgaaggatggaatagatgacagtagcttcactcgactt

SEQ ID NO: 49292 - DNA, 273 bp, Glycine max
  unsure (1)..(273): unsure at all n locations; Clone ID: 701136921H1
aagagaacgggttttgaagaagaagcagttcaattgatcaactcagatttcagggacctaagttctagctgctaatagactcgcccatcatgccatcaaacttggtggcattggctttggagcctcttttttcggattgtttgctgccattgctgctatttatctgttgattttggatcgtacaaactggaaaacaaatattctcacagcactactcattccatacattttcttcagcttgccttcattaattntcgacgtcttcaggggaga

SEQ ID NO: 49293 - DNA, 218 bp, Glycine max
  Clone ID: 701136922H1
tgattgaagaagatgccgatcagaaacatcgccatcggaaggcctgaagaggctactcaccccgacacgttgaaggcggggttggctgagttcatctccaccttgatcttcgtgttcgccggttcaggttccggcatcgcctacaacaagctcaccgacaacggcgccgccactcccgccggcctcatctccgcttccatcgcccatgctttcgccct

SEQ ID NO: 49294 - DNA, 274 bp, Glycine max
  Clone ID: 701136923H1
cataactccacttcaccacccttggtgcaaaacacttgattcccctgcgtttcaaccttgcaaccaaacccttccttcttcccattcaaaattttccttttattgtctccgagacaaacccacgcgttctcaccgccgctactcaaattccgcaagtccacgtaggatgcctcccccgaattcaccccaaccttaaaaataaccgacaacgaatcacaaaccgccacgtcagcaaaacaatctaccttctcagaaacctcccaaacaacgttgc

SEQ ID NO: 49295 - DNA, 124 bp, Glycine max
  Clone ID: 701136924H1
accacctcagcgccgcttaaggaccacaaagttcagatcccaagcttccatggcttgaggtcttcctccgcctctgctctcccccgcaatgccctctcccttccttcatccactcgctctctct

SEQ ID NO: 49296 - DNA, 268 bp, Glycine max
  Clone ID: 701136926H1
gctaagtatcattcaagtgggaaaagctcttccatgactgctatagccttcctgtttatccttctaatcacttatacaggcacaacagatgcacaatccggggtatgttatggaagacttggcaacaacttaccaacccctcaagaagttgtggccctctacaatcaagccaacattcgcaggatgcgaatctacggtccaagcccagaagtcctcgaagcactaagaggttccaacattgagcttttgctagacattccaaatgaca

SEQ ID NO: 49297 - DNA, 267 bp, Glycine max
  unsure (1)..(267): unsure at all n locations; Clone ID: 701136927H1
cttggatttcttctgggacttttcttaatggtcactcatgtcaaggggtatggttttggagnttggaccaatgcacatgccaccttctatggaggtggtgatgcttctgggacaatgggtggggcttgtggttatggaaatctgtatagccaaggttatggaactgatacaacagcactgagcactgctctgttcaacaatggcttgagctgtggtgcatgctatcaaattaaatgtgtgaatgatccacagtggtgccttcctggc

SEQ ID NO: 49298 - DNA, 267 bp, Glycine max
  unsure (1)..(267): unsure at all n locations; Clone ID: 701136928H1
aagcccctttgatagaacagtgatacatacatttgccttttctttcttactcatcacgttcgtttcgtggatccttactcatcacaagtgtgaganaaattatgagttccaaaggtgttggtgaggattgcctgggatgggcagcaagagatgcatccggagttctatcaccttacaaattcagtcgcaggactcttgggaatgaagatgttcatattaaaattacgcactgtggtgtttgcttcgctgatgtagtttggacaagga

SEQ ID NO: 49299 - DNA, 269 bp, Glycine max
  unsure (1)..(269): unsure at all n locations; Clone ID: 701136929H1
ggatatctntggctaaaagattgaatattgtgttattccttctagtagtcaaggggaacaatgaatgcactagcagccaccaacaggaacttnaccgttggcctctaggcttctgggatnggattcaaagcttgagaaaagtttactgattccattcagggaaatcaaggttgaatgtaccatacctaaagatgatggcaccttgcaatcttatgtagggttcagggttcaacatgataatgccagaggccccatgaaaggaggaatca

SEQ ID NO: 49300 - DNA, 270 bp, Glycine max
  Clone ID: 701136930H1
ctaagccactagtcattgcacctggaggcttctttgactcggattggttcaaggaatttataagcaaatctggtaaatctgcagacgtgatcacccaccacatttataaccttgggccaggagttgatgaccacctaactgaaaaaattcttgacccttcctatctggatggagaggctaacacattcagcagcctcaaaggtatacttcaaagttcatcaacctcagtaaaatcatgggttggtgaggcaggaggggcttacaatagtg

SEQ ID NO: 49301 - DNA, 274 bp, Glycine max
  Clone ID: 701136932H1
cagtttccggtgcatctcatcgtcttccaaaatgaacgacgcagatgtctcgaagcaaatccagcagatggtgcgtttcatccgccaggaagctgaggagaaagccaacgagatctctgtatctgccgaagaggaattcaatatcgagaagctgcagttggttgaagccgaaaagaagaagatcaggcaagaatacgaacgcaaagagcgccaagtcgaaattcgcaagaagattgagtactcaatgcagctgaatgcttctcggattaaagtt

SEQ ID NO: 49302 - DNA, 268 bp, Glycine max
  Clone ID: 701136934H1
ctcagatccattcaggggtgaactaatggaagttcttgaaccttttatgaaaagtcctttctcaaccccttctccttcaaattcttgttttctttctacctcttactctccttcccccaacaactactctccctccctatactcaaacgggttatcatccatacccaacaccacccaaaacttaattggtttcgggcaagggcagcccacatctcttgtgggcctgaaccacctaaccccatctcagatctctcagatccaggcccaa

SEQ ID NO: 49303 - DNA, 227 bp, Glycine max
  Clone ID: 701136935H1
tagtgcctccttgccagaagttaaaatggcccaagaaactttcctattcacatctgaatcagtgaacgaggggcaccctgacaagctctgtgaccagatctccgatgctgtgctcgatgcatgcttggagcaggaccctgacagcaaggttgcctgtgaaacctgcaccaagaccaacatggtgatggttttcggagagatcacaaccaaggccaacgtggactatg

SEQ ID NO: 49304 - DNA, 59 bp, Glycine max
  Clone ID: 701136936H1
gccatggttctctccaaaaccacctccgaatgccgacgtctctgtccacacaacatacg

SEQ ID NO: 49305 - DNA, 270 bp, Glycine max
  Clone ID: 701136939H1
tgagcaacttccaacaccatagtgaaatggcttccaaggctgcacttctcttgtgtttcaatgttctcttccttcaccgtggttagctccacatatgtgccatgcaacccaccccccaaaactccaaaacacccacctgtcccaaagccaccttccccaaagcaagcaagttgccccaaagacactattaagtttggtgtgtgtgctgatgtgttaggtttgatcaacgtgcaacttgggaagccaccaaagaccccatgctgcaacctc

SEQ ID NO: 49306 - DNA, 270 bp, Glycine max
  Clone ID: 701136940H1
ctctgttattcaaggatccgtcgaagatttcggcgtatcgagatagaaggttccccgggacgcaagaggagtttgagcacgcgcttctgacctcaaccaccgtttacgtggggaacatgtcgttttacacgacggaggagcaagtttacgagctcttctcgcgtgctggggaaatcaaaaagatcatcatgggcttggacaagaacacaaaaacgccttgcggcttctgtttcgttttatattattctcgtgaagatactgaggatgttt

SEQ ID NO: 49307 - DNA, 267 bp, Glycine max
  Clone ID: 701136941H1
cttcaagcggcattcaaatcacccactttcctcaaggttgaaagagttctgtcaacgttgatatcatgttttgggcatacaaaaatcctccacctgcacacctcttcctgatatcgagtgatataggttttgctggcttattacaccggataagcttgaataattacaatatcttgctcgctgtctcaacgaatgctcctgttctctccacggaagcaactataacgtggcaatggtataaattgcttaagggagaaaatcttattg

SEQ ID NO: 49308 - DNA, 266 bp, Glycine max
  unsure (1)..(266): unsure at all n locations; Clone ID: 701136942H1
gcaagcanncataaaaagnttgatnantgatgtgncttttggtgttctantctgctggaggtttggactcttctttggttgcatccatcacttctcgttacttggccaacacaaaggctgctncngnagtggggatcaaagttacattgcattctgtgtaggccttganggctcancagatntgaangctgcaaaagaggttgctgactatctaggcactgtccaccatgagtttaccaacantgttcaggatggaatagatgcca

SEQ ID NO: 49309 - DNA, 263 bp, Glycine max
  unsure (1)..(263): unsure at all n locations; Clone ID: 701136946H1
ttcatttnaacgagnnaancnctgaagatgggttcttctttntggactttgtgtctaattttggcttcactagccgcttctgcattctgtgcctttccacggaggccagtggangttccattcggcagaaactacgttcccacttgggcntttgatcacatcaaatanttcaatggaggttctgagattcaacttcatcttgacaagtacactggtactggcttccagtccaaagggtcatacttgtttggtcacttcagcag

SEQ ID NO: 49310 - DNA, 270 bp, Glycine max
  unsure (1)..(270): unsure at all n locations; Clone ID: 701136947H1
ctcggctanccattgtttgggcttaagaacacaaacaggagaactgttgatgttattgcatccagactgtatttttacnattcgtatagctatgagcttacaggagatcttgctgaaattcggggcaacctccttgcattgcaccgatttgcgactctccgccatgatgagctggnacaggaaacacttcttaatttgttacttcgaaactaccttcactacaacctatatntcccaggctgagaagttgaggtccaaggctcctcgatt

SEQ ID NO: 49311 - DNA, 269 bp, Glycine max
  Clone ID: 701136948H1
tctctcagcttttcatcttccgatcttaatatacattgactaaaagaaaaataaagggatcaaatttaagttccttgatctaataagatccttgcttttaattgtactactcatgaagagacttggcagttcggatacactgggtgctctcatgacgatttgtccaccaacagacgaacatagtccgaggaacaaccacgtgtatgggaaggagttccagtccatgatggaaggactcgacgaagaagggtgcgtggaagaagcagggc

SEQ ID NO: 49312 - DNA, 250 bp, Glycine max
  unsure (1)..(250): unsure at all n locations; Clone ID: 701136952H1
cgcgcattcacaaataaggttgaaacagggccctgccggaaanagataaataccgtctttcantttccggcgatctcttttttcttccatcaccgttttccggctatccctaatccttaacagaaatgacgacatcaaggcgccttgcggacaggaaggtggagaagtttgagaaaaacatcaccaaaagaggatttgtgccagacacaaccactaaaaaggggaaagactaccctgttggcccagtgct

SEQ ID NO: 49313 - DNA, 265 bp, Glycine max
  Clone ID: 701136955H1
tttagctccaggctgcccagaaaagcagaaagtttctccttcctgttggaatatctttcaattttgtttaatagctgatatatgctgccagtattcagaaataatgcttaaaaggcaagtctaagcagcatgcatcagatggcttgggggagtatcgtattgttccgtgtattctgctcaagagccttgagtcaagtggtattaagttattttaggagctgattgatcacaggatcgaaactgagtccaatttagctttacctat

SEQ ID NO: 49314 - DNA, 269 bp, Glycine max
  unsure (1)..(269): unsure at all n locations; Clone ID: 701136956H1
ggatccctttcgatccgacgactttcgttcgttccttctccttccaagttctaaccatttncccactgtcttcgatttnagggcattaaatctgccatggcagcagcacccgctagagctcgtgccgattacgattacctcatcaagcttcttcttctcggcgacagcggtgtggggaagagttgtctacttttgaggttttctgatggctcattcacaaccagttttatcaccaccattggtatcgattttaagataagaaccattga

SEQ ID NO: 49315 - DNA, 116 bp, Glycine max
  Clone ID: 701136957H1
gatcgattaccgacatgtcgatctccaacactcaactaaagcctctgcttcccaacccatttaatttgagtaatactgagatcgttgaaaaagtttatgtattccacacaacatac

SEQ ID NO: 49316 - DNA, 266 bp, Glycine max
  unsure (1)..(266): unsure at all n locations; Clone ID: 701136959H1
gcttaccantccattggcaaatggtgcntcagtgaatctccatatgtcaaagaaagnagaaaggaagttcatngtaggtcttatgtctctcacacataatgtcnatncnnncaattcaaatgccatgacaatttatcacagagtgcaaagngtccctgctgagttgttaactggatgcttaatggcattaaggttttgcaagagccaatatgaaactgaaagtattgctcagcatggagttgaattgttgtatgcaactatgacaa

SEQ ID NO: 49317 - DNA, 263 bp, Glycine max
  Clone ID: 701136960H1
ttcttcttccgttttcctgaatcggtgtgaacaatggcgacgtacgctgcgatgaaacccaccaagccagggttggaggagtcccaggaacagatccataagataaggatcaccctttcttccaagcacgtcaaaaacctcgagaaggtttgtgcggacttggttcgtggtgcaaaggacaagcgcctcagggttaagggacctgttaggatgcccactaaggttcttcacatcactaccaggaagtccccctgtggtgaagg

SEQ ID NO: 49318 - DNA, 266 bp, Glycine max
  unsure (1)..(266): unsure at all n locations; Clone ID: 701136961H1
ggaaattcntgccaagatgtnatgcaagcacttgcaacgccctgaacaancaannggaggatgaagatgaattggaagatgctcaagttagaaactctgaggacgatncctgagcactatgctaaagtccaatatgcagatgaatcattttcaccagaacccattaaaggagaagntcaagaagccaaagatcaggctggctcattttcaccggaactgtttcatggtgatgaaaatgaggaagctattgaccctgaagaggatcg

SEQ ID NO: 49319 - DNA, 267 bp, Glycine max
  Clone ID: 701136963H1
gattgatgctgtccgaatggtgacccaattaaggggtgaagcccagaagttgaaagacactaatcagggtcttcaagaaaagattaaagatttgaaggctgagaagaatgaacttcgcgatcagaaacagaggctcaaggcagagaaggagaagctggagcagcagctgaaatcattgaatggacagcctagtttcatgcctccccctgctgcaatccctgctgcatttgcggtgcaaggccaagcccacggcaacaagttggtacc

SEQ ID NO: 49320 - DNA, 274 bp, Glycine max
  unsure (1)..(274): unsure at all n locations; Clone ID: 701136965H1
cgaaggcagatttcaagatgaagttcaacattgcgaatcccaccaccggttgtcagaagaagctggagatcgatgatgacctgaagctgcgagcattttgggacaagaggatctcacaagaggttgttggtgatgctctgggtgaggaattcaaaggttatgtcttcaaaatttactggagnttncnaaagcaagggtttccatggancaagggnttttanccccgggggnnncccccntttgncnaaaaanggggaccccctttttcnggggg

SEQ ID NO: 49321 - DNA, 268 bp, Glycine max
  unsure (1)..(268): unsure at all n locations; Clone ID: 701136969H1
agacttnacnacagaatacntcntacttaaagtcaagatgacattaatgcatataatatctgctatatgctagttgtctatactatgtcatggaaagcttgggttacataaganattgactaattatcaccggaaagaacaattttacagtncntgcttggtgcattcaatatttccatttaaaattctctgttcaattttttttatcattttaaagaattacatatctttaactatgttttcctttatctnttngcncaacnacctt

SEQ ID NO: 49322 - DNA, 263 bp, Glycine max
  Clone ID: 701136970H1
ggctgttttgtgcatcaacaaaaccagctcctggacttgcttgcatactctctctgttctttctattcaaagatctgtaaatttatatattatcttttatcatatatagtattagtatagtccacttgtttaaaccacctgtgttgcatattctgaatcctatcatcttgtggctttgatgtctagagcattggaacatgattacatagggttggcagagaatccgtcaatggatggtaaaaactcatcatcactgaacttga

SEQ ID NO: 49323 - DNA, 231 bp, Glycine max
  unsure (1)..(231): unsure at all n locations; Clone ID: 701136971H1
ggatcaattaatttccaatggccgatcanctcaccgaacgnacagatctctgagttcaaggaagcctttagcctcttcgacaaggacggcgatggttgtattaccaccaaggaacttgggactgtgatgcggtcgcttgggcagaacccaactgaggctgagctgcaggacatgataaatgaggttgatgctgatgggaatggtaccattgatttcccagaattcctcaat

SEQ ID NO: 49324 - DNA, 265 bp, Glycine max
  unsure (1)..(265): unsure at all n locations; Clone ID: 701136972H1
ggagctttgaataatcagccctggactgtaccttctgtacaagggcacgcaaacacaccaatgcctcatgcatcgcaccttgtcccaaagcctgccaatgaggctaaatccagtgttgttttacatccttctacagtagacataaaaccaannggaagaagtgagcttcctgaggatctattcactgtaaaatattcaccgttccctgctccagtcccaggttggcaaatgggtccaccacctagcatgggtatctcaattcaat

SEQ ID NO: 49325 - DNA, 262 bp, Glycine max
  unsure (1)..(262): unsure at all n locations; Clone ID: 701136973H1
cctcntcgcactctttcctctctctnnnnntntctctcctcagaaaaancagatacttnnaancaagnaaatcctagggtttctcccntcaanttngttagccatagctctctcttcacttagatnttaaatgtaattcagattcatttcacttcgcatctcctctctcatcaaactttagggctttcctctctctcttccccaaaaccctctcncnagacgatttgcaattcgatcactcgatctcgccatggaatcccgt

SEQ ID NO: 49326 - DNA, 259 bp, Glycine max
  Clone ID: 701136975H1
aagagaactcctatcttgttccctctcttctttcttctttgtgccttcacctcatatctaccttcagccaccgctgatgatgatcatgtgtacgacactgacggcgataagcttcaatacggtgtcaattatttcgtgttgccagtgataagaggaaatggcggtggaatacaagtagcaaaagcaggaaacgaaacttgccctctgactgtggtgcaatctggcaacgagctctctgaggggttaccgataaagattg

SEQ ID NO: 49327 - DNA, 262 bp, Glycine max
  unsure (1)..(262): unsure at all n locations; Clone ID: 701136976H1
aagtgaganagaaaatgatgaagccatcgatgctcagatctcttncactctgcngccaccngcggcgcctcccacctctcccgccgtggctacgcctccgagccggtgccggagcgcaaggtggccgttctaggtgccgccggcgggatcgggcaacccctctcccttctcatgaagctcaaccccctcgttnccagcctctccctctacncatatcgcngaactcncggtgtcgccgccgatgtcagccacataacatanc

SEQ ID NO: 49328 - DNA, 88 bp, Glycine max
  unsure (1)..(88): unsure at all n locations; Clone ID: 701136977H1
caaaaactgaaaaacacgagacccaccgcagtgcatncactncgcgacgtgagatcggncgagaccttccacctncctncaccggctg

SEQ ID NO: 49329 - DNA, 161 bp, Glycine max
  Clone ID: 701136978H1
gacaagggggtgttggatgatgtgataagaaggcttctggaagggaaaggagggaaacaggtgcagctctctgagtccgagatccgtcaactctgcgtcaacgccagacaaatcttcctctctcagccaattcttctcgaccttcgtgctccccatccgcg

SEQ ID NO: 49330 - DNA, 262 bp, Glycine max
  Clone ID: 701136979H1
ttgaagatagatagttagctgacttggctgcccctgagcaggaggaataagatgcctccttacgattgtatgtttctgtttaagccacatattaggaaggaagccgtgatggatttagttgtaagggtgggaaaacatgtgtgcagaagaaatggggttgtcattgatatcaagagtctcggaagagttcagttgggctatggtgtgaaaaagctagatggaagatattatcagggcctgctgatgcaaatgagcatgatgg

SEQ ID NO: 49331 - DNA, 263 bp, Glycine max
  Clone ID: 701136980H1
ccgtagcaaaagctcgtggaattgctagcaatggcgaggatcaaggtttacgagctgaggcagaagacgaaggctgatctgctgaatcaactgaaggacctgaaggcggagttgccttgcttcgtgttgctaaggtcaccggtggtgcccctaacaagctttccaagataaaggtggtgaggttgaacattgcccaggttttgacggtgatttctcagaagcagaaggctgcgttgagggatgcctacaagaataagaagtac

SEQ ID NO: 49332 - DNA, 269 bp, Glycine max
  unsure (1)..(269): unsure at all n locations; Clone ID: 701136981H1
agggttaagcggtgagatttgcgaatctgagaaatggcggattcttctcgggaggagaacgtttacatggcgaaattggcggagcaggccgagcgttacgaggagatggttnagttcatggagaaggttgcaaagaccgtggaggttgaggagttgacggtggangagaggaatctcctcctctgtggcttacaaaaacgtgattggtccaagagggctcggggggnaaatccccccattgncccaaaaggggnnncccngnaattggc

SEQ ID NO: 49333 - DNA, 267 bp, Glycine max
  unsure (1)..(267): unsure at all n locations; Clone ID: 701136982H1
ctcttgtggaaatctcacgtgagggtacaagtaattagattggtttgtgctctccttttggtgacactgcngagctcagaggtagctgagagcagaaaagccaaaactgctagaacttcctttgagtacaaagctataaattgcagggctcatagtgcttcattgattgattttggtggtgttggagatggaaatacatcaaatacaaaggcttttcagtctgcaatcagtcatctgagtcagtatgcttttaaaggaggggctcag

SEQ ID NO: 49334 - DNA, 265 bp, Glycine max
  unsure (1)..(265): unsure at all n locations; Clone ID: 701136983H1
gggatggtaaggactgtgggctggaaacatgatcaatatgcttcgtatagttccancacaggccattnannctaggcacatttgagtgtgtcaaacgggctatgacatccctgcatgagaaatgggaaagcaatgaataccccaagttgcagataggtcccatcaatttcatcnntctttatcttggatttcaccagttgccatcgccggtgcagctgctggaatgctagcactcttgtatgccatccccttgaagttttgaagg

SEQ ID NO: 49335 - DNA, 257 bp, Glycine max
  unsure (1)..(257): unsure at all n locations; Clone ID: 701136984H1
gggaaaatttggatattaataggtatgtgctgaaaaatggtactactagtgaganncatcataaaacacttgaacaaggaacaagatgctgatcaaagcaacttccgtgattcanccacctctgcagagttggaagttcaggagaagatgcccttgcttgagtggtttgccaatgagtacaaaaaatttggatgctccttggaatttgtgaccaacaaatctcaagaggggtcacaattctgcagagggtttggngg

SEQ ID NO: 49336 - DNA, 263 bp, Glycine max
  unsure (1)..(263): unsure at all n locations; Clone ID: 701136985H1
accgtaaccactgctccttanggatcatggaagtnccccatcaccagcgacgatntctccggcgccaccaaggacctcggaggcaccaccatcgatggtcgtggccgcctcatttggctcgaattccgtccaacagaatcagacgcggggagttcttgttcttgagccgnanaacaatggaggtgaagctgtggatattactcctaaggagtttggagtgagaacattggctcaggaatatggaggtggngtttcactgtttc

SEQ ID NO: 49337 - DNA, 264 bp, Glycine max
  unsure (1)..(264): unsure at all n locations; Clone ID: 701136987H1
gaatgaaaaaaaatgcagaaagaagaacaagaaaaagagtatttagaatgcgttgacgtgtccaagcttcaactgctactccaccgatgaactcccangtatcgctcaaagcaggattcaaaaggacgacgcgtcgttttcggcctctcaaaatgacgaccctgacttcgagntcgccgcgtttcgagacgacgccttcgagttctccaacgacgacgccgttntccctctcttcaacagcgacgttgcganggaccgccggaa

SEQ ID NO: 49338 - DNA, 264 bp, Glycine max
  Clone ID: 701136988H1
gctctttgaagaaagaagggtctttgcttgattttggagatgtctctgctctcagatctcatcaaccttaacctctccgataccaccgagaaggtgatcgcagagtacatatggatcggtggatcaggaatggacctgaggagcaaagcaaggactctcccaggaccagttagcgacccttcagagcttcccaagtggaactatgatggttccagcacaggtcaagctcctggtgaagacagtgaagtgattttatacccacaa

SEQ ID NO: 49339 - DNA, 257 bp, Glycine max
  Clone ID: 701136989H1
cttcagacatatctataacgctgtttctgtgagagcatcaatggcgacaaaagctttgtccttcgctctgtctctcaatgacctcaccaataaccacttctcttccaatacgccatacaccgccgccaaagtttccgtctttaccgtcaaatgctcttcttcgggtggtggagagaggccttggaagaattcagatgctagacttgtgctgaagatggttcaatttggaaagcaaaatcgtttggtgcttcggggac

SEQ ID NO: 49340 - DNA, 240 bp, Glycine max
  unsure (1)..(240): unsure at all n locations; Clone ID: 701136990H1
ggagtggtgaagtgggaaagcaagatgataagaaccaagcactctnttaatcctaccatttacgcatggnagcacattnggtatttatgaagtgttgactggaagatcatatatctgtgatgtcgtcactgattccgtggtattctgcatttttcttgaagctgataagataagatcatgtctcaaagcagatcctttgacggaaaaattcctgtgggaggaaagtgctattttcctttc

SEQ ID NO: 49341 - DNA, 261 bp, Glycine max
  unsure (1)..(261): unsure at all n locations; Clone ID: 701136992H1
gaggctgaagatagcagatggaggaaatgatccatacatattncagcacaaacaatttcgnncnggaggcagacatgggagtttgatcctgaagcaggcagtccagaggaacgggcccaggttgaagcagctcgtcagcatttctaccacaaccgcttcaaggtcaagccctgcgctgacctcctttggcgttttcaggttctcagagaaaataacttcaaacaaacaattcctcgtgtgactatagaagatggagaggaa

SEQ ID NO: 49342 - DNA, 259 bp, Glycine max
  Clone ID: 701136993H1
gaatcttgagaaatggcaggggacagcaagagcaagattctgttcatcggagggactggttacatcggaaaattcatcgtggaagccagcgccaaagctggccacccaactttccttttggtgagggagtccactctctccaaccccgcaaaatcacccctcatcgacaatttcaaaggcctcggtgtcaatcttgttttaggagatctatacgatcaccaaagtttggtgagtgctataaagcaggtcgatgtggtaa

SEQ ID NO: 49343 - DNA, 244 bp, Glycine max
  unsure (1)..(244): unsure at all n locations; Clone ID: 701136995H1
gctgttcctcaggagtttcaccccaacgacgccagttaaacttacgagcaactgcaggtttaagancaattggaaggggatgcttctgataggatattgcaggcggtcagtgacatgctcaagaacagaagcacactgaacgttggggccgatgcagtttcagtgttgagtggaaaccaagaaggagcttatcaatgggtaacaattaactatctactgggaaacttgggaaagcattattcag

SEQ ID NO: 49344 - DNA, 264 bp, Glycine max
  Clone ID: 701136996H1
gtgaactctacatagatgatggcagcagctttaattttctgcaagggggctatatccatagacgatttattttctcgaatgggaaacttacttctatagacctggcacctgcttccagtagcaaggggcgttatccatcagatgctttcattgagaggattatcctgctgggacatgctcctagctcaaaaaatgcactcattgagccatcaaatcaaaaggttgatattgaacttggccccctttgggttctaagggctcgtg

SEQ ID NO: 49345 - DNA, 245 bp, Glycine max
  unsure (1)..(245): unsure at all n locations; Clone ID: 701137001H1
aaaaaactttctcaaagattctgnaaccaacatcgacatcactgttaactatggcaacactcgctcccgggattttgttgaagctcctcaacggattgaacaccggcgtgaaacccacgaacgagcaccgcagctcgctcctgcaagtgaccgacatcgtccccgccgatctcgacgaaaaaaacctaatcccaaaacaagggtttttcataaaggtctccgattcctctcatctatctacgcga

SEQ ID NO: 49346 - DNA, 255 bp, Glycine max
  unsure (1)..(255): unsure at all n locations; Clone ID: 701137004H1
gtttgggctccttggcctgctcgattgactactccacctcctcgtctggcagaaattcactattnctactgaaatgtttgatcaaggacatggaagtttggaaacaacgagttcataattactggagcaagctagccagtaagattaagcctgacacaattcgcaacgtgatggatatgaaggcgaatttgggttcatttgcagcagctttgaaggacaaagatgtttgggttatgaatgtggtgccagaaaatg

SEQ ID NO: 49347 - DNA, 251 bp, Glycine max
  Clone ID: 701137005H1
actctctctgctcttcttctacctttcaagtttttaaagtattaagatggcagagacattcctatttacctcagagtcagtgaacgagggacaccctgacaagctctgcgaccaaatctccgatgctgtcctcgacgcttgccttgaacaggacccagacagcaaggttgcctgcgaaacatgcaccaagaccaacttggtcatggtcttcggagagatcaccaccaaggccaacgttgactacgagaaga

SEQ ID NO: 49348 - DNA, 247 bp, Glycine max
  Clone ID: 701137006H1
gaataggagataggattttttgtgcgggctaaggcagacacattcatcatattcttcaaaaaaagaaaaaacagtcttagaaatgacacgatccttggtaatggcttcttcatcaatgtcatgtccgaagctggggaattgtgcagtgtcacatacaaagttccaagcttttcatctctcttcaatgttctctccactggatcgaggccttttctcaccttggagtggtttaaagcatctgggtatc

SEQ ID NO: 49349 - DNA, 249 bp, Glycine max
  Clone ID: 701137008H1
atcagagaactttggcagctctcttaggtttttaaaaaacaccacgcaaacagcaagatggccacttccgacagtaacatgctactaaattatgttccagtttatgtgatgctcccactcggagttgtcaatgttgacaatgtttttgaagacccagatggccttaaagaacagctcttgcagcttcgagctgcgggtgttgacggggttatggttgatgtgtggtgggggatcatagaactgaagggg

SEQ ID NO: 49350 - DNA, 250 bp, Glycine max
  Clone ID: 701137009H1
ccgagataaccagttttctctttgattcatcaatggcaactgcgaggaccgtgaaggatgtttcgcctcacgatttcgtgaaggcttatgcttcccacctcaagcgttccggcaagatggagcttcctgagtggaccgatattgtaaaaacagcaaaatttaaggagttggctccatatgatcctgactggtactacattagggctgcctcaatggcaagaaagatctatttgagaggtggtcttggtgt

SEQ ID NO: 49351 - DNA, 247 bp, Glycine max
  unsure (1)..(247): unsure at all n locations; Clone ID: 701137010H1
cccttttcacgtcattatcctaaaaacttgcagatnttcacatcccanacaacatganagcnaagttcatgtttctgtcggtgctcctttgtgccacttttcatgtnncccttctctatnatcgacggtttagttgccaacggaactttgagttgggtccaaagccctccgccctaaaaggaacagtggtggtgggcgggagcactcgatcccagaatgggagatctccggctttgtggagtacata

SEQ ID NO: 49352 - DNA, 246 bp, Glycine max
  unsure (1)..(246): unsure at all n locations; Clone ID: 701137011H1
aagtaatnaggtaatactactactgttactctgtgtatccgtagttaattggaaagcattttttaggtttagggtttgtnaattttgatagattagattagatggataaagtgtgtctgaacagtgaggctgtccctgttgctcctgctgttggaatggaatttgacagctacgatgatgtctattacttctataattggtacgccaaggaacagggttttggggttagggtcactaatacctggt

SEQ ID NO: 49353 - DNA, 221 bp, Glycine max
  unsure (1)..(221): unsure at all n locations; Clone ID: 701137012H1
gccatggttctctccaaaaccacctccgaatccgacgtctctgtccactcaaccttcgcntcgacgatatgtcagaacttcgcttcccaggtttaagatgccggaggagtcgataccaaaggaggcagcgtatcaaataataaacgatgagttgatgttggatgggaacccaaggttgaacttggcatcatttgtgacaacctggatggagccagagtgtg

SEQ ID NO: 49354 - DNA, 251 bp, Glycine max
  Clone ID: 701137013H1
tttggttctctgtgtctctacgatcaggatccaacggtccaaaatgttcggggcttgtgctgtttgttttcccaggttttagagctccaaaccttcagatccacctcattcgtctccagatcttccttcctggataacgttttcgggttcgagaaggcacttgtgttgtttttcgtacgaaatggagactaaacagagttcggtgacggttacgctcagttacggcgcgttgacgtgcgccgcggaatttc

SEQ ID NO: 49355 - DNA, 86 bp, Glycine max
  unsure (1)..(86): unsure at all n locations; Clone ID: 701137014H1
atacggcttccaatgccttggctgtgaatgaaatgttcagctnccaaggtggangcatccaccagacttcttcngaaccaaactac

SEQ ID NO: 49356 - DNA, 281 bp, Glycine max
  unsure (1)..(281): unsure at all n locations; Clone ID: 701137015H1
gctttgatcntaaatcttcactgggngnttttncttgnaanacaaggtggctggcnaaggttatgatgaangaaaaagnacggganggttcgtcnaaaattgcatcngttggttggttgggttggcnatgnttggaccagcccaattatagtgctggcaaaaagcaaggagtaatttgnctgaccaaaaactgntgccgaaggaatatgccagtaggaaacatcacnggtnatgcngttggntccagggttaatgcatccgacatggactggccaagctag

SEQ ID NO: 49357 - DNA, 262 bp, Glycine max
  unsure (1)..(262): unsure at all n locations; Clone ID: 701137016H1
gctcnctgagagagctcgtcgcggcggttgcagaagaagattgcaagatgaagttcaacatcgcgaatcccaccactggatgccagaagaagctcgagatcgacgacgatctgaaactgcgagcattttgggacaagaggatctcacaggaggtcatcggagatgcactcggtgaggaatttaagggctatgtcttcaaaattaccggaggttgtgacaaacaaggatttccaatgaagcagggagtgctgactcctggtcg

SEQ ID NO: 49358 - DNA, 259 bp, Glycine max
  unsure (1)..(259): unsure at all n locations; Clone ID: 701137017H1
agatcactgtcttctggccaanaacaaattggtcattactggagactgatgaatattggggagacagaaatacgcaatgtgatggatatgaatgcctattgtggtggatttgctgttgcgctcaataagtttcctgtttggatattgaatgtagttcctgcaagcatgaagaacaccttatctggaatttatgcccggggattgattggaatttatcatgattggtgtgaaccattttcaagttaccctcggacatatg

SEQ ID NO: 49359 - DNA, 255 bp, Glycine max
  unsure (1)..(255): unsure at all n locations; Clone ID: 701137018H1
gattcagcaagtgcgttttggaagcagagaccgaaatacttcgagatggcccgtacaaagcaaactgctcgtaagtcaactggaggaaaagctcccaggaagcagcttgcaaccaaggctgcacgtaagtctgcaccaacaactggtggtgtgaagaagcctcatcgttatcgccctggaactgncgctcttcgtgagattaggaaataccagaagagcactgagctcctaatcacgaagcttcctttccagagg

SEQ ID NO: 49360 - DNA, 251 bp, Glycine max
  Clone ID: 701137019H1
agttcacactctctgcttcgcgtgtaccaacaagtgcaagttcgaatcaatggccagcgctcagctcacagcaatagcgtcatcgatctctacggcgtcgtttgaagggcttcgaccttccgctgttcagtttgcttccacgggcagaattagaattggcaatctctcccaaaggtccttccggggcttggttgtcaaagccgccaccgttgttgcccccaaatacactgcgataaagcctctgggagata

SEQ ID NO: 49361 - DNA, 247 bp, Glycine max
  unsure (1)..(247): unsure at all n locations; Clone ID: 701137020H1
cagcacccatttggatcctctcttctcttctttgatctccgttaccctttttgttttctcannnnnnnnnnnnnnnnnnnatctttcgaagttcgtttgcgtgtgttgtgtggtcagtcaccgatggcagcaccacctgcgagggcacgtgccgattacgatnacctcatcaagcttcttcttattggcgatagggtgtgggaaagagttgtctgcttttgcgattttctgatggttccttcacaac

SEQ ID NO: 49362 - DNA, 245 bp, Glycine max
  unsure (1)..(245): unsure at all n locations; Clone ID: 701137021H1
gtcgcctccnccgccgccaagccgctccggcaacgaggatccgcacggaagagacgangaggatctgagaagaaggaggcgcgagctgcttcggcttcggattagggatttggcgacgcgcacgaggagcatgcggaaccggatcttggattgggccgagattctgatgggccttgaggacaattccatcgagttccgcctcnagctgccggaatccgaccgctacgtcgggaatcccgaggatt

SEQ ID NO: 49363 - DNA, 248 bp, Glycine max
  unsure (1)..(248): unsure at all n locations; Clone ID: 701137023H1
ccgccgatctcggtcccggagaacgcacatgtgcgcgaactgacgcgtcanacctagcgggtgaagcgacatncgtcgtcgtcgctcatggccggtgtgactcggtggtcatcatcagatctgggttttgaccatcataacgaaaatctcatacagatctgacagtatctcgactccatggacggtggcgcctttcgccagaagggagaactccgacattgaccactccgtggtggaatcgctacccg

SEQ ID NO: 49364 - DNA, 247 bp, Glycine max
  Clone ID: 701137024H1
gtcacaatggatcgttatgagaatgattggagtgttgtgaaacgagggtgggatgctcaagttcttggtgaagccccttataagtttacaaatgctcttgaagctgtcaagaagctgagggcagaaccaaaggccaatgaccaatatttgcctccttttgttattgttgacgagagtgggaaacctgttggtccgatagttgatggtgatgctgttgttacattcaacttccgagctgatcgtatga

SEQ ID NO: 49365 - DNA, 247 bp, Glycine max
  Clone ID: 701137025H1
ctaaaggactatgttaccggttttcccaaagaatccgacatgaatattgtcgaaagtaccataacattgaagcttccacaaggttccaatgatgtcttgctcaaaaatttgtacttgtcttgtgatccgtatatgaggaatctcatgaacaagcccgaaggccctcccaatagtcgtgcttacactcctggctctccattaataggatatggtgtgtctaaagtcctggaatctgggcacccagatt

SEQ ID NO: 49366 - DNA, 248 bp, Glycine max
  unsure (1)..(248): unsure at all n locations; Clone ID: 701137026H1
gcgtcatctccgattccccgacaatggccacccaaatgagcaagaagagaaagttcgtagctgatggagtgttcttcgctgaactgaacgaggttctgacaagggagttagccgaggacggatactccggcgtggaagttagggttactnccgatgcgcaccgaaatcatcatcagagccaccagaacccaagccgttctcggtgagaagggaaggagaatcagggaacttacctcggtggttcagaa

SEQ ID NO: 49367 - DNA, 247 bp, Glycine max
  Clone ID: 701137027H1
gaagagtgcgttgaaccaacaaaggactacattaatggcgaacaatttagatcagactctaaaacagttaaccaacaagctttcttttatgctagtgaacgcgaagtccatcacaacgacatatttatattcggcatagataacaccgtactctctaatatcccatactatgaaaaacatggatatggggtggaggaatttaatgaaaccttatatgatgaatgggttaacaagggcgacgcaccgg

SEQ ID NO: 49368 - DNA, 171 bp, Glycine max
  unsure (1)..(171): unsure at all n locations; Clone ID: 701137028H1
ctttccttnccctgttcatacttgtttcttcaanntcatttcttttattacttttcntctttgcattccaaatggccactgttgaggttgcagaacaancaccaacaactgtganaganaatgaagcaaccgaggtaaccaagattgaggaaactaccacannacntanga

SEQ ID NO: 49369 - DNA, 251 bp, Glycine max
  unsure (1)..(251): unsure at all n locations; Clone ID: 701137029H1
ttgacagtaggcattgctgcagtgaaccagaaagtcaagtctgtggatcagaggcttcaggtttcggataagacaatggcagcaataattgcagctgagaggaagataaataacactggatcagctgtcaaaacaagcagatatgtgactgctggaacagcatggtttaacggtgcttttagcaaggtggcaaaggctggacatgttgcaagtactaaaactagaganaaatttcatttggctgtttcaaa

SEQ ID NO: 49370 - DNA, 245 bp, Glycine max
  unsure (1)..(245): unsure at all n locations; Clone ID: 701137030H1
gtactaattcaatgtaccctccaattcatcagtgtcacaacggccacacactgngttccacgtgtaaaacaagggtgcacaaccgatgtcccacttgtagacaagagcttggagatattaggtgtctggcactggagaaggtggctgaatcacttgagttaccttgcaagtactactctcttggatgtccagaaatctttccatactacagcaagctcaagcatgagacagtatgtaattttaga

SEQ ID NO: 49371 - DNA, 259 bp, Glycine max
  unsure (1)..(259): unsure at all n locations; Clone ID: 701137031H1
ctatactctctctttctgaaacaatttgcccaattgtttgagatgttcaatatgagatttgtatctcaagattgggtggtttcatgtgcactaatacttctggtgtcatgcacaacatactcattcagcttctttggggaaacctgagaacaacataaaaacatctgtttttaaatcacccaagattgagctnggtccagggttagtttcaaacaaattttattttgatgttgactttccaagaggccatattgcactc

SEQ ID NO: 49372 - DNA, 259 bp, Glycine max
  Clone ID: 701137033H1
ggcgttctatatattattgaattgacaatgaggcctgctcttgctttgcttcctcttctatttgctttcttgttagctgccactacggaatcaagaaaagatccaggggaatattggaaaatgatcatgaaagatcaggaaatgccagaaggacttcaaggtcttgtttcatttcaatctgaaaataaccctaagactcaagagcagcttggtaaaggttccaaaaaccattgtgaagagtctctagttacaaatacac

SEQ ID NO: 49373 - DNA, 252 bp, Glycine max
  unsure (1)..(252): unsure at all n locations; Clone ID: 701137034H1
gcaccaccgaacaacttcccntgtaaatcgcgtttcgtttgtgcaaggttttaaaagatggctgatgctgaggacattcaacctcttgttgttgataatggaactggaatggtcaaggctggttttgcaggtgatgatgctcctaggnccgtgttccccagcattattgggagaccacgccaacctggtgtaatggttgggatgggtcagaaggatgcttacgtgggtgatgaagcccaatcaaaaaggggt

SEQ ID NO: 49374 - DNA, 245 bp, Glycine max
  unsure (1)..(245): unsure at all n locations; Clone ID: 701137037H1
ggaaatggtgcggtggtgagagagaagngtagggaagagaagaatgagaaggagaaggagaatcgacgcatgcacggttggaaggagtatttggagcattcgaaggagctgattgaaccggacggtggaccgccgcggtggttttcgccgttggagtgcgcttcgcgattggataattctcctcttctgctctttttgccggggattgatggcgtgggacttggacttattttacatcatcagaa

SEQ ID NO: 49375 - DNA, 246 bp, Glycine max
  unsure (1)..(246): unsure at all n locations; Clone ID: 701137038H1
acaccgccaacaagctcctgagcgcgcgtgacntnccacggngcgcgctccttcgccatccgcgcgcgtgantcggacccgacctacgatgcctcggagcacctcctgacggtcatcgacacgctcctcgccggcgagtcgcggatcaacgaccaccaccgcgactggtacgggatcctccagattctccgctacgccaccaacatggaccacatcgncgcccagtatcgccgcctcgcgctcctt

SEQ ID NO: 49376 - DNA, 244 bp, Glycine max
  unsure (1)..(244): unsure at all n locations; Clone ID: 701137041H1
aagctccttcgatctacaatctatagctattacgctctcaatttccgagagtgtnnnnnnnnnnnnnnnnnnnnnnnnnnaccgcgatttcaccatttttccatcatgatttctgctactaaactcaaatctgtcgatttttacaggaaaatcccgagagatttgactgaggcgtcgttatcaggggcgggattatccatagtggcagctcttgttatgatgtttttatttggaatggaactaa

SEQ ID NO: 49377 - DNA, 245 bp, Glycine max
  unsure (1)..(245): unsure at all n locations; Clone ID: 701137042H1
gttaaggcttggactgcctggaaacggaggcactgaagaagtgctcatcaggaagaggggtttctctgagactgaaactggtcatgaagatgagtctgccaccactgtggatttgatgcttaatctttcttctaaggagnnnnnnnnnnnnnnnnnnnnnnnnnnnnnnnnnnnngataagcacaagactttgcctaaggagaagacccttctgccagcagatcctgctaagcctccagccaaga

SEQ ID NO: 49378 - DNA, 230 bp, Glycine max
  Clone ID: 701137043H1
aagcaatacatcagaatggtactgttcatcaagactctcatctcaaagaacgtaaccatagcaaagctagcttaaactacacactgatgatgacactgatacattagggttccagattattttgttaacataattttctggttcccctccgaggccgtacgtgcatgccctcatatggcatgccctggagcttctttctccacaacaggcttcttatcttctgtctagct

SEQ ID NO: 49379 - DNA, 238 bp, Glycine max
  unsure (1)..(238): unsure at all n locations; Clone ID: 701137047H1
ccttacccctctctttgaattaacttcacttcacagtcacaccaacctctctcccntaactcgcacgcgaacgatcacatacaacacaaacagtactctnccctcttggtgcaaatcgaacctagaaacctcaatccnttanccttccatggcggcaggnntctncaccgccgcaaacttaaagncctacaatntcctccaacncccaatccctatatctaaaccaaccccaccactc

SEQ ID NO: 49380 - DNA, 257 bp, Glycine max
  unsure (1)..(257): unsure at all n locations; Clone ID: 701137048H1
caaatcctcaaactcttgtctttccctctcatacccatctcgcttcatgaacccctccttcatctaccaagtcttcaaccctgatcttaccatctcttcctctcaaaaatcccacccttcccatttgaaccacaccatctcttcccacaatgatctcagtgttacattggatatcccttcttccaatttnaagttntnncttgtncggggaagctcctttttnancctctctgtgactcanccaacccctctttcca

SEQ ID NO: 49381 - DNA, 51 bp, Glycine max
  unsure (1)..(51): unsure at all n locations; Clone ID: 701137051H1
gnaagctgntngagcacagtgntgancgccggtaatgccgncgccgccatc

SEQ ID NO: 49382 - DNA, 241 bp, Glycine max
  Clone ID: 701137053H1
taggtttcctactcccttctcatcgttggcaagatgagtgccatgaaattttgccgtgaatgcaataacattctgtaccctaaggaagacagagaccagaaagttcttctcttcgcttgccgcaactgcgaccatcaggaggttgctgataacttctgtgtgtataggaatgagatacatcactctgttggagagcgcactcaggtgttgcaggatgtcgctgcagatccaacgcttcctc

SEQ ID NO: 49383 - DNA, 244 bp, Glycine max
  unsure (1)..(244): unsure at all n locations; Clone ID: 701137056H1
ctcctcttccttgtgatttttgtttgcatcacagggagaaactgagacacagaagatgagaganataattagtattcatattggacaagctggaattcaggtggggaattcatgctgggagttgtattgccttgagcatggaattaaccctgatggcaccatgcctagtgatacctcagttggtgtagcacatgatgctttcaacaccttcttcagcgngacgggatccggcaagcatgtgcca

SEQ ID NO: 49384 - DNA, 241 bp, Glycine max
  Clone ID: 701137057H1
acgtgaagggttctgctggaagccttgtgactttggttagctggctgtgttcttggattatatcatattcttttaacttcctcatgagttggagttcagcaggtatgttatcatttaatcttggtcctgagggtaaaaataaaaagaaaaagttaagaatttttaagaaactagggaagaaaaatagaaacgtaaggagtccttattttacatatggaataaaatttattttatgttatgt

SEQ ID NO: 49385 - DNA, 233 bp, Glycine max
  unsure (1)..(233): unsure at all n locations; Clone ID: 701137058H1
cttgttcttgttctatctgtgacgagcatcatggcctcgagagcagtgctantgttggctatgtgtgtgcttccggccatggttgtggccattcgcccagcaaagaaccctttttgcgtgaagggtcgcgtctactgtgacccttgccgtgctggttttgagacctcagcaaccacctacattgccggtgctgagattatgttgcaatgcaagagcagggttagcaacgaggt

SEQ ID NO: 49386 - DNA, 244 bp, Glycine max
  Clone ID: 701137060H1
tgcagcttcaaatgacaagtcagatacaacggaaaaacaagaggatgaaatatattccttggccggtgctttggaggatgttgttagggcatctcagcttgagatcattgagcttaagcatactgtgggtgaattaagggcagagttgagcttacttaagcagcatatagaagctcaggtcaaggagcttgaccatagaatgcatcggatagaggaacttgaagagaaggagagagtggcaaac

SEQ ID NO: 49387 - DNA, 253 bp, Glycine max
  unsure (1)..(253): unsure at all n locations; Clone ID: 701137063H1
gcggaattnattgattccgttctcgatgttgtgcgcaaggaggctgagaactgcgattgcttgcaaggttttcaagtgtnccattccctggggggaggaactggatcaggaatgggaaccttgttgatttctaagatcagggaagagtacccagatagaatgatgcttactttctctgttttcccatctccaaaggtttcagacactgttgtggaaccctacaatgctactctctctgttcaccagcttgttg

SEQ ID NO: 49388 - DNA, 257 bp, Glycine max
  unsure (1)..(257): unsure at all n locations; Clone ID: 701137064H1
aatggcttcaatgaataaccanaaagaaattgagctctttgagggccaatctcttctgtacatgcagctatatgggcacctaagacctatgtgtcttaagtgggctgttcaactaggtattccagacataatacagaatcaatgccaaacccatttctctttctgacttggtctctactcttcaaattccaccagctaacgctgcttttgtgcagcggttcatgcgcttcttggcacacaatggaatctttgagatc

SEQ ID NO: 49389 - DNA, 251 bp, Glycine max
  unsure (1)..(251): unsure at all n locations; Clone ID: 701137065H1
gggactgcaaattctctgcttctctacacatggagccggtntcgcgtgctaatttcttttcattccaaagattttggctaccgtttcagggacagggagggatgaggcagcaagttgatccctcggctcacacaatcaagtcccatggagcatcacttgcaagaaaacacgctcgtgattggcttatattgctgcttctcatagtgatagagatgtcctttttgtcattcatccatttaaacgctttgtgg

SEQ ID NO: 49390 - DNA, 141 bp, Glycine max
  unsure (1)..(141): unsure at all n locations; Clone ID: 701137066H1
ggagaatatgaagttgtttgtnttctttnttgctgcagtagttttggtancatgggccatgccatggcgcaggctaccaaaggttccctctccgaatgaaaactggctatggtgagcgttcttcggaggtaaaatgcgcaa

SEQ ID NO: 49391 - DNA, 245 bp, Glycine max
  unsure (1)..(245): unsure at all n locations; Clone ID: 701137067H1
ctgagttaaggcttggactgcctggaaacggaggcactgaagaagtgctcatcaggaagaggggtttctctgagactgaaactggtcatgaagatgagtctgccaccactgtggatttgatgcttaatctttcttctaaggagnnnnnnnnnnnnnnnnnnnnnnnnnnnnnnnnnnnngataagcacaagactttgcctaaggagaagacccttctgccagcagatcctgctaagcctccagcc

SEQ ID NO: 49392 - DNA, 243 bp, Glycine max
  unsure (1)..(243): unsure at all n locations; Clone ID: 701137068H1
aattatantttaggcagcaaattatggaatcccatgatgaggagcatgctgccaaactacttagagcttccaacccacatatggaatcacatatttagcttcataaactccatgtcccttaaatgtgtggtnnacttaggcataccagatatcatacacaactatggccaacccatgccactctcaaacctcattgcttcactaccaatccacccatccaaaacttncttcgtccattgcttg

SEQ ID NO: 49393 - DNA, 241 bp, Glycine max
  Clone ID: 701137070H1
aaagctttagggacacagaataggataaccattgcattttcattttcttataaattattatcctgctgcttcaagggatcgaagcacgtcctaaggtgtgaagcagtaaagtaaaacaacttcattttgtagcattacatgttttcttttcatctaatttccttcttttgattctcatttttgggatgatgattattcatgtgattaagacatacataggcatcacgcttttataggctat

SEQ ID NO: 49394 - DNA, 102 bp, Glycine max
  unsure (1)..(102): unsure at all n locations; Clone ID: 701137071H1
ctcaaatggcccaaaatgattcnaaccctactgccgcntnccggaaccccatgtagcggcgganccccattantgaggatttggtccaagacaaagaagaag

SEQ ID NO: 49395 - DNA, 241 bp, Glycine max
  Clone ID: 701137072H1
actggctgtaattggttctggtttggctgtttttatgtcagtaactatagttgtcttgctgtttatgatcagagagaggcaggaaaaagtagccaaagatgctgggattgttgaagatggcaccaatgacaacccaactataattgcagggacgatttttgttgataatctaaaacaagcagtagatcttgatgtcgtcgttaaagcaactctgaaagacagcaacaagctcagcagtgga

SEQ ID NO: 49396 - DNA, 240 bp, Glycine max
  Clone ID: 701137073H1
gttaggttctgcacgctctgcttccagcgagtgttctttcttcgtttcaacaccttaatttgcacacgctgcttcttcagcttgagaaatggcacaagaaacctttctattcacatctgaatctgtaaacgagggtcaccccgacaagctgtgcgaccagatctctgatgcagtgctcgatgcgtgccttgaacaggaccctgacagcaaggttgcctgtgagacatgcaccaagaccaa

SEQ ID NO: 49397 - DNA, 242 bp, Glycine max
  unsure (1)..(242): unsure at all n locations; Clone ID: 701137074H1
gcagacanactactacttctctccttccgattcttctgatggcaaaccaagcttcactctgccttctccttcggggtctccagttcacgcgcctctgaagcgcgtgggcacgcacaacggaagcttncacagaanatacgacangagntgcttnnngattcgnntcacgaanaaattnaacancgnnganatngttcgctnccgagaccctcaggtgttggaggatcttgatgctgntcaag

SEQ ID NO: 49398 - DNA, 243 bp, Glycine max
  unsure (1)..(243): unsure at all n locations; Clone ID: 701137075H1
cgagcgtctctatgcaacttcacagcnccagaaaggtccatcacctcccacaaccttggacttngagcatcataaaacaacaccatgtttgctttcttccatcgaagaaggacgtgcggttaataggagacaacttattcttcacacgccagtagcagtagctgcatttgcagtcccaaatgcattggcactcaatgatgtgtctgaggatgttcgtgtctacactgacgatgagaacaagtt

SEQ ID NO: 49399 - DNA, 241 bp, Glycine max
  unsure (1)..(241): unsure at all n locations; Clone ID: 701137076H1
ttcctacttgattggatctgggtctgaaaaactcaaagattgagtgttgtcatcagcttgatctcttgtttaaccacgggataggagttaaataacagcactacatcttgtttaaaaacatgttataacatttttgtggaattttttcattatgctctatttgagttcttgatagtaagttaactttcttctaaaatttattcaattgtangtccatattttgttgccttcacattagtaa

SEQ ID NO: 49400 - DNA, 247 bp, Glycine max
  unsure (1)..(247): unsure at all n locations; Clone ID: 701137077H1
gngtatctctcnctctgacacaaactccattgatttgcaacttgtaagcaancgnnattgatanaaanaatagnngcgtnncttgngcattccgaggatatctctntacnttctnttcnantgncttnaaattccaacattccttnacnctcttctcttcgcaccanagggacgactnatgggntccanagagaatggaattanccgctcgctgaagaggctcntcttnaggatgangaaagcaaac

SEQ ID NO: 49401 - DNA, 247 bp, Glycine max
  Clone ID: 701137078H1
atccatgataagtgcaccgggttaactgtgctagggaagtactatttcagaattgatcctgtaggagagggtgccagatggcgtcgatcatttggtcaggagatatactcacccttgcttttagccttcacagagagtgaaggtcactggggagattctcatgtcacaaccttctcaggaatagattcctcatacaacttaccagataacgttgccatagtaactctccaggatctgggtgatggaa

SEQ ID NO: 49402 - DNA, 73 bp, Glycine max
  unsure (1)..(73): unsure at all n locations; Clone ID: 701137079H1
ttccttaagctccttagtgntgctccttgcagctctaattctatnccnctcaagttcnttgcannatatgagt

SEQ ID NO: 49403 - DNA, 251 bp, Glycine max
  unsure (1)..(251): unsure at all n locations; Clone ID: 701137080H1
aatggccaaagacccagttcgcgttctcgtcactggagccgcaggcaaattggatatgctcttgtccctatgattgctaggggagtnatgctgggtcctgaccagcccgtgatcctccacatgcttgacattcctccagcagcagagtcnttgaatggggttaaaatggaattggtggatgctgcattccctcttcttaaaggtgttgttgctacaaccgatgtggttgaggcatgcactggggtcaatat

SEQ ID NO: 49404 - DNA, 261 bp, Glycine max
  unsure (1)..(261): unsure at all n locations; Clone ID: 701137081H1
gattnggatcgagngatgcttgggcttttgaggaggtagatatgacatttgaaggatcctttaacttttccaacaccataagctttangggctaatacttgatctgttggtacctggcatatggatttttaagtaaagaaagaaggttttaaattgtgattgtggttatggttccatcacaatccttaatnttgtgagatattccggacaaatgcggccacaattacggtcccaatgcagtcatggggggcccaaaaacct

SEQ ID NO: 49405 - DNA, 246 bp, Glycine max
  Clone ID: 701137082H1
ggctcccaagggtttaacctttctggctgtgttaatatgcgtttcagcactgtcactgagtccttctgttgcgggggaagggcaaaataatggccttgttatgaacttctacaaggaatcatgccctcaggctgaagacatcatcacagaacaagtcaagcttctctacaagcgccacaagaacactgctttctcctgggctcaggaacatcttccatgactgtgctgttcagagttgtgatgctt

SEQ ID NO: 49406 - DNA, 70 bp, Glycine max
  unsure (1)..(70): unsure at all n locations; Clone ID: 701137083H1
aaacaaaatgagcatncggaacaacactttcaacaaccaccaaaccactctttccaccaccaacatagcg

SEQ ID NO: 49407 - DNA, 240 bp, Glycine max
  unsure (1)..(240): unsure at all n locations; Clone ID: 701137084H1
acttcctactccaaccacttnctttttncccgcagtcatgggcaangtcaagatcggaatcaacggatttggaagaattggccgtttggtggccagggtggctctgcagagagacgatgttgaactcgttgccgttaacgatcctttcattaccaccgattacatgacatacatgtttnaatacnacagtgttcacgggcactggaagcatcacgatgtcaccgttaaggatgagaagac

SEQ ID NO: 49408 - DNA, 237 bp, Glycine max
  Clone ID: 701137085H1
cgagcatcatggcctcaagagcagtgttattgttggctatgtgtgtgcttccggcgatggttgtggccattcgcccagcaaagaaccctttttgcgtgaagggtcgtgtctactgtgacccttgccgtgctggttttgagacctcagctaccacctacattgctggtgctgagattatgttgcaatgcaagagcagggttagcaacgaggttgtgtacacgaagaaggggtacaccg

SEQ ID NO: 49409 - DNA, 241 bp, Glycine max
  unsure (1)..(241): unsure at all n locations; Clone ID: 701137086H1
cctagattcaacgaacccgccgaccaagctcgaacctcacgtngcaaaaaaacacttcttttccccnnctgccgaggttgtcgtgtcggagcatagccatgttgttccctcgaggaaattgatgatttttcataacattggggtctcgttttgcttgtggggtcaccttgaaggagggaaaagtaacgagctttggggctgaatcgtggtgggtctgttgagtatgcatagatctggagct

SEQ ID NO: 49410 - DNA, 240 bp, Glycine max
  Clone ID: 701137087H1
ggactcaggtgccgggacaaaagagtatgttcatgttcgtgtacaacagcgcaacggaaggaaaagcctaacaactgttcaaggattaaagaaagagtatagctatagcaagatactcaaggacctgaagaaagaattctgctgtaatggtactgttgtccaagaccctgagttgggccaggtcatacaacttcagggagatcaaagaaagaatgtttctactttccttgtgcaggctgg

SEQ ID NO: 49411 - DNA, 239 bp, Glycine max
  unsure (1)..(239): unsure at all n locations; Clone ID: 701137088H1
atggctgtagctatagctgatagcacgctttttcttcttatgttgctaacaggtagtatattctccgatacatgtgtgcaaaataaacttcataagatggaaatttgcctgtgcttgaaactcaaatgcttgggatagaagaaattgagctaagtttagcttttgtccattaattaaggaacacaacggncttgggtggatgaaattctcataaacatctcatattatttgtttttgtt

SEQ ID NO: 49412 - DNA, 238 bp, Glycine max
  unsure (1)..(238): unsure at all n locations; Clone ID: 701137089H1
atcttggttcatcagaaatacttaccattttgaggtactttctttctccntccaaagatgcttataacagtatggtaactgtgaagaaggattgggagtgccaagtgctgttggccattgagaaagcaaatgatagcaatctgaagaagtacttgcttacggcgaaggaggcttctattttgcttatgatggcatatgatggtttctctgcgtctgagatttgtttgcattatctgtt

SEQ ID NO: 49413 - DNA, 221 bp, Glycine max
  unsure (1)..(221): unsure at all n locations; Clone ID: 701137091H1
tcatacgtggtgttgttactgctgacncttttctcttttcanttctctttagttctcctgcaccccctnnnnnnnnnnnnnnnnnnnnnnnnngagcttgtttaagcttttcttccattaacatattatcacaatgtgtggtattcttgctgttcttggttgttctgatgactctcgagccaaaagggtccgcgtgcttgagctctctcgcagattgaagc

SEQ ID NO: 49414 - DNA, 242 bp, Glycine max
  Clone ID: 701137092H1
ccaattcagagttcgacgtgattatcatcggagctggcgtcatgggcagctccaccgcctaccacgccaccaaacgcggccttaaaacccttctcctggaacagttcgacttcctccaccactgtggctcctcccacggcgaatcccgcaccatccgcctcacctatccccaccactactactaccctttagtcatggactcttaccgcctctggcaagaggcgcaggcccaagtcggctac

SEQ ID NO: 49415 - DNA, 245 bp, Glycine max
  Clone ID: 701137093H1
ctcgcatttcgcaattcgcacacgttgggcgtgcaccgctaaacaaaacataaacctttgctaagaaagtttcttccttttttctcttctgctgtttgaatgtgaagacgcagcacagtgatgaagtgaagtgctgcatcaacctcaatgatctcagttttggaccttttggtttggctcaaaaggttgaatttcaaagaaattcttggttgatggttgatgctatgtctcatcagtgtgttcta

SEQ ID NO: 49416 - DNA, 249 bp, Glycine max
  Clone ID: 701137094H1
gcggcgctggcggactcctcctgcctgctccccaacaaaattcaaaaccaattccctctatcacccaaggccatccacagcgtgacgaaggaaccacaagtggacagcccagtccccatctcctcgttctcggatgaggacgaggagatcgtacaagccgtagtgtcgggctccatcccatcctactcactcgagtcgcggctcggcgacacacgccgggccacggccatcaggcatgaggtggtgcag

SEQ ID NO: 49417 - DNA, 249 bp, Glycine max
  Clone ID: 701137095H1
atcaaattcctactgccttcgatccttttgctgatgcaaatgctgatgactcgggtgctgggtcaaaggagtatgtgcatattcgcgttcagcagcgaaatggtaggaaaagcctgacaaccgttcagggattgaaaaaagaattcagctataacaagatacttaaagacgttaagaaagagttctgttgcaatggaacagttgttcaggacccagaactaggacaggttattcaacttcaaggtgatc

SEQ ID NO: 49418 - DNA, 252 bp, Glycine max
  Clone ID: 701137096H1
gaaaatgaaggtccttgttttcttcgttgctacaattttggtagcatggcaatgccatgcgtacgatatgttccctctccgaatgaacactggctatggtgcccgtactccggaggtgaaatgcgcaagttggaggcttgctgtggaagcacacaacatctttggctttgagaccattcctgaagagtgcgttgaagcaacaaaggaatacatccatggcgaacaatatagatcagactccaaaacagttaa

SEQ ID NO: 49419 - DNA, 277 bp, Glycine max
  unsure (1)..(277): unsure at all n locations; Clone ID: 701137101H1
tgtacgtcaaggctcagaaatcaaaagcctacttcaagagatatcaagtcaagttcaagagaagaagagagggaaaaaccgattaccgtgccaggattcggttgattaatcaggacaagaacaaatataacactccgaaataccgatttgttgttcgctttagcaacaaggacattgttgcccaattaatatcgggctagcttgctggggaatttnttcttggnggngannttccccntgggtnccanatttttntttnaagggggtccaaaatttt

SEQ ID NO: 49420 - DNA, 272 bp, Glycine max
  Clone ID: 701137102H1
gcggcatttaccttgacacttctgtgttacaagctgactacagaacttttgttgagattgtcttccaaaacaacgagaaaatcgttcagagctaccatcttgatggctactctttctttgtcgttggtatggacgggggacagtggacacctgctagcaggaaccagtacaatctccgagatgcagttgcacgttgcaccacacaggtataccccttttcatggactgctatttatattgcccttgacaatgtgggaatgtggaattgaggt

SEQ ID NO: 49421 - DNA, 274 bp, Glycine max
  unsure (1)..(274): unsure at all n locations; Clone ID: 701137103H1
tttatttctctaggataatatacaatcaaacataacccaagtagcggggttacaaaccaaccaaaccacagactaatagcactcgaattagcaaccagatacacgcacaatttctcacttttgtttttctcactcataaatagatcacaagatagggaaaaagnnnnnnnnnnnnnnnnnnnnnnnnaggctctttttttcttttttgttggtttctcttgttttttttttgtaggtactgaggaagaaagaccaaaactttatccgcttgctt

SEQ ID NO: 49422 - DNA, 270 bp, Glycine max
  Clone ID: 701137104H1
ctatctctagcttctagttctagccccttcctttgtgaactttttttgtttatccagtcgaatatgacatcctggttattgggaaggtctagtaggatcttaattcatcaacaacaacagcttcacaagggaccatttcttaactataatagctcttgttcctcttttcgatcaactgagccatttaggtgccgtgatgcattaccgggtaagaactcgtcacctacccttttccgcttttggcgtcatgaatcaaccaaagctgaggca

SEQ ID NO: 49423 - DNA, 273 bp, Glycine max
  unsure (1)..(273): unsure at all n locations; Clone ID: 701137105H1
gcctcgcaatcatcggcattgtcgtcgccgccgtcggaggtcagtctccagcggcggctcccaccacttcctcggcatccccagccacagccccttctaaacctaaaccaaaatcacctgcgccagttgcttctcccacttntctcntcnagcttcntcccccaatgctgcaacnggcaacccctcccgtttcgtctcccacggtagcatctcctccgtctaaagctgctgctccagctccagcaaccantcttccggtggccanacttccgg

SEQ ID NO: 49424 - DNA, 228 bp, Glycine max
  unsure (1)..(228): unsure at all n locations; Clone ID: 701137106H1
ccacctcgtaactcttccttgattagctccgaaattcaagagaagaaaaatattttcaacaaaaatggcttttcatctgttgccaatgtcagatttgggtgtgcttcgttagcgaaacaaaaagtacgtacagtgttgttttgtttgtcttaatttgttccatggagatggagaganttttgtgggttggcatgctataggacttgttttcagcaactgggtcgtagg

SEQ ID NO: 49425 - DNA, 270 bp, Glycine max
  unsure (1)..(270): unsure at all n locations; Clone ID: 701137107H1
aaagngaatctacaaaagatgaagatgaagaggatgatatgtatgtcctttcaacaagcaaccngcgagtatctgntcaacttttgggtaaagataaagtttatgatannctaagttgatttgagaagtnaaccagtgnatcattgtcatanctgggcattngttcccctggaatcccatctcacattaataatacagtgccaaatnntaaaagaatnngacctgactgggaaccttcttttggagtggaaggtatcttctgccaccagg

SEQ ID NO: 49426 - DNA, 267 bp, Glycine max
  Clone ID: 701137108H1
gcaaaatcgctgtgaaaatgagcggaacggtgaagaaagttagcgatgtagcattcaaggtgggaaggaacatcgattgggatggaatggcgaacttctggtctccgatgaggctcgcagggagttctccaatctccgtcgcgctttcgacgaggttaactcccaactccaaaccaagtttagccaggaacctgagcccattgattgggattactatagaaagggaattggcactcgtttggtggatatgtacaaggagcattatga

SEQ ID NO: 49427 - DNA, 270 bp, Glycine max
  Clone ID: 701137109H1
acccacttaacccgtcgttgccgcattgatcatacgtacacgtggcagcctaacgttgcttgcctctttctctcgctcttcctttcctccttttttagagcttctcctcccacactcaatttcagggaagcacaaccaagcttctctgttaaaaaaaaattaggcgtctaaagggccaaagcttagaaagttgaagctttttttgttgaggtgaaagtgaaatggttggcaaggataatctgagggctgaggacttgaacttgtgcttta

SEQ ID NO: 49428 - DNA, 271 bp, Glycine max
  unsure (1)..(271): unsure at all n locations; Clone ID: 701137110H1
cgggactgtaactagccgcagcacgaggagcagcctcaggaggagaaggatgtctcacaggangttcgagcacccaaggcacggttcactgggatttcttcccaggaagcgtgctgctcgtcacaggggaaaagtgcaaggcattccccaaggatgacccatccaaggcacccaagctcactgcattcttgggttacaaggccggtatgactcacattgttagagaggtcgagaagccaggatcaaagcttcacaagaaggaaacttgtga

SEQ ID NO: 49429 - DNA, 269 bp, Glycine max
  unsure (1)..(269): unsure at all n locations; Clone ID: 701137112H1
aaaatgaaggtccttgttttcttcgttgctacaattttngtagcatggcaatgccatgcgtacgatatgttccctctccgaatgaacactggctatggtgcccgtactccggaggtgaaatgcgcaagttngaggcttgctgtggaagcacacaacatctttggctttgagaccattcctgaagagtgcgttgaagcaacaaaggaatacatccatggcgaacaatatagatcagactccaaaacagttaaccaacaagcttactttta

SEQ ID NO: 49430 - DNA, 262 bp, Glycine max
  unsure (1)..(262): unsure at all n locations; Clone ID: 701137113H1
agcacccggtggcgatcaaaacgatgagggcacgaggtgggccgttttaattgccggttccaatggctactggaatnacaggcaccagtctgatgtttgccatgcgtatcaactactgaggaaaggtggtctcaaagaagaaaatattgttgtatttatgtatgatgacattgctttcaacgaagagaacccgcgacctggagtcattattaacagtccacatggaaatgatgtntacaagggagtccctaaggattacatt

SEQ ID NO: 49431 - DNA, 198 bp, Glycine max
  Clone ID: 701137114H1
cggcctcggaggggaaccagaaaattatgttaacaaaataatctggaaccctaatgtatcagtgtcatcatcagtgtgtagtttaagctagctttgctatggttacgttctttgagatgagagtcttgatgaacagtaccattctgatgtattgctttccttgaaagttaatgcatgcttcttatcttctgtctagct

SEQ ID NO: 49432 - DNA, 266 bp, Glycine max
  unsure (1)..(266): unsure at all n locations; Clone ID: 701137115H1
cgagctccgaatccagagcatcgggaatcgaccacgccctttgtcgtacnganngagggtttgacaaatgatgggtttattcctcagatattttcatctatgccagctctcaatgatgcagcttcttatcttgcacaaacaacatcatnccntaactggatgtttctctgattattcagtggaacattcccccagactttttggtgcttctgacactcgtgcaccagagcttgtggattttcctncttctgaaactaatgcatctt

SEQ ID NO: 49433 - DNA, 274 bp, Glycine max
  Clone ID: 701137116H1
gttcgagcacccaaggcacgggtcactgggatttctccccaggaagcgtgctgctcgtcacaggggaaaagtgaaggcattccccaaggatgacccatccaaggcacccaagctcactgcattcttgggttacaaggctggtatgactcacattgttagagaggtcgagaagccaggatcaaagcttcacaagaaggaaacatgtgagcctgttacaattattgagacccctccaatggttattgttggtgttgtgggttatgtgaaaactccc

SEQ ID NO: 49434 - DNA, 276 bp, Glycine max
  Clone ID: 701137117H1
ccgtcgtcgatgaagacttcttaaaaaaatatgatatcacctcgaacaatgcgattcttgcggaggacaagcacaagcctatgtatcaagaattggctgagaaatataatgtggagtacattgctggaggtgccactcagaattcaatcaaggttgctcaatggatgctccaagttcctggtgcaacaagttacatgggtggcataggaaaggataagtttggggaagagatgaagaagaactcaaagcttgctggtgtaaatgttcactattatg

SEQ ID NO: 49435 - DNA, 274 bp, Glycine max
  unsure (1)..(274): unsure at all n locations; Clone ID: 701137118H1
cttaactcaacttctgctacccacttctcttcttccaagtcncaccacgcttttctctacagtcatgggcaaggtcaagatcggaatcaacggatttggaagaattggccgtttggttgccagagtcgctctgcaaagagacgatgtggagctcgttgccgttaacgaccctttcattaccaccgattacatgacatacntgtttaaatacgacagtgttcacggacactggaagcatcacgatgtcaccgttaaggacgagaagacccttctc

SEQ ID NO: 49436 - DNA, 271 bp, Glycine max
  Clone ID: 701137119H1
ttctctcaccgtgaaagagagagagaggttaggctatggctgatgagagcgttgttgagtccccagtgaagaggcagagagatgatggtgaagaaaatggtgtctctgtttccatggacgcggagggtggcaaagaccctcttagtaacggtttatcatctgtgattcctgggtggttctctgaaatcagtgcaatgtggcctggagaggctcactccttgaaggtggaaaagattttgtttcaaggaaagtcagaataccaaaatgtcat

SEQ ID NO: 49437 - DNA, 268 bp, Glycine max
  unsure (1)..(268): unsure at all n locations; Clone ID: 701137120H1
tggatancctctccgatgacgaggaagcagagcagttgtttgttgcttttgccgagtttgaggaaaggtgtaaggagactgagcgtgcaagggctatatataagtttgctcttgatcatattcccaagggaagggcagaagatttgtatcgtanggncgtcgcatttgagaagcagtatggtgacagggaagggattgaggatgctattgttgggaagagaaggtttcagtatgaggacgaatgaaaaagaatcctttaaattatgat

SEQ ID NO: 49438 - DNA, 270 bp, Glycine max
  unsure (1)..(270): unsure at all n locations; Clone ID: 701137122H1
ctcgtgtcaggaaggaaggcgggattccacagaanatacaacnnccagaatttgcggatacaaaggtgcaaagagcagctgctggtgcactgcgaaccntnaacanngnaaatgatgaaaataaaaatcagattnttgaatgcaatgccctnccaactctgattctaatncctttgctcagaagatgctgctattcattatgaagcggttngtgnccattggaaatctggtccacncttcacctgatgcaaagaangaagttctcntgct

SEQ ID NO: 49439 - DNA, 267 bp, Glycine max
  unsure (1)..(267): unsure at all n locations; Clone ID: 701137123H1
aacttcgccggagctctaacggcgaggcccaactccgatgagccgaaaccggcaccggtgccagctgttcccccgaagaaggtcatcatcnagagcgctgatatgatccccgacatgcagaaggaggccgttgatatcgccgtcgccgcgtttgagaagtacaatgtggcgaaagacgttgcggagagataaagaaggagttcgataagaggcatggccccacgtggcattgtatcgttggacgtaattttggctcatatgtgactc

SEQ ID NO: 49440 - DNA, 268 bp, Glycine max
  unsure (1)..(268): unsure at all n locations; Clone ID: 701137124H1
cnnanntannntaaatannttggaantngtnnanncaaatnaagaacaaaccataccccaagtcacggttttgccgtggtgttcctgatcccaagatcaggatttacgatgttggtatgaagaagaagggtgttgatgagtttcctttctgtgtccatctggttagttgggagaaggaaaacgtttctagtgaggccctggaagctgctcgtattgcttgcaacaagtacatggccaantnnnntccgannnnnngctttccacttga

SEQ ID NO: 49441 - DNA, 269 bp, Glycine max
  unsure (1)..(269): unsure at all n locations; Clone ID: 701137125H1
ttgtggagaatctcgcaatttctagttaccagattttccaaatttganatttttacgcacttagagtaaatgcnagancctttaagaaagattgggtattgggtatcttgttttccaactcaataagatagnggggaggaaagagatatggctgtaggtagcaaaaccagaaatatgcttgaaggtctggttaaagaaggatcatttaaatggttgcttggcaagaagagttacttttatgaagaatttgaagagatggaaaattctcc

SEQ ID NO: 49442 - DNA, 238 bp, Glycine max
  Clone ID: 701137126H1
ctcggttgctatcagcgagtgagagtgagtgagtggttctcttgcagcaacaaggtttagtgacaccaaacagacgggaaatgggtcgtggggtcagtgctggtggtggacagagttccttggattatctctttggcagtggggtacctgccagcagtgcaaatggtgctcgcactcaaaatgcaagtgctccttcaccaccggttgataagcaaagtccagcaccagcaccagcacc

SEQ ID NO: 49443 - DNA, 272 bp, Glycine max
  unsure (1)..(272): unsure at all n locations; Clone ID: 701137128H1
ctaaagggnagatattttagaagaccctgnctaatgaacctaaaaaggacatgtacatgatgtctgtagacccagaggatgctcctgatcaagcagaatatgtggaaattggattagagtcggggcttcctgtttcagtcnctgggaagangctttcaccagcatctttacttgctgagctcaatgagattggtggaaagcatggaattggcaggattgacatggttgagaatcggcttgtaggtatgaagagccgaggagtgtacganact

SEQ ID NO: 49444 - DNA, 252 bp, Glycine max
  Clone ID: 701137131H1
aaaaaccagaaacaacaaacacaaaccgaaaaggcgaaaggggttttccgagtgagatctagggtttccatcgattcggagagaggatattgatcgaacgacctcagcgagcaaggacaggaggtggagtactagatcatggattcggtgccttcgaattcgcatggaaacctcgatgagcagatttctcagctcatgcagtgcaaacccttgtccgagcaagaggtaagggtcttgtgtgataaggcaaaa

SEQ ID NO: 49445 - DNA, 273 bp, Glycine max
  unsure (1)..(273): unsure at all n locations; Clone ID: 701137132H1
gtcattgggagcactcaacctaaactattcaagttgtgaaagcacatcacaagaaaattcgcaagcgatggatccgaagctaaaagaggtttctcagctcttcgatcgctttaaggcttcgtttatcaggaacgactttgatacctgttccaatctcctttctcagctaaaggtgtnacttacaggtttcagaagccttccaccgttgtttgcagatacacctaatgcagtncatgaattnacaatagcaagggatatatacgagcatgctgt

SEQ ID NO: 49446 - DNA, 272 bp, Glycine max
  Clone ID: 701137134H1
ggagatcactgtcttcaaccacagtaaccaagccaagagacacactttatcttccttcatgggaatatgagaatgaaactcactgtgccaccactcatatcaacttggtggtaggtagggcttgtgtgtggttcagaaagaagctttacttgtaaaaaaaaggagtgagaaagatggccactagagaatagagagagaaagagccacccgacttgaaaaaaaaaaatacaattgatttttagggataataatcatgtagcaatctcttttgt

SEQ ID NO: 49447 - DNA, 78 bp, Glycine max
  unsure (1)..(78): unsure at all n locations; Clone ID: 701137135H1
ggagttggnggtnntccgaatgnctgtcncttcctctgctcacgttcgttnaatttcnttgtggtaccngttagagnc

SEQ ID NO: 49448 - DNA, 268 bp, Glycine max
  unsure (1)..(268): unsure at all n locations; Clone ID: 701137136H1
gtgancccnaaacncntgacattggacatntctntaaactcctntnctggcaccatncccnccagcngtncagannctnagaagactcacttggttnnagnnccaaaacaattccatatntggggctatncctgacttcaaccttccaagtctcnagcatttgaacttgagcnataataacttgaatggctcaattccaaacncntaaanggnnttcccntacacntctttgttgggaacgntctcttatgcgggccacctctcaanc

SEQ ID NO: 49449 - DNA, 268 bp, Glycine max
  unsure (1)..(268): unsure at all n locations; Clone ID: 701137138H1
actcaacantcattgagtgtncatagtgataattgggtgctngatgagaccggtttaactgaaaagttctatcagcttcttcctagcatggcttggaaccctctaatggataagatgatgaatgaacttcattcacaagggaaaaccattcaagacattgtagaaattctgaataggncaccaatgcatcctaggactgtccctggctattgaggcagcttattctcttgggtgtcacctgaagattgtgagtgacgcaaacattttc

SEQ ID NO: 49450 - DNA, 249 bp, Glycine max
  unsure (1)..(249): unsure at all n locations; Clone ID: 701137140H1
gcaaaaattaccaacctccaatgaaggncgtggttactcacaacctactggaaccagtttgtggtgaatttgacggaagttcaaccaataattttcatgatgataaaacacccagaaagaatgatttcaatcaaatgaatggtgccaattctgtttcagaagatgaaaatgaggatcttcttgctgactttattgatgaagacagtcaactaccaagtcgaagttctcaaccccatcattcaagaactc

SEQ ID NO: 49451 - DNA, 266 bp, Glycine max
  Clone ID: 701137141H1
ggaggtggatgcgttgattgaaaggaggtgtgaggagaaatgtccatatctctgtacctctagtttggcactgtgagtgctcctgtattgaggttttcgtaaaatcactgatcttgccatgaaccaagatactcctggagataatctcgtttgctaaaaaattgagatgtgagatgccatcttatgaatgttccatctacgcagggttttcaggtataaatgaagccatgtcaatgtcacctggttgtttgaagaaaaatggtggc

SEQ ID NO: 49452 - DNA, 243 bp, Glycine max
  unsure (1)..(243): unsure at all n locations; Clone ID: 701137143H1
cgccgattcatccnctcgcaagnaatttgancnatantntggacgnacatttgcaattatgggggaagtnanttnnatgcaggatgatnntnatcgtgtggagactacncgaactcaatttggaagtntannttaaaagacatggagatttgacagancggcttgctagggnttctgagnaagataanatntgagcgtctaccagaaggngtntggnactgcacgagcntctntnaactgggt

SEQ ID NO: 49453 - DNA, 270 bp, Glycine max
  unsure (1)..(270): unsure at all n locations; Clone ID: 701137147H1
tttgattagctctaataaggttaaggaccagagagagaaagagaaataagaagaaaaacacaagatgggttattggaagtctaaggttcttcccaagatcaagaaggttttcgagaagaatagcaccaagaaagctgctgctgctgaggccaccangtcctttgatgagtcaaaggaggaatacaacaaagcctttgaagaaaagaagactgaacttcaaaccaaagttgttgaaatatatgaggctcatcaactgaaatcaagagtttg

SEQ ID NO: 49454 - DNA, 277 bp, Glycine max
  unsure (1)..(277): unsure at all n locations; Clone ID: 701137148H1
gntncnaggagncaagncanagtagtacagattantancaatgggctaccanggnntacattgtttattntnctacgtatggacntgntgagaagctagctagagagatagaaaaaggggctgcttctgtggagggagtagaagcaaaactgtggcaggtacctgaaacattgcctgaagaagtccttgctaagttgggagcacctccaaagagtgatgttccaattattactcccaatgagcttcctgaggctgatggctttttgtttggttttcc

SEQ ID NO: 49455 - DNA, 205 bp, Glycine max
  unsure (1)..(205): unsure at all n locations; Clone ID: 701137149H1
gtggtcagacanactttgataagntatatnaatnntancgntatnaacatgcaaatcaancatttacatncacattatattaccataaaaaatganctgagatttaatctgttcatantctgttctggatcntgncatggctctttcgnnttntcnatttcttctgttctcaatcagcaattnctncctcgcntcttcntnncaa

SEQ ID NO: 49456 - DNA, 270 bp, Glycine max
  unsure (1)..(270): unsure at all n locations; Clone ID: 701137151H1
caaagtgcatcttctttttgttgttctctcanactttaacaatctcataaatanncaatcagannnnnnnnnnnnnnnnnttgaattcgaaaaatcgtagcgtaggtntggttgcgattgaaacggtacgatgggaagaggaaaattcaagagcaagcccaccggtcgccgccagttctccaccccggaagatatgcttgctggaacctctaaccgtcctcgaacttttagacaganagaagctgagcatgaagaggagcctgaggangt

SEQ ID NO: 49457 - DNA, 175 bp, Glycine max
  unsure (1)..(175): unsure at all n locations; Clone ID: 701137152H1
gtttttatacaaacctcatgtaggtgggagagagagtgtctttcttggctcatagcatagcatcactatggctcttctgagtcgagcctcttcacgcttccctcagctggtttcccctcaaagagttgtttccctccacacaacatacganngngnnnncnngggnnnnncnnng

SEQ ID NO: 49458 - DNA, 267 bp, Glycine max
  unsure (1)..(267): unsure at all n locations; Clone ID: 701137153H1
ctggtgaaaacaatgatggtcatggatcaaataaaaatgtaaaanttggcaggccagcatctgccaaaacagcttcactacaggcaaagaatatgttaaatttancnnngaatttggttgcacctggtgaccatattgaagacttgaaacttccaaatcaatcggatgtctctggaattatttcgaaaaagaaaactgctgatactaaaccaatattgaacccttctgtctctttgaaaacatcaagtgatgatgctcctgctgtaa

SEQ ID NO: 49459 - DNA, 264 bp, Glycine max
  unsure (1)..(264): unsure at all n locations; Clone ID: 701137154H1
tctggtcgtgggaaaggtggcaagggtttgggaaagggncgtgccaagaggcacagaaaagttcttcgtgataacattcaaggtatcacgaaacctgcgattcgnaggttagcgagaagaggtggcgttaagaggatcagtggtttgntctatgaggaaaccagaggagttctgaagattttcttggagaacgtgattcgagatgctgtgacctacaccgagcacgctaggaggaagacggtgactgccatggatgtggtttat

SEQ ID NO: 49460 - DNA, 266 bp, Glycine max
  Clone ID: 701137155H1
gcttggtgatgtccctttctgttctcttcactcttggtcttgcgagagaaagccatgccagagacgaagatttttggcatgctgtttggccaaacactcccattccaagttcattgcgagatcttctaaagcctggccctgcaagtgttgaaatcgatgatcaccctatgcaaattgaagaaacacagtacccgaaaaccttcttctataaagaagaccttcatccaggcaaaacaatgaaagtacaattcagcaagcctcccttt

SEQ ID NO: 49461 - DNA, 265 bp, Glycine max
  unsure (1)..(265): unsure at all n locations; Clone ID: 701137157H1
tgaaccccattttccattggcaattgnagtgatggcgagcgccatgttagttggcgtctatgaccaccgacgacgtcgtncagagactcagagcctctcgtatgctcgaaaacggcattcgnattctcaaggaagaggtgcagagatcgaatcgggaatgggaatcatacaaggagaagataaaaaataacgaggagaaggttaaacttcataagcagttgccctacctcgttgctaacattgttgagatattggatatgaatcc

SEQ ID NO: 49462 - DNA, 263 bp, Glycine max
  Clone ID: 701137158H1
agtacaaagctgattataaataccaaccttttgtggcaaagtataccaatttcaaagctagtggttgctcagcctatgcccctcgttggtgccatccagtttcagcctcaccatataggtctggtgggttgagtaggcaacaacatagtgccatgagatgggtgcaaagataccacatggtttataactattgtcaagaccccaagagagatcacagcctaacacctgagtgttggggttgaattgaagaattgaagtattca

SEQ ID NO: 49463 - DNA, 268 bp, Glycine max
  unsure (1)..(268): unsure at all n locations; Clone ID: 701137161H1
catctctncaacctttcactttcgtttctcagttttattcgaatccctctctcaatctcctttccaaatggccancgttgaggttgcacagcaaacaccaacaacagttccagaaaatgaaacaacngaggtaagcaagacccaggaaacaaccccagtcactgaggctcctgcnacagaacaaccagcagctgaggttcctgcaacagaacaaccagccgctgaggctcctgccccagaatcaaccaccgaagcaccaaaggaagaa

SEQ ID NO: 49464 - DNA, 269 bp, Glycine max
  Clone ID: 701137162H1
agggtggtgccggaatcacgctctttgtccccgtcgacgacgcattcgcggatctccctccctctgttgctcttcagtctcttcccgcggataagaaagccgttgttctcaaattccacgtgctccattcgtattaccctcttggttctcttgaatcagttgttaacccctttcaacctacccttgctactgaggccatgggtgctggcagcttcacgctcaacatttcccgcgtgaacggctctgtcgccatcaacaccggcatcgtt

SEQ ID NO: 49465 - DNA, 278 bp, Glycine max
  unsure (1)..(278): unsure at all n locations; Clone ID: 701137164H1
tatnataccacttcatcaacctnacnctgacaacaatattgtaaaactcnnaatctagtttcatactttttttcttcttcttgaaatggctctccaggctgcttctcttgttcctgcttctttctcggttcttaaagagggaaagagtggtgtgtctctcaaggactccaccttgttcggtctttcattttcagaacctatcaaagctaacttcagctcttctgcattgaggtntcaagagggaattcgaacaaaagctctgtgctgtgagggccgaa

SEQ ID NO: 49466 - DNA, 273 bp, Glycine max
  unsure (1)..(273): unsure at all n locations; Clone ID: 701137165H1
caaacactctctctctgtctctcgaaaattctcagtttgcagagaaaatctgaatcatgtcgtggcaagcgtatgtcgacgatcaccttctgtgtgacatcgaaggtaaccacctcactcacgctgctatcatcggccaagacggcagcgtttgggctcagagtaccgacttccctcagttcaaacctgaggagataatgccatcatgaatgactttaatgagcctgggatcnattgctcaaatnggntcncccctcggnggncccaattant

SEQ ID NO: 49467 - DNA, 244 bp, Glycine max
  unsure (1)..(244): unsure at all n locations; Clone ID: 701137168H1
tgatagttcaaagaaggctgatccanaggcacaggccttgannactgcnaaggcagttaagtccggtgctaactttaagaagaagaccaagaagatccgaacatctgttaccttccatcgaccaangacttnganaaaggntaggaaccccaaatatccacgcattagtgctctcnncaggaacaagctnggatcantatnagatattgaagtttctcttnagactgagtctgcatgaagagat

SEQ ID NO: 49468 - DNA, 213 bp, Glycine max
  unsure (1)..(213): unsure at all n locations; Clone ID: 701137169H1
gtttgtttntctttgttgctgcagtagttttngtagcatggccatgccatggcgcaggctaccaaaggttccctctccgaatgnnaactggctatggtgagcananncngaggtaaaatgcgcaagttttaggcttgctgtggaagcacacaacatacnanaaatcaaaannanncctgaanantgngnnnaancaanaaangactacatnaa

SEQ ID NO: 49469 - DNA, 264 bp, Glycine max
  unsure (1)..(264): unsure at all n locations; Clone ID: 701137171H1
catgtctatcgttttaaccaacaattagatctccttcgcattggccaagaccttgagttgtttgtcaagactatgccaggtttaagtgcttacgctgagaatccacaagangctgcagagcnctcttattccantnnnggagngagaanaagcngctgtncctcaggagtntcaccccaggacgccagtnaaacttggagcaactgcaggtttaaggcaattggaaggggatgcttctgataggatattgcaggcggtcagtga

SEQ ID NO: 49470 - DNA, 243 bp, Glycine max
  unsure (1)..(243): unsure at all n locations; Clone ID: 701137172H1
aactctttctcttcttccgtttcctcgtctcacacccaaacctcatggaaggcttctgtcaacgaacgtcttgattttgggaagatgggatatgggtgcaatcattaccggagaagatgcaggattcgtgctccctgctgcaacgagacnnactcatgccgtcactgtcataacgacgctgcggtatttctttctttctccttcaaattttttgccctnntgcttttatctcatctgggtttg

SEQ ID NO: 49471 - DNA, 270 bp, Glycine max
  unsure (1)..(270): unsure at all n locations; Clone ID: 701137173H1
ggngntggatncgttgattntanaggaggtgtnaggagaaangttccatatctcngncacctnctantttggcactgtgngtgctcctgtattgaggttttcgtaaaatcactgatcttgccatgaaccaagatactcctggagataatctcgtttgcnaaanaattgagatgtgagatgccatcttntgaatgttccatctacgcagggntttcaggtataaatgaagccatgtcaatgtcacctggttgtttgangaaaaatggtggc

SEQ ID NO: 49472 - DNA, 267 bp, Glycine max
  unsure (1)..(267): unsure at all n locations; Clone ID: 701137175H1
aagatatnngtgttgaagactctacaactatatatttaaacntctcttacttggatcaactcacaaccacncnctntnattcnnaggnnttccttnccaggncatacntnatngnattattacntnccctctntgcattccaaatggccactgttgnggntgcanagcaaacaccaanaantgtgacagagnatgaaacaacgactgaggtaaccaagattgaggaaactaccccagancagcnagcnnccgaggntactgccccag

SEQ ID NO: 49473 - DNA, 153 bp, Glycine max
  unsure (1)..(153): unsure at all n locations; Clone ID: 701137176H1
ggccacctccaacttctctantgttctctccgtctccctagccttctttntggtgngacttaccaaggcanactcgaccgataccgtttctttcaccttcaacaagttntnnncagncncacacaacatacgagnnngnnanagaggnnagta

SEQ ID NO: 49474 - DNA, 264 bp, Glycine max
  unsure (1)..(264): unsure at all n locations; Clone ID: 701137177H1
ttcttctctgttctgttatttcagtgcagcagcagaaaatgaccatcctcattgagcaacctgcccttgagttacaagttgaaggcaacaatgtgcatgctgaagaaaccaatgagcttgtattggatggtggatttccattgccaaaggatggatatatggccccagaaatcaattcatttggccactccttcagagantatgatgctgaaagtgagaggcaaaaaggtgtggaggaattttataggttgcaacacatcaacc

SEQ ID NO: 49475 - DNA, 272 bp, Glycine max
  unsure (1)..(272): unsure at all n locations; Clone ID: 701137178H1
attcgcatatgatncgttaacgttagcaanaangatggatgantcgaagcagcagnagcaangaaaaaaaaactancgaaagagaagngntccaacagacgaagatgaacttcctcaatctcaaagtaanaatgaatccgangacgaacgancntcgaagaatggcattggaggaaattaagctcctccagaagcagcggganagganatcgncncattccagcaaaccctagtttgcnaggtgcagagtggaaccggcggcggtttagctg

SEQ ID NO: 49476 - DNA, 271 bp, Glycine max
  unsure (1)..(271): unsure at all n locations; Clone ID: 701137179H1
gggctatttaattatacttcacatgctcccttataatttttggaaattgatatataccaaagccgnaagatttttcccatctttgctcgtgatatagttcntctggctcacaagccaataaaggcaaccacaaccttcaacttcaacagcactntcncacnttcantgtctagtgatccaccttcacttcccgtttccaataatttaaatcacactctaatcagttctcaggattcctgtttgnatcatattncacaattggaacttcaaa

SEQ ID NO: 49477 - DNA, 268 bp, Glycine max
  Clone ID: 701137180H1
gagacaagacagagtagtacagattactaccaatggctaccaaggtttacattgtttattattctacgtatggacatgttgagaagctagctagagagatagaaaaaggggctgcttctgtggagggagtagaagcaaaactgtggcaggtacctgaaacattgcctgaagaagtccttgctaagttgggagcacctccaaagagtgatgttccaattattactcccaatgagcttcctgaggctgatggctttttgtttggttttcc

SEQ ID NO: 49478 - DNA, 260 bp, Glycine max
  unsure (1)..(260): unsure at all n locations; Clone ID: 701137181H1
ctcanctctncttcttttcaatcagtnacatttnctttggtattcnantggncactgttgaggttgtntcagcataggnttcnctcccaganggcacaaaagacgnatcattganggctnangagnagnagaanncagaagaagttgttnagactcnaacaccaacaccagaanatgtcgtcactgagcaaaccaaggnggaaagtactgnggccccacnacctgnagcttcagnagacangccctcggttgannttgng

SEQ ID NO: 49479 - DNA, 261 bp, Glycine max
  unsure (1)..(261): unsure at all n locations; Clone ID: 701137187H1
ttcttactgttgttcccgtttgttgttgcaatcacagagttcgcgactaatgttacgattctcaccttttctcgctactccccctactccttcttccctctctttctcctccaactgccacgtgtcctcttccgctcaagcaacnnnnnnnnnnnnnnnnnnnnnnnnnncccttccgcaaagctcacagctggtggcattggaatatgctganctcaacctctctnacaactaggatcnggtcagncaggntaangcagc

SEQ ID NO: 49480 - DNA, 264 bp, Glycine max
  unsure (1)..(264): unsure at all n locations; Clone ID: 701137188H1
tcctgctaaagaaagcaatgaatttgtggacaaccttattaaagatattgatacattgggtatcaaatatgaacaaattacatatacgtcagattacttccctgagttgatggagatggctgaaaaattaattcgccagggtaaagcatatgttgatgacacaccacgtgaacaaatgcnaaaagagagaatggatggcatagattctaaatgcagaaataatagtgtagaggagaatctaaaattgtggaaggnaatgattgc

SEQ ID NO: 49481 - DNA, 262 bp, Glycine max
  Clone ID: 701137189H1
cgaaccttcactctgctctcacccttattcctctctttcctttctttcttctgcaacaaaaatcatgtctgggtccttgggattcttctttgtgggtcttacgttgttgttgttggtcggggtggctaatgctgtggccaacacttccaacaaatttgatcaactcttccaaccaagctgggcttttgaccacttcattcatgaaggggatctcctcaaactcaaactagacaatttttccggcgctggttttacttccaag

SEQ ID NO: 49482 - DNA, 264 bp, Glycine max
  unsure (1)..(264): unsure at all n locations; Clone ID: 701137190H1
tanccctcagactccgtttcactctgagaggnagtgctgcagancacacncccaaaacagtgngaggnncaggtgtgtgaggnntagagtgcganttggnagcagacncgtttgcnagggctgnnncnttgcnnatttaacaccagagnngccgtctgtgatttctcttcttttatctttttgtttgcgtcggaagacgncacacacccttcatctgcgaactnagtttgtgatcattgngnanttncagaanggantgnctct

SEQ ID NO: 49483 - DNA, 268 bp, Glycine max
  unsure (1)..(268): unsure at all n locations; Clone ID: 701137194H1
gcacctctcacccttctctctataggnaatagcanncgtgttttcccagctntagtnatctnttcaancanaacctctgctacactctngcatcctacacccccactttttctagtantantagtactacattatctagtgttcganagggnangcnttcntanttcantgctcagttcttcttcggcttcgttttngaggcagttaagtgcaaaanaggagggttggncagagagatnctatcatagtggtcgtggtggctggggna

SEQ ID NO: 49484 - DNA, 268 bp, Glycine max
  unsure (1)..(268): unsure at all n locations; Clone ID: 701137195H1
tgcgaatgtgaaaaacaacaaccaacgaggattcgaaatcacagaggaaaagaaagatctcacgatgttcaatgttataggtttcgttgttgacgatggattcggtggcgtacanggnattgctctacacannntncntnnacnnannttgtnttngtctgcnaactcattctccatcaanctctcntctcngcntnngatngaaaanctgaaaatgctnctgagttgtntgagngatgcatcacagtacatanaanttaaagattat

SEQ ID NO: 49485 - DNA, 231 bp, Glycine max
  unsure (1)..(231): unsure at all n locations; Clone ID: 701137196H1
gtatgggaacgacggtggcgggtctagcgccgggtctgtcacggaagctgaagaaggttctagaatctcggatcgatacgccagacctcttgtcttcgctcaacacgctctcttccttctacgatgacaacactcctcaggcgcgtcgcaacctccgatccaccatcgagaagcgcgccctctccatcaaccgcgaattcctcgacgcttcccacgccgcgcagtggnttt

SEQ ID NO: 49486 - DNA, 285 bp, Glycine max
  Clone ID: 701137201H1
gtatgatgactttgaatcgagaccaagtgttaccaaatatgatgatttagaactcaaatcaagcattaccaaaaacgatgattttgaaccgagaccaaatattagcaagtatgatgactttgcatccaggtcaaataccaagtacgattctgaacctaaagcaagtgctaccaagtatagtgattaaatgaaaatcaagtaattgtataatacagtcgaagaaaatcgtgctccatatcatgtatcctatgaataaatagggtgtgagtattatagattttgata

SEQ ID NO: 49487 - DNA, 276 bp, Glycine max
  Clone ID: 701137203H1
gctctttgaagaaagaagggtctttgcttgattttggagatgtctctgctctcagatctcatcaaccttaacctctccgataccaccgagaaggtgatcgcagagtacatatggatcggtggatcaggaatggacctgaggagcaaagcaaggactctcccaggaccagttagcgacccttcagagcttcccaagtggaactatgatggttccagcacaggtcaagctcctggtgaagacagtgaagtgattttatacccacaagccatttcaggg

SEQ ID NO: 49488 - DNA, 277 bp, Glycine max
  Clone ID: 701137204H1
gccacttctgaatctattgaatcaacaatcatgtcggacgaagagcaccatttcgagtccaaggccgacgccggagcctccaaaacctaccctcagcaagccggtaccatccgcaagaacggctacatcgtcatcaaaggccgcccctggcaaggttgtggaagtttcgacttccaaaactggaaagcacggtcacgctaagtgtcactttgttggaattgatattttcactgccaagaaacttgaggatattgtgccctcttctcacaactgtgat

SEQ ID NO: 49489 - DNA, 270 bp, Glycine max
  unsure (1)..(270): unsure at all n locations; Clone ID: 701137205H1
ttaatttaaggtgaaggtcctgtggtttgagtagccaaagggccaaccttaccttagttatggatgttgaggcagagattgatcgcttgccaattgatttgttggctcatatttttgttctgttcacttccttcactgatttggcacaggcgagtggtgtttgcaagaaatggaaancangggtgaaggagtctcttgctcggagacacaatctcagctttgccggttggaagatggatgatgactccactgctcgcttgtttatcatgc

SEQ ID NO: 49490 - DNA, 275 bp, Glycine max
  unsure (1)..(275): unsure at all n locations; Clone ID: 701137206H1
gcagccccaatatctgggtgaggcctatcagtggactcacaatggtggttgaccttgaacttcatgaagatcgttcagtatcacgacggtggcattataccagtaccaactgccgacaacactgaataccgcttttcacatcagaacccaccattcggtccaagacaacatagtctagcngcccatcaaccacagggtccaggcttccaaatcaacggacacagtattagttgggccaactggaagttccatattggatttgatccacgtgccgg

SEQ ID NO: 49491 - DNA, 276 bp, Glycine max
  Clone ID: 701137207H1
aaaacatggtccaagaaaagaaactagttgacgaggtgtccggttggctcaaaatttatgacgacggttcagtggaccggacatggtccggaccggaccaattcaagttcatggccgaaccggcccctccccatgaacaattcatagacggcgttgccattcgcgacgtcgccgttactcacggtggtggccagagtggccaccatgtccgactttatctgccagagataaagccggaagacagccaaaaactaccaattgtcctccatttccacg

SEQ ID NO: 49492 - DNA, 282 bp, Glycine max
  unsure (1)..(282): unsure at all n locations; Clone ID: 701137208H1
tctctcaatctcctttccaaatggccagcgttgaggttgcacagcaaacaccaacaacagttccagaaaatgaaacaaccgaggtaagcaagacccaggaaacaaccccagtcactgaggctcctgcaacagaacaaccagcagctgaggttcctgcaacagancaaccagccgctgaggctcctgccccagaatcaaccaccgaagcaccaaaggaagaaaccaccgaggcaccaacagaaacagtagaaaaaacaactacagaagtagccccagaggagc

SEQ ID NO: 49493 - DNA, 286 bp, Glycine max
  unsure (1)..(286): unsure at all n locations; Clone ID: 701137209H1
tcgtgaggagaatatgaagttgtttgttttctttgttgctgcagtagttttggtagcatggccatgccatggcgcaggctaccaaaggttccctctccgaatgaaaactggctatggtgagcgttcttcggaggtaaaatgcgcaagttttaggcttgctgtggaagcacacaacatccgagcctttaaaaccnttcctgaagagtgcgttgaaccaacaaaggactacattaatggcgaacaatttagatcagactctaaaacagttaaccaacaagctttcttt

SEQ ID NO: 49494 - DNA, 286 bp, Glycine max
  unsure (1)..(286): unsure at all n locations; Clone ID: 701137210H1
cgaaaaanatggggtatgtttaccaagatgttgacattccatggctccagaaaaggactaaacccaaaagaactagaaaagctaagcaggtggcgttcacacaacagtttggcngcattggtgcagcaatcgctgctgagactgggccaagttccaagtttcctctcactttattggactcaaaggtaactctacttgttaaaaggccaaagcagttgaggagcaagaaggacaaggaggaagacgaagaagtgttggtgattgatgggatcgagtttgatgggga

SEQ ID NO: 49495 - DNA, 288 bp, Glycine max
  unsure (1)..(288): unsure at all n locations; Clone ID: 701137211H1
atggcttcaagtcaggaggaggtgacccttttgggagctactggaagcccatttgtgtgcagggttcatattgccctnaagttgaagggagttcaatacaaatatgtcgaagaaaatttnaggaacaagagtgaactgcttctcaaatccaacccagttcacaagaaggttccagtgtttattcacaatgagaagcccatagcagagtctcttgtgattgttgaatacattgatgagacatggaagaacaaccccatcttgccttctgatccttaccaaagagccttg

SEQ ID NO: 49496 - DNA, 286 bp, Glycine max
  unsure (1)..(286): unsure at all n locations; Clone ID: 701137213H1
caaaactgaagctcgaggaagataactacgatgaaacaagnggaatggatgattacgacagcgttgctatcgnngctgtttgtttcatcttttccgccgttgagttacggagttgttcctcctcgtactctgctcaataagctgtcggagggcaaatatctcaacactcaggagctctngttcgaccaaaccctcgatcacttctctccctatgatcaccgacaattccggcaagttactatgngtttctagatatttccggattcccgatggaccatttttttgg

SEQ ID NO: 49497 - DNA, 291 bp, Glycine max
  unsure (1)..(291): unsure at all n locations; Clone ID: 701137214H1
agagaagaaggaagttgaggtgacggaagagaagaaggaagcagaagtgatagaagagaagaaggaaacagaagtgatagaagagaagaaggaaagtgttgttcctattagtccagaggaagttgagatatggggaattcccctgcttggggacgagaggagcgatgtgattctgctaaannttctccgggccagggatttcaaggtgaaggatgccttgagcatgctgagaaacacggtgcgttggagaaaggnattcggaatcgagggtcttgtcgaggaagatcttgg

SEQ ID NO: 49498 - DNA, 294 bp, Glycine max
  unsure (1)..(294): unsure at all n locations; Clone ID: 701137215H1
tgtgnnaatgacaaaaaaggccacctattacttgccctagggctagtgctctgcgtcaccctgaccttcttcccaagggtgaccgaagtgagggtgcccttttgcatgcgaccctaggaacgggctcacgagggggttcaagttctgcaacacgcacgtgccgatccangtgagggtgcaggnccctcatagngaggctcacattgccggaaaanattaggctcgtcgttaanaatgccatcgccgngcccanncaggcatccaaggatacgagtggtgnncggangcgctcca

SEQ ID NO: 49499 - DNA, 279 bp, Glycine max
  Clone ID: 701137218H1
ggagatggaagttgaagggtcatcgaagaagatgatagcgactcaggaggagatggtggaggccagggttcctctggcctacagggaccagtgcgcccacttgctcatccctctcaacaagtgcaggcaggccgagttctacctcccatggaagtgccaggaccagcgtcactcctacgaaaagtgccagtacgagctcgttatggagagaatgctccagatgcaaaagatccgcgagcaccaacaaaaccccaacgccaaacaaccccttatcgcgct

SEQ ID NO: 49500 - DNA, 277 bp, Glycine max
  unsure (1)..(277): unsure at all n locations; Clone ID: 701137219H1
ttccacttcactaccatctntcattcagatgtcatctactacacactccagcttcagtgaaaaactcatcacccctncaaaagaantttcaaattgggacacccacaacaactgcaaganacacacacacaacaatttcttngtcttttccttctcctttatgcaaagctcttcacaaatcagttcctttggctgcttcactttcaattcttctctggtcaacccctgcacatgctgggttcatgtcaggaatttctggaatagaggctattcctgg

SEQ ID NO: 49501 - DNA, 276 bp, Glycine max
  unsure (1)..(276): unsure at all n locations; Clone ID: 701137220H1
ctctcactatatcctcttcttccacccttcttgatggcnaggctccaagacagtcaccagctgcttcccctcaatgtgtgagcctcccccctccccctttgcactctcagaaccgttcatggaagaccactgcttattgtcgcaaggttgctcgaaaagttatggcaatggccacaggagangcaccagctgangctaccccaactgaggtgccagagattgtcaagactcttcaagaaacttgggacaaagttgatgataagtatgcagtgagtt

SEQ ID NO: 49502 - DNA, 270 bp, Glycine max
  unsure (1)..(270): unsure at all n locations; Clone ID: 701137221H1
cttttgaagtacagagangaagaattgaagaatgtaagaggggatggaactggagagcgcaaggaatgggataggatctatgattatgatgtctacantgacttgggcannccggatagcggtgataaatatgcacgccccgttcttggtggttcagccttaccttaccctcgcagagncanaaccggaagaggaaaaactagaaaagatcccaacagtgagaagccgagcgattttgtttaccttccaagagatgaagcattggtcatt

SEQ ID NO: 49503 - DNA, 277 bp, Glycine max
  unsure (1)..(277): unsure at all n locations; Clone ID: 701137223H1
agagatcgggggagtgtacgagaaaaagaaaacaaacggcgtagttcgcctaagagaagtggcggtgaagttgagactcagagcgcgcgatccaaaactcgagaaatcgaaacactctatgatcatcatctcttagtatatatatatacttccacacnngatacnannnncnnnnnnnnnnnnnnnnnnnnataagcactactcataggtatattattcttatcattgccgttttatcatcatgagcaccganaaggaganacnatcttcaccttct

SEQ ID NO: 49504 - DNA, 284 bp, Glycine max
  unsure (1)..(284): unsure at all n locations; Clone ID: 701137224H1
cgagaacgagaaagggaacgtgaaagggatcgcattatggagcggcgcgagaaggaaagggagcgagagcgcaaacgtgcacttgaaactaagcctgaacgaactcctgcgagatcctccanggatccccgtggtacttcaaaagatccccgtggtacttcaaaagatccccgtgggtcgtctttgacaaaggaggggagatctacacgacgggactccccacatcatggagcattacataggcaccattcacctgttaaagaaaaacggagagaatatgtctg

SEQ ID NO: 49505 - DNA, 286 bp, Glycine max
  Clone ID: 701137225H1
agatccaaacggttgcccgaaggaacgaattaagaatattgcaagagtagttagttgcgtcgccaacttcatcggaaaaatttgaaaatttctggggaaaaaaaagccatcatcaccaccaacagcgacaacaaggacagagttaaaagttcctgttctgttttcaggaacacacagcaacgttgaacgttcgtttttttttgttttttttttgcaaagaacagagcaggaaaaaaacagaacaacactcacaacaggaattttcccaaattgttggtgttcgtaa

SEQ ID NO: 49506 - DNA, 286 bp, Glycine max
  unsure (1)..(286): unsure at all n locations; Clone ID: 701137226H1
cactacctagcttgttcttaaattccacacaaacacaacaannaactattagcatcatctactttctagcttattgttcaagagttgtgatcaagaatgagttcaacaagccgtgcttggacttggaccgtggcggcaagtgttggagtggtggaggccttgaaggaccaaggtatatgcaggtggaacagtgtgatgagatcagcacaacaacatgctaaacataatatgaagtctttgtctcagaccaagaagctttcttctcaatcatctgttatggcttcag

SEQ ID NO: 49507 - DNA, 285 bp, Glycine max
  unsure (1)..(285): unsure at all n locations; Clone ID: 701137227H1
aggtcaccaactggggtgcttcaatttnntccctggtgattcctgataagaatggaaagttgagtgatgttgttcttggatatgattctgttaaggattacactaatgatacaacatatnctggagcaactgttggccgggttgctaacagaattggaggagctcagtttactctaaatggaatccattacaaattagttgctaatgaaggaaacaatacacttcatggtggagccagaggatttagtgatgttctttggaaagtgaaaaggtatcaaaaagaag

SEQ ID NO: 49508 - DNA, 70 bp, Glycine max
  unsure (1)..(70): unsure at all n locations; Clone ID: 701137228H1
ggaagaactcgtctcctttctttcttccacataacataaganatttaaaaagnngnngttganatntang

SEQ ID NO: 49509 - DNA, 79 bp, Glycine max
  unsure (1)..(79): unsure at all n locations; Clone ID: 701137229H1
atccctttcgcctctgccctcaccagaacagaacatcnctcgtctnnatttctgtccacacaacatacgannntgncna

SEQ ID NO: 49510 - DNA, 290 bp, Glycine max
  unsure (1)..(290): unsure at all n locations; Clone ID: 701137230H1
gttctcctccaanaattccnccnaangcaactctgncaatttgatgtggagctgttgtcttgggactagtgtgaaagacatatgtaaggatggaggtttattnnagaagatacttaccaanggggagaaatgggagaacccaaaggatcctgatgaagttttagtcaagtatgaagcatgccttgaagatggaactcttgtggcaaaatctgatggagtggagttcacagtcaatgatggttantttgtcctgctttgtcaaggcgttaaaaccatgaagaagggagaga

SEQ ID NO: 49511 - DNA, 284 bp, Glycine max
  unsure (1)..(284): unsure at all n locations; Clone ID: 701137233H1
aatactgtggtttctgttcttccagactaaggtaaacgncnagtgcgcaatgcatgcaagcagcaanatgggtgaaaaatataaaccttggatcatctttcttcatctactagtaatcacgtgttcctgcaatagaagctgcagagccaggggattgattgaaacagaagacaaattcttcaaagcaacctcaaatgatcatcannnaacagaacatgcacatgcttcactctcacgtggatcacatagatccttctgtgatggtgttttcaccatcgaagatt

SEQ ID NO: 49512 - DNA, 268 bp, Glycine max
  Clone ID: 701137234H1
ctccgtccttccttcttcgatccagatctctctccttcctccctcaaatggctacccttctgcaatgttccatgcccctcgtctctctttccaatcgagctctggtacccggtaccaggatctccaacccaagttcagtttccctttcaattaagggaagaagtttcccatccgttacattgcagcccagagggcgtcggtttcagcttagatgtgcggcaaaaccagagacagtgaagaaggtgtgtgacatagtcaagaagcaatg

SEQ ID NO: 49513 - DNA, 266 bp, Glycine max
  unsure (1)..(266): unsure at all n locations; Clone ID: 701137235H1
cctcctcactcaaacttcccctctctacgccgttncctcccaaatggatgcaccactggagttttggggtgttgncgttaaggttggtcagaccgtgacagttgacccaatggatcctgtggattcatacatacacatatctcaggttgcgctcggagaggcgaaaaaggagaaacctaatgagtctgtggttttgtatttgaaagttggtgaacagaagattgtcttgggaaccctttctagggatggcattcctcatctatcgt

SEQ ID NO: 49514 - DNA, 238 bp, Glycine max
  unsure (1)..(238): unsure at all n locations; Clone ID: 701137238H1
gagaatatnaagttgtttgttttntttgttgctgcagtagttttggtagcatggncatgnnatggngcaggctatnaaaggttcctctncgaatgaaaantggttatggtgancgtnttcggaggtaaaatgngnaagttttaggnttgatgtggaagtanagaanatacgaaannanaaaannattntgnagagtgtttnaantaagnaggntagattaatggggaacatttagtna

SEQ ID NO: 49515 - DNA, 272 bp, Glycine max
  unsure (1)..(272): unsure at all n locations; Clone ID: 701137239H1
ttgcctattccgcaatatggcggaaaatgcttcgattgagctgaacaagtttgtgttcttttgtttgttggtgctaatacaagtggcagtttcanaaatcatttttgaagagcgttttgatgatggatggcgaggtaggtgggtgaagtcagactggaaaagcantgaaggcaaagcaggttcattcaagcacacagctggaaaatgggccagtgatccagatgataaaggtattcaaacatccagtgatgccaaacactttgccatctctg

SEQ ID NO: 49516 - DNA, 277 bp, Glycine max
  unsure (1)..(277): unsure at all n locations; Clone ID: 701137240H1
caaaattattagatggatcttccaagtttgtgctcacttatgaagacaaggaaggagattggatgcttgttggggatgttccctgggggtaagtaattggtccacaaacatcaattttnttttagcatcaaatatgcgatgttaaaactgatactgcagtacaaaaatgtgttgccaattaattgtcaaatagtacatgtaatgttttcatcaggcaataaagagattggtaaaaatatttggtgctatactctaaaagctacatgtcaaatattgg

SEQ ID NO: 49517 - DNA, 157 bp, Glycine max
  Clone ID: 701137241H1
gtttaagggaacaatccaaagcaatgtaatacttcaaaaattgtatttaaaaatattgtgttcttataaagactctgaacaaggcaatgacaacaatgatacagaaatgagtcaataataaatacacattttagtcgtctactagttctagatcgcg

SEQ ID NO: 49518 - DNA, 282 bp, Glycine max
  unsure (1)..(282): unsure at all n locations; Clone ID: 701137246H1
gaatgggctcgattttcattggatgagatatcagacactggtgcctttgtgagatctgcttcaacattcagaaattggatttcgagggacccgaattcgctgtttccaccggaatcagggaggtatcatctctatgtatcatatgcttgtccttgggcttccaggtgccttgctacttgaatatcaaaggactgacaaagccatcagtttctcggctgtcaaacccatctttgagagnactagagaatcagatgaatataagggaggattttcctgaatcgg

SEQ ID NO: 49519 - DNA, 284 bp, Glycine max
  unsure (1)..(284): unsure at all n locations; Clone ID: 701137247H1
ggatgctgaaatggttgattcaactgacagggccagtgccaaaacatttgatactgctgaaaagggcaagggtggttttgttgatccaattgaaacgggaaatgtggaaaagattcaggagattgtggatcatgacagcgataagaatgacaagcaggacagtgtttccaaccaagttaacatncataatagtgtgtcagctatggatcaagaggttgaacctaagggctgncagctggtggagattatgcaaatgtgggactgaggcattgcccatgctctac

SEQ ID NO: 49520 - DNA, 291 bp, Glycine max
  unsure (1)..(291): unsure at all n locations; Clone ID: 701137248H1
tccccccgctgaaagcgtcgatggcggagaccaacaacaacgttgccgtcgaggtccttgaaaaagaggatcttgccgtgtccctggccaaatacgtcgccgatctctccaacaaattcacttccgaaagangggctttcactgtttgcctgtctggcggctctttgatcaactatctccggaagctgctggaaccgccttatgttgatactcttgaatggtccaaatggcacgtgttttgggtggatgagagagtcgtgcccaagactcacgaagatagcaactacaanc

SEQ ID NO: 49521 - DNA, 278 bp, Glycine max
  unsure (1)..(278): unsure at all n locations; Clone ID: 701137249H1
gggatccccctgtgggtngcaccgccgaccgaccctgatcttctgtgaagggttcgagtgagagcacacctgtccgggacccgaaagatggtgaactatgcctgancggggcgaacagaggaaactctggtggaggcccgcagcgatactgacgtgcnaatcgttcgtctgacttgggtataggggcgaaagactaatcgaaccgtctagtagctggttccctccgaagtttccctcaggatagctggagcccgcgggcgagttctntcgggtaaagc

SEQ ID NO: 49522 - DNA, 214 bp, Glycine max
  unsure (1)..(214): unsure at all n locations; Clone ID: 701137251H1
tggagtccacagaatatacanaatggnnttctcccgagggaccgaggaagcacgctgcatcgcctcctcngaaatcgcattcgctagattctgaggagaagccaacatacattaggtttctagtatcaaactctgcggctggttcagttattggaaagggcggttcaactatcactgattttcagtcacaatctggagcacnaatccagttgtc

SEQ ID NO: 49523 - DNA, 267 bp, Glycine max
  unsure (1)..(267): unsure at all n locations; Clone ID: 701137253H1
cttaatttcaacaataatcanttgnngaagcatctagatgttctncggactcgcttctataatttgaaatctgcttatgatcaaaataatgactttgtaatggatgattcctgttgcattggctttgaacagtgggaagatataggggtgcagcctaggaatgaaactgttaaancgnaagattgtccaatatatgagcaactctggcacaatattcatagnttcagctgctgatgggaaatatgcccaatctagtnattacgaaga

SEQ ID NO: 49524 - DNA, 273 bp, Glycine max
  Clone ID: 701137256H1
cttgtttcttggctttctttcttcaccatgtcacttgctgggaaaatcaccactgaaatcggggttcatgcaaccgctacaaagtggttcaacctcttcgcaacacaactccatcatgttcaaaacctaactgatagagtgcatggaaccaagctgcatcaaggtgaagactggcatcacaacgagacagtcaagcactggacttataccatagatggtaaggttacaacatgtctggagagtattgaatccattgatgaacagagcaaaaca

SEQ ID NO: 49525 - DNA, 281 bp, Glycine max
  unsure (1)..(281): unsure at all n locations; Clone ID: 701137257H1
actcccttcaccatggctgaacaaaccgagaaagcttttctgaagcaaccaaaagtgtttctcagcacaaagaagactgggaagggaaagagacctggaaaaggtgggaaccgcttttggaagtccattgggcttggatttaagactcccagggaagccatcgaaggaacctatattgacaagaagtgccccttcactggcaatgtttccatccgtggccgtatcttggctggancatgtcacagtgctaagatgaacaggactattattgttagaaggaa

SEQ ID NO: 49526 - DNA, 283 bp, Glycine max
  unsure (1)..(283): unsure at all n locations; Clone ID: 701137259H1
ttcacactgccgctgcaacaatggcttcagagaagaaactttcgaacccaatgagggagataaaagtgcagaagctcgttctcaatatctctgttggcgagagtggagatcgtctcnccagagccgccaaggtgttggaacaacttagtggccaaaccccagtgttttccaaagcaaggtacactgttcgttcctttgggattagaagaaatgagaagattgcatgctatgtcactgtcagaggtgacaaggcaatgcaacttttggagagtggtttgaaggt

SEQ ID NO: 49527 - DNA, 279 bp, Glycine max
  unsure (1)..(279): unsure at all n locations; Clone ID: 701137261H1
gagaatatnaagttgtttgttttctttgttgctgcagtagttttggtagcatggccatgccatggctaaggctaccaaaggttccctctccgaatgaaaactggctatggtgagcgttcttcggaggtaaaatgcgcaagttttaggcttgctgtggaagcacacaacatacgangcngaaaaaccantcctgaanagngtcntgaancancnnnggatatttatggcgaacaattagntcagatcnnnnacagtaacnccnnnccnttcnnttntgnt

SEQ ID NO: 49528 - DNA, 116 bp, Glycine max
  unsure (1)..(116): unsure at all n locations; Clone ID: 701137262H1
ctccgtggtgaatgcgncacgggtccagtaacggcggcggcgacgaggactcggactccacacaacatacnatngcaaannacacnacngtanatcacgacaangntcanantcga

SEQ ID NO: 49529 - DNA, 290 bp, Glycine max
  Clone ID: 701137263H1
cgacacactcccatacacacacgttgtctcgcacacattccttcattccgcagcagcaaacatctttaccttaaacgacaacaatggccgatgccgaggatattcaacccctcgtttgcgataatggaaccggaatggtcaaggctggttttgccggagatgatgcgccgagggcggtgttccccagcattgtggggcgtccacgtcacacgggagtgatggttgggatggggcagaaggatgcgtatgttggggacgaggctcaatccaagaggggtattttgactctc

SEQ ID NO: 49530 - DNA, 251 bp, Glycine max
  unsure (1)..(251): unsure at all n locations; Clone ID: 701137270H1
atgaaggtttccattgccaagttccactcccttcccctatncacttttccttctcttggcctnccaacacaaaacccctcctagcagcagaaccagagncagtggttgataagcaagggaaccctttggagccaggagtagggtactacgtgtgacccactttgggctgatgaaggaggcctcacactaggccaaacaaggaacaagacatgccctctttatgttatccgtgacccttcattcattggcac

SEQ ID NO: 49531 - DNA, 269 bp, Glycine max
  unsure (1)..(269): unsure at all n locations; Clone ID: 701137271H1
atagccctagaaatgtttcgtgaatctttgtttgctctctttctactttctgccttctcctcctcactcctacctttaaccactgctcaagattacgttctcgacacggacggtcacgcggttgaaaatcacggtacatactatttgttgccagcgaaatcnngaagcggcggtggtggaatagaggtagccgcaactggcaaagaaagttgcgctctcactgtagtgcaatctctgaacgaggactccatggggctaccattgaagct

SEQ ID NO: 49532 - DNA, 276 bp, Glycine max
  unsure (1)..(276): unsure at all n locations; Clone ID: 701137272H1
cgacaagatgagcatcccaattccccatcggcagttattcatagacggagactggaaagtccccgtcctcaagaatcggattcccatcatcaacccttccacccaacanatcatannggatatcccagcagctactaaggaagacgttgatctcgctgtcgctgccgccaaagctgccctctcccgcaacaagggcgccgattgggcctccgcttccggctccgttcgggctcgctacctccgcgccatcgctgccaagatcaccgagaaaaagcc

SEQ ID NO: 49533 - DNA, 275 bp, Glycine max
  unsure (1)..(275): unsure at all n locations; Clone ID: 701137273H1
tcccacaaatgggtatgaagaacttcatttctgcccctcaaatgccaaatttgaccaatgctggtgctcaaagaggcatgcctattcggcaaagctatcctcctcagatggcacggccagatatcccaatgcctctgaatcanaagtttgtcaacaatccccccatggcttctggtaagatagcatatgctgcggaccaaatttatgatcccttttcacccacttctgcacctccacaacagaaaggtaatcctggaaaatgagggattggatgt

SEQ ID NO: 49534 - DNA, 281 bp, Glycine max
  unsure (1)..(281): unsure at all n locations; Clone ID: 701137276H1
gagaagancacctcttcaagatcgtcataatcggannctctgcggtgggcaaatccaaccttctctcccgctacgcccggaacgagttcaacatgcactccaaggccacnataggtgtcgagtncccagactcagngcttggncaatcgactccaaggaagtcaaggctcagatttgggacaccgccggccaagagcgattccgcgccgtcacctccgcctataccgcggcgctgtcggcgcctcattgtctacgacatctcccgncgcancacttcgata

SEQ ID NO: 49535 - DNA, 278 bp, Glycine max
  unsure (1)..(278): unsure at all n locations; Clone ID: 701137278H1
gccgtgctttccctttatgctagtggccgtacaactggtattgttctggactctggagatggtgtcagtcacacggtgcctatctatgaaggtnatgccctcccacatgcaatcctgcgtttagaccttgcagggcgtgatctcactgatgccctgatgaaaatctgactgagcgtggttactctttcaccacatctgcggaggggaaattgtgagggacatgaaggagaaactggcctacatgctctgattatgagcaggagttggnaactgccaag

SEQ ID NO: 49536 - DNA, 289 bp, Glycine max
  unsure (1)..(289): unsure at all n locations; Clone ID: 701137280H1
ctaaaacactcagtaaaatcacagttttgtgatgaagaagaaaaacataaaattttaaatctttctatcagtagtctgctatgtagaataaaattttagaattatatggcttgnngcttgctttttttttggaaggcaaacatagatatatantattaataatatcaaatcagtaccagaagtactgatgaattacacataaagacaagacactaagagtgtcgcctcccaaacaaagcaagccccccaaaaatccactacaaaggcttgctacttaacggcttttaat

SEQ ID NO: 49537 - DNA, 66 bp, Glycine max
  unsure (1)..(66): unsure at all n locations; Clone ID: 701137282H1
gcgtgtntgnatgtgtgtatactctctcaagtacgcacanacatacacatccatncnnacaaaant

SEQ ID NO: 49538 - DNA, 247 bp, Glycine max
  unsure (1)..(247): unsure at all n locations; Clone ID: 701137283H1
tcctaatccgaaacagaaagagggantttgcanttgtggaanagantcgaattgtagcgcaatatagattcttcaaatttgtaggcaatgggtggnttcancgctgaagatctatcgannattggcggaatngncaccgtctcgcttntccattcnttcatncccantcactggcttccngaactcnattgtcggtcgngctnagaaatggactntctccaccactctcatcgtagnnaacntggag

SEQ ID NO: 49539 - DNA, 266 bp, Glycine max
  unsure (1)..(266): unsure at all n locations; Clone ID: 701137284H1
cacctatcacttatttagtacgttatctttgtgttttggtttgtagaataaacaaggtatgagtgtgaaacgaatcctttgaagcccttgctcaattataaagttggaagaaaatagagaaatcaggtgggctttgagtaatggtagtantttgtgtgtgaagaaagaggncgaggtatttcagcgtattatgccgcaataaaggncnnaanaaaancnnaccaaagaattganngtttancccangncttgggggttannaaaac

SEQ ID NO: 49540 - DNA, 264 bp, Glycine max
  unsure (1)..(264): unsure at all n locations; Clone ID: 701137285H1
atgaaggtccttgttttcttcgttgctacaattttngtagcatggcaatgccatgcgtacgatatgttccctctccgaatgaacactggctatggtgcccgtactccggaggtgaaatgcgcaagttngaggcttgctgtggaagcacacaacatctttggctttgagaccattcctgaagagtgcgttgaagcaacaaaggaatacatccatggcgaacaatatagatcagactccaaaacagttaaccaacaagcttacttt

SEQ ID NO: 49541 - DNA, 269 bp, Glycine max
  unsure (1)..(269): unsure at all n locations; Clone ID: 701137286H1
caggggtggagagtgctggtgaatgtgggaaatctaccaccccagataatgaggcttataagcttgcaccatgtgcctcagcagcacaagatgagaatgctagtgtttctcagagttgctgtgctcaggtgaagaaaattnggcagaacccaagctgcctctgtgcagttctgctctccaacacagccaaaatggctggtgtcaaccctcaagttgctgtcaccatccccaagcgttgcaacctggctaatcgccctgttggttacaag

SEQ ID NO: 49542 - DNA, 272 bp, Glycine max
  unsure (1)..(272): unsure at all n locations; Clone ID: 701137287H1
agatctaacaaccacttatcccctttctccttctaacgagtgaggaaaaatggcgcgtaagaagatcagagagtatgactcaaagaggttgttgaaggagcactttaagagactctctggcaaggagttgccgatcaagtctgcacaaattaccgctccaactgatttcactgagctacaagagaaggaaccctggctttcatcttctaaattggttgttaaacctgacatgttatttggaaagcgtggcnaaagtggttggttgncttgaa

SEQ ID NO: 49543 - DNA, 279 bp, Glycine max
  unsure (1)..(279): unsure at all n locations; Clone ID: 701137288H1
agctattatataaggttgtacacagttttcgaattcattcattcatattccatacacattatacttngccccaaaaataatagtgaaaggaaaccgaatagaaaacgcagcaacgcaaggtagagagggaaggaaagctcatacggcgagagagatatcacccaactgcaagctgagcagcaatatcctcaagctgctttctcacacttcatgtcaatcaatttggagccggaatacctgacagtgaaacccgcgaccaaactagggtcaagtagcgtc

SEQ ID NO: 49544 - DNA, 276 bp, Glycine max
  Clone ID: 701137289H1
gaaccttcactctgctctcacccttattcctctctttcctttctttcttctgcaacaaaaatcatgtctgggtccttgggattcttctttgtgggtcttacgttgttgttgttggtcggggtggctaatgctgtggccaacacttccaacaaatttgatcaactcttccaaccaagctgggcttttgaccacttcattcatgaaggggatctcctcaaactcaaactagacaatttttccggcgctggttttacttccaagagcaagtatatgttt

SEQ ID NO: 49545 - DNA, 256 bp, Glycine max
  unsure (1)..(256): unsure at all n locations; Clone ID: 701137290H1
ggcgagtaaacccgtaaggcgcaagncnagctgattggtggganccccctgtgggttgcaccgaccgaccgaccctgatcttctgtgaagggttcgagtgagagcatacctgtcgggacccgaaagatggtgaactatgcctgagcggggcgaaccagaggaaactctggtggaggcccgcagcgatactgacgtgcaaatcgttcgtctgacttgggtatagggcgaaagactaatcgaaccgtctatagtggtt

SEQ ID NO: 49546 - DNA, 109 bp, Glycine max
  unsure (1)..(109): unsure at all n locations; Clone ID: 701137291H1
cgcagtgnnatcatattcantccaaanaaaaaaaaaaangctcagaganagagantggggnaaagacaantcccagaccccccganntttaagaaatagggngttcntt

SEQ ID NO: 49547 - DNA, 280 bp, Glycine max
  unsure (1)..(280): unsure at all n locations; Clone ID: 701137292H1
cgaaatcaaattgttagagaaacgcgagtncaatccagaaatcaaagaaagcgttacttgacgttcgtttgaacattaacaacattaacacaaatggcaacacgaactggtcgcttgtttcaaaatcaaaacctgaatgtccacgttaatggaggaggaactgtttctgagaaggctgatttaacaggacagaggaaagttagggctgggggaagaaaaccacttggagatctatccatgcagggaactcatcaaccattttgatggaaagaaaggcctt

SEQ ID NO: 49548 - DNA, 283 bp, Glycine max
  unsure (1)..(283): unsure at all n locations; Clone ID: 701137293H1
agctattatataaggttgtacacagttttcgaattcattcattcatattccatacacattatacttnnaccccaaaaataatagtgaaaggaaaccgaatagaaaacgcagcaacgcaaggtagagagggaaggaaagctcatacggcgagagagatatcacccaactcaagnnnagcagcaatatcctcaagctgctttctcacactcatgtcaatcaatttggagccggaatacctgacagtgaaacccgcgaccaactagggtcaagtagcgtcttaatc

SEQ ID NO: 49549 - DNA, 283 bp, Glycine max
  unsure (1)..(283): unsure at all n locations; Clone ID: 701137294H1
ggccgctcgcggccacccagttttgaatatatttttattccttctttgtttcttcactttcttccatacacataaccatgtcctctcagactgtngtcctcaaagttggtatgtcatgtcaagggtgtgctggagcagtgaacagggttttgggaaaaatggaaggtgttgagtcatttgacattgatctgaaggagcagaaggtgacagtgaaaggaaatgtggagccagatgaagttctgcaagccgtttccaaatctgggaagaagactgcatctgggtg

SEQ ID NO: 49550 - DNA, 286 bp, Glycine max
  unsure (1)..(286): unsure at all n locations; Clone ID: 701137295H1
tggctttctactttctctttctagagtaggactaaactcatacactgatcatgggagtggatttaagacaagtggtggcgggtgtcctcaccctcacaatgttcgtcatgcttatacacatgatcaaaagagaccattttgatgctgttgatgataaacttcctggaacggaggatgtcagctttgaaagtacaaactttgatactactcatgttagaaagaacatcgggatttggnanggagatggtgatgagttaaaaccatgttggcttaagccatctgaaga

SEQ ID NO: 49551 - DNA, 284 bp, Glycine max
  unsure (1)..(284): unsure at all n locations; Clone ID: 701137296H1
tggagtactgntgatagcaaagatgtttgggatcttcgacaaggggcaaaagataaaggcggacagtggtgttgatgccaaagaanctgttgncacttcaacgccataacctccatcggtaaaggtggtgttattgacacagccaccggcatcttaggccaaggcgtcacttagttggtggagtaattgatactgccacttccttcttaggccgtaatatctccatgcattgatcagtgctactcagactgatggcatggaatgggaagtggaaaagagtctat

SEQ ID NO: 49552 - DNA, 280 bp, Glycine max
  unsure (1)..(280): unsure at all n locations; Clone ID: 701137302H1
gcgcggacgatcggcagggaacaagttccgcatgtcactgggtctnccggtggcggcgacggtgaactgcgccgacaacaccggcgcgaagaatctctacatcatatcagtgaaggggatcaagggaaggctgaaccggttgccgtcagcttgcntgggtgacatggttatggccaccgtcaagaagggaaagcctgatctccgtaaaaaggtgctccccgccgtcatcgtccgtcagcgcaaccgtggcgccgaaaggacggtgtttacatgtattcga

SEQ ID NO: 49553 - DNA, 280 bp, Glycine max
  unsure (1)..(280): unsure at all n locations; Clone ID: 701137303H1
aaagtagcaaagatgtttcctttcgggcaaaagggtcaaaagataaaggggactatggtggttatgcagaagaatgtgttggatatcaacagcatcaccagtgttggagggatcgttgtnnaaggcttaggcttcataggcagtgcagtcgatgcacttacttttgcagccaccaagatctccatccatttgattagtgcngaccaaggntgatggtgggaaagganaaatnagnaagcgtacaaatttaagaggaagatnacattaccaaccttgggag

SEQ ID NO: 49554 - DNA, 280 bp, Glycine max
  unsure (1)..(280): unsure at all n locations; Clone ID: 701137304H1
gttttagcgcanttgctttctagatttaaggaagatgggtaaggaaaaggttcacatcagtattgtggttattggccatgttgactctgggaagtccactaccactggccacctgatctacaagcttggaggcattgacaagcgtgttattgagagatttgagaaggaagctgctgagatgaacaagaggtctttcaagtatgcctgggtgcttgataagcttaaggctgagcgtgaaagaggaatcacaattgatattgcctgtggaagtttgaaacca

SEQ ID NO: 49555 - DNA, 278 bp, Glycine max
  unsure (1)..(278): unsure at all n locations; Clone ID: 701137305H1
aagtccctccttcctctgccttataattcttgtgacccttttngctggtagcattgaaagtgcaccagcaaacgtgaagccaagccattatgctgcacccttcaataggagtgtttttccttctggttttctatttggaataggctctgcagcttaccagatagaaggagcagcagctatagatggcagaggaccaagtatatgggacacctatactaaacagcaaccagggaagatttgggatcatagtgatggaagtctagcaattganttttatc

SEQ ID NO: 49556 - DNA, 279 bp, Glycine max
  Clone ID: 701137306H1
atgggcaagttatcaccattggagctgagagattccgttgccctgaagttcttttccagccttctatgattggaatggaagctgctggaattcacgagaccacctacaactccatcatgaagtgtgatgtggatattaggaaggatctgtatggtaacattgttcttagtggtggctcaactaatgttcccctggtattgctgaccgtatgagcaaagaaatcactgcacttgctcctagcagcatgaagattaaggttgtggctccaccagagagaaa

SEQ ID NO: 49557 - DNA, 284 bp, Glycine max
  unsure (1)..(284): unsure at all n locations; Clone ID: 701137307H1
agccagcaatggccaagtccaagaacaatgccaagaagttgtcntanatctcagttccatctgcagatcatcaantgccatctcatcttcatctcttcaatctctgcttgaatctcccaagaagtgtgcaaggcactccaaattcttcacctttgtcaagtgcatgaggccaagactcttcttccttttcaccctctttttccttgctttctttgccatgctcaagtttggcctcaatcttgacaccccttttcctccattcccatgtgcaccctcaataggcc

SEQ ID NO: 49558 - DNA, 283 bp, Glycine max
  unsure (1)..(283): unsure at all n locations; Clone ID: 701137308H1
ggtcttcaatcaccaaaaatggtaaccactgtngcttcttacaacgtcactccatatcaaccaacttcccaatgatcctttatggctatcagatagcgaccaacttggggccctaggccatgtagccaccatctacatttacaaagcaaaacccaacagcgacaccattgagaggttgagaaactctcttagaaagcttttagtgtactactacccagtagctggcaggttgagcttgacaaaaagtggtcgaatggaagtgaattgcaacgcaaagggagtg

SEQ ID NO: 49559 - DNA, 279 bp, Glycine max
  unsure (1)..(279): unsure at all n locations; Clone ID: 701137309H1
ctcccttccttccatcccaaccacaaggntgctgagaagacataaaaaatggtgaagatttgctgcattggagctggctatgttggtggcccaaccatggctgtaattgccttgaagtgtcctgagatcgaggtggtcgtggtggacattgctgcaccgcgaatcaacgcgtggaacagcgaccacctcccnatatatgagcctggccttgatgatgtggtgaagcagtgcagggggaagaatctcttcttcagcactgatgtagagaagcatgttgcc

SEQ ID NO: 49560 - DNA, 277 bp, Glycine max
  unsure (1)..(277): unsure at all n locations; Clone ID: 701137310H1
aaaagctcgtagttggaccttgggttgggtcgatcggtccgcctccggtgtgcaccggtcggctcgtcccttctgccggcgatgcgctcctgtccttaactggcctggatttcttcgacgtgagcctcgtggacggttacaacgtgncgatgctggtggctccccagggtggctccggcgataactgcacgagcacggggtgtgctggggacctgaacggcgcgtgtccttcggagcttagggttacgagcgaggatgggaaacagagcgtggcgtg

SEQ ID NO: 49561 - DNA, 283 bp, Glycine max
  unsure (1)..(283): unsure at all n locations; Clone ID: 701137311H1
ttcatgactgctgtcaagcaaaactacggaganaaaggncttgtnccagtntgaananttttncaaaccacaatggcttttncanttgcttgcaaaatatggcacanctcatcttgttttcaacgatgatattcaggggactgcatctgttgttcttgctggggttgtggcagccttgaagctcattggaggtactctggctggaccacanatgcttgttctcnnngngctgganccnccangaactggaatancaganctaatagctcttgagatgtcaaac

SEQ ID NO: 49562 - DNA, 276 bp, Glycine max
  unsure (1)..(276): unsure at all n locations; Clone ID: 701137312H1
aaaaaagacaacccagagancgcgtcttaataaacgctcttctctgaaaacccccatttcttttcttctttctcttctctttcgcttcttcgatcttcgatcttcgtcgctgaaaatgagagagtgcatttcaatccacatcggccaggccgagattcaggttggaaacgcctgctgggagctttactgcctcgaacacggcattcagcctgatgggcagatgccaagtgacaagaccgttggtggaggtgatgatgctttcaacaccttcttcag

SEQ ID NO: 49563 - DNA, 268 bp, Glycine max
  unsure (1)..(268): unsure at all n locations; Clone ID: 701137313H1
atttcctgcaaattaccttttcaatcattttgatgaccactaaatgcatgnacttaaaattttgcctatcctncaagcttttcatttttgacagctgcatttttcgtttatgcacactgataagcttacccgtgaatgtaattganagatgaaagatggagactgtatgtgattganactttatgaatgctcttttattaatgtaaaataatcatctgtgtgcaataaaaactaataaacttattactttggggtgcttggtatataa

SEQ ID NO: 49564 - DNA, 277 bp, Glycine max
  unsure (1)..(277): unsure at all n locations; Clone ID: 701137314H1
agctccacattttcccgttactcccatctagattcttcagttctcccttcaccactccagagatgaagtagtccgtcctcgctgcctccgtcgcngccgccgcttccgccaccgcggcgtccctctcctcttcttcccatcaggatgagaggagaagccgtgagaacacntcgtcgcagaattcatcttccacggagaaattcgctcccagatttgatggattgcgcttcattgaaaccctcgtaactgcacatagatgatgattattcgaggttcc

SEQ ID NO: 49565 - DNA, 279 bp, Glycine max
  unsure (1)..(279): unsure at all n locations; Clone ID: 701137315H1
atctccaatgccattaanatgattatgaagancaagggtaataacaataacaacaatcattgttcacctgctatactttatcactacccttnaaagatggtgcttttgctgcccttgctgcacacctttactttaaggccacttcatcattctctcctcttttctttcccaacactgtcttcaaccccctcagtgctgaagatcttcctctgaatgaaattggtgatctttatctcttagattttgtggggcccgatggttttgttcaggaaatctcca

SEQ ID NO: 49566 - DNA, 281 bp, Glycine max
  unsure (1)..(281): unsure at all n locations; Clone ID: 701137316H1
ccggaaaaangcagggccagtgaaccntcaagccgtggcactgcgtgtggattcngacnaatcagccttctacaggtgcagtgtggaagggcaccaagncaccctctacgcccactccctgcgacagttctnccgagagtgcgaaatctncggcaccatagncttcatctttggcaacggtgccgcagtgttgcnagattgcannntatncaccagggtcccncttccctttcagaaggttaccntcacggcccagggaagaanagcccacnccagngcnt

SEQ ID NO: 49567 - DNA, 278 bp, Glycine max
  Clone ID: 701137317H1
caagcctcaggtaagccaaaaccatggttaagcataacaatgttatcccaaacggacacttccgtaagcactggcagaactatgtgaagacttggttcaatcagccagcacggaagacaaggagacgattggctcgtcagaagaaagctgtgaagatattccccagacctacggctggacctctcaggcccattgtacatggtcaaactttgaaatacaacatgaaagtgagaggtggaaggggattttctcttgaagaactcaaggcagcagggatt

SEQ ID NO: 49568 - DNA, 280 bp, Glycine max
  unsure (1)..(280): unsure at all n locations; Clone ID: 701137318H1
cgctntaccagcagcagcattttcttttccatttccaacatcnacnncgttnggnaggntcatgcgatcatcntgtcgttttcgnntttcaaggcttngaggcctannacgccgcaagaggtggccaagtccatcaaggggagtctcatggtcctcgataccaannccgttgttgaagttanagcccttgagaaggctttngaggaagttgaaaagaattttgtaacaatgagaaccatgctttctggagacggagagtcaganccaaatttggaccagg

SEQ ID NO: 49569 - DNA, 276 bp, Glycine max
  unsure (1)..(276): unsure at all n locations; Clone ID: 701137319H1
ctaatcaaggtattagatatcgatctttcctggagattgcataaagtatctgatggtcaaagaagaaggntgcagatttgtatgggtctcctcaaaccattcaaggttcttcttctcgatgagataacagttgaccttgatgttctagcaagagctgaccttctgagatttctaagaaaggaatgtgacgagaggggtgccactattatctatgcaacacatatatttgacggcctcgangattggccaacaaatattgtttatgtagcccatggg

SEQ ID NO: 49570 - DNA, 277 bp, Glycine max
  unsure (1)..(277): unsure at all n locations; Clone ID: 701137320H1
ctctagtcctgttatttctcagcgcgtaaagcatgggcttnnttggtggagaaaaccacgagtggtcgcgagtacaaggtcaaggacctttcccaggccgacttcggccgcctcgagatcgagctggccgaggttgagatgcccggcctcatggcntgtcggaccgagttcggcccctcccagcccttcaagggggcccgcatcaccggctccctccacntgaccatccananagncgtctcattgagaccctcaccgcccttggcgccgaggtccg

SEQ ID NO: 49571 - DNA, 277 bp, Glycine max
  unsure (1)..(277): unsure at all n locations; Clone ID: 701137321H1
ttacccttccntgcaacacaatngnaaggtancaaaatatagtaacattggtagttccaccataancgtgtcatcangctntaagagctagtggcattactacacntcaacntaatgcacaaancctgtctggtgcaggtgttgccactggacctgcanttcctcagcaccttgctgtgcatccctantcccaacctantcttcctctggggcattttgctaacatgattagctatccattcttgcctcagagctatacctatatgccatcagcttt

SEQ ID NO: 49572 - DNA, 232 bp, Glycine max
  unsure (1)..(232): unsure at all n locations; Clone ID: 701137323H1
tcactctctcaccaacaaaacaaaatccaatgngngcngtctttngcaatcaacggtggtttnnccggnncnagantcantcctgccttccgtnaccngnngcttnnttgccgtctacngctaggtccanaananccgnatgcgaccacgaantccctctcccctaccgttctcaaaaaccctttcatcatcgtcgacggtccccaaagctccgtngncggnaacctgagga

SEQ ID NO: 49573 - DNA, 278 bp, Glycine max
  Clone ID: 701137324H1
ctgaagcctgttacgccatcatatgtttatttactaagcatgtacttcactttggaattacatgataaattggaagaggcattctaccagtgcttggagaaatgtcgtccaaattgtactttatacagtatatatctgaattctttggtgaaaataggtaatattgacaaggccgaggatatatttaaccaaatgaatcgtgatgcgactatcggtgttaatgctcgatcatgtaacatcatcttaagtggatacctctcttcgggaaaccacttaaa

SEQ ID NO: 49574 - DNA, 276 bp, Glycine max
  Clone ID: 701137325H1
gtttccttcttcaccgcatcaatggagttggacggcgttctcctcggcatgtgcaaccctctcctcgacatctctgccgtcgtcgacgacgctttcttgcaaaaatacggtatcaagttgaacgatgcgattctcgctgaggataagcacaaacctatgtatgaagaattggctaacaatcctaatgtggagtacattgctggaggtgctactcagaattcaatcagggttgctcagtggatgcttcaagcaccaggtgccacaagttacataggt

SEQ ID NO: 49575 - DNA, 274 bp, Glycine max
  unsure (1)..(274): unsure at all n locations; Clone ID: 701137327H1
gatcagcaannntaattctggcaatgttatnccagaatacttggtcaagtggcaaggactatcttatgctgaagcgacttgggaaaagganattgatattgcttttgctcaacatactattgatgagtataaggctcgtgaggctgntatggcagttcaaggaaagatggtagattctcagcgtaagaagancaacagcaagtttgcggaagcttgaggaacaacctgaatggttgaagggtgganagctccgtgattatcaacttgagggtct

SEQ ID NO: 49576 - DNA, 278 bp, Glycine max
  unsure (1)..(278): unsure at all n locations; Clone ID: 701137329H1
ggccactctcctctgagaaagcctccagcctctcctccaaagtcccctgcggttccgttccggttattcttcncaaccgttgtgctgaagtttacaactcaaaacttcaccgaacgcatttcattcaccaattcgtccaagtctcgtatcaatcaatcagcctatccgtcttgcggttggagagatcggaggggagagcagccatggcgcatcgagtagaccacgagtatgactatctgttcaagatcgttttgatcggagactcaggtgtaggcaaa

SEQ ID NO: 49577 - DNA, 282 bp, Glycine max
  unsure (1)..(282): unsure at all n locations; Clone ID: 701137330H1
gntacttcaattctgattgcaaccacgacactactccannttccancatggnagngtatcnagccttgaggaaatnancnaacgagaacgtcgatctggannnaattccagtagaggaagtgttnngagtcgctgaaatgttnangagcaggtttaacatcagacgaaggagccagccggcttcaagtttttggaccaaanaaaattgggaggggtaagggggtncaaantttggattgtnnggggtgnccangtggannnnttaatctggggtcatngaag

SEQ ID NO: 49578 - DNA, 281 bp, Glycine max
  unsure (1)..(281): unsure at all n locations; Clone ID: 701137331H1
gccgagancgcaaggtagccgttctcggcgnccgccggcgggatcgggcagcctctctcccttctgcatgaagctcaatcccctcgannngagcctctccctttacgatatcgccggaactcccggcgtcgccgccgatatcagccacataaacaccagatctgaggtagtggggtaccaaggtgatgaagagcttgggaaaagctttggagggtgccgatgttgttataattcctgctggtgtgcccagaaagcctggaatgantcgtgatgatctttnt

SEQ ID NO: 49579 - DNA, 279 bp, Glycine max
  unsure (1)..(279): unsure at all n locations; Clone ID: 701137332H1
aagaggtacaagaaccgggagctgcaaacaatgcgccttcttgaccacccaaatgttgtcgctttgaagcactgtttcttttcaaccactgaaaaggatgaactatacctcaatttggtacttgaatatgttcctgaaacagttaatcgtgtgatcaaacattacaacaagttaaaccaaaggatgccgctgatatatgtgaaactctatacataccagatctntagggcgttatcttatattcatcgttgtattggagtctgccatcgggatatcaag

SEQ ID NO: 49580 - DNA, 276 bp, Glycine max
  Clone ID: 701137333H1
acaaactccacttcttcaacacaaaaatccgaaatttgtgctccaacacaaaaaaatgaaacctaccaatcaccattctcttgttgtctctactacttctcataacttcaccctccttggcaacccgacccgcatccaaccctgatcaagtcaagcacaacaaaaacaacaaccaaggtggtggtgctggtgctggtgctggcgggttctttggccctggaggagggttcagcatacccggttttggaaacgggtttggaaatggcatcataggag

SEQ ID NO: 49581 - DNA, 275 bp, Glycine max
  Clone ID: 701137334H1
ctcccagaaatggttacgttcaggtttcaccagtaccaggtggtcgggagggctctcccaacggaagcagatcagcatccgaagatctaccgaatgaagctctgggccaccaacgaggttcgcgccaagtctaagttctggtattttttgaggaagctgaagaaggtgaagaagagcaatggtcaagttcttgctatcaacgagatttttgagaagaacccaaccaagattaagaactacgggatatggttgcggtatcagagtaggactggtta

SEQ ID NO: 49582 - DNA, 274 bp, Glycine max
  Clone ID: 701137335H1
gagaagttgaggggaagtgggttgttaaaggagcagttgatgtagacattggtgcaaacccttctgctcagggtggaggagaagatgagggagttgatgatgcagctgttaaggttgttgacattgttgacacattcagacttcaggagcaacccgcattcgataagaagcagtttgttaccttcatgaagaggtttatcaagaatttgactcccaagctcgatgcagagcaacaggagttgtttaagaagcacatcgagggagcaactaaata

SEQ ID NO: 49583 - DNA, 276 bp, Glycine max
  unsure (1)..(276): unsure at all n locations; Clone ID: 701137336H1
cagaattatctaaccctaggaagaccactttgnttcacatgctcanagacgagagacttgttcagcatcgncctagttcaatatcccacttcggaggagttgagtattgggaagataaagtttaaggctttcgacttgggtggtcaccagattgctcgtagggtctggaaggactattacgctcaggtggatgctgtagtgtacctggttgangcatttnacaaggaaaggttttcagcatcaacctactcaatatccaactccttctttgattct

SEQ ID NO: 49584 - DNA, 276 bp, Glycine max
  unsure (1)..(276): unsure at all n locations; Clone ID: 701137338H1
cgagaatttcttgtcgcaagcatttacttccttctgagcatcaactatgcagtaactggcaaacccaaatcgaccttggtttatggcatcagctgcttgtgggagaatgtacttcacaactgggatgtatgactcagcacagaaagccaactgttgctctaattgtncatctgaggtcctgcttgataagctcttcaatgtaactgagtgtgtcagtngcatttgtcagaattccattgaccattatgagggccataccctttgggatcacttttg

SEQ ID NO: 49585 - DNA, 278 bp, Glycine max
  unsure (1)..(278): unsure at all n locations; Clone ID: 701137339H1
gttcttttcntctttgctcttgtctcgtgtcacttcccatgcttctgtcaatnattctctgtgtagcagacctaaaaggnccagatngcccttcaggctatcagtggcnagccacctnncacagttcacagtggatgactttgtgttctctggctttgtagctggaaacaccacaaacactttcaatgntgcattaacctccgcatttgttactgattttccaggtgtgaaggtcttggtgtatctgtggcacggttagacatagccaaangtggatc

SEQ ID NO: 49586 - DNA, 268 bp, Glycine max
  unsure (1)..(268): unsure at all n locations; Clone ID: 701137340H1
cgactatgtttctgtctctgagactgaactgaataacattaacacagcgatgnncgttgaaaacattagcaacctctcctctttcggggatcactcttttggtccttctcatcgctctccttctcagattttacatcaaattcgaaactgctgagagattgttcagtgctgaagagctatcattgttcaatggaactgatgaagggttgccaatccttctaggaattcttggatccgtgtttgatgtaaccaagggaaaatctcatta

SEQ ID NO: 49587 - DNA, 272 bp, Glycine max
  unsure (1)..(272): unsure at all n locations; Clone ID: 701137343H1
ganaatgaggcctgctcttgctttgcttcctcttctntttgctttcttgttagctgccactacggaatcaagaaaagatccangggaatattggaaaatgatcatgaaagatcaggaaatgccaganggacttcaaggtcttgtttcatttcaatctgaaaataaccctaagactcaagagcagcttggtaaaggttccaaaaaccattgtgaagagtctctagttncaagtacacaagttaacagtgacttcgannccataccaagtgtta

SEQ ID NO: 49588 - DNA, 273 bp, Glycine max
  unsure (1)..(273): unsure at all n locations; Clone ID: 701137344H1
cctaaatctatctatctaatagagataagatagggcaaaaacaaaaccctagccaaagaaaaaccttgttgnnnnnnnnnnnnnnnnnnnnnnnagagagaggaatatggaaggagtaccgcacccaatacccagaacagtcgaagaggttttcaccgattttaagggcagacgcgccggtttgatcaaggctctcactaccgatgttgaaaagttttaccagcagtgcgatcctgagaaggagaatttgtgtctatatgggtttccaaatga

SEQ ID NO: 49589 - DNA, 271 bp, Glycine max
  Clone ID: 701137345H1
atgggttcttcttcttctatgtggacggtgtgtgtgattttggcatcactggcctctgcagcactctgtgccaacccacgcaggccagtggatgtacaatttggccgaaactacgtgcccacatgggcctttgatcacatcaaatatttcaatggtggttctgacattcagcttcatcttgacaagtacactggtactggcttccagtccaaagggtcttacttgtttggtcacttcagcatgtacataaagatggttcctggagattctg

SEQ ID NO: 49590 - DNA, 275 bp, Glycine max
  unsure (1)..(275): unsure at all n locations; Clone ID: 701137348H1
angnctagtgttacctgtggcaccgtcgaagctcgcagcattgtcgaacccgaacgcaacattttcaggaagaaaaagatggacatgcaatttagtgaagcagaatgtctcaagattgatgcaacaaacaggaaagtttactgtcgntctaatataagtnataatttgaacgagaaagaagagtttgtggtggactatgactacctaatcatagccgtgggagcaaatgtcaacacatttaatactcctggagtgatggagaattgtcatttctt

SEQ ID NO: 49591 - DNA, 274 bp, Glycine max
  unsure (1)..(274): unsure at all n locations; Clone ID: 701137349H1
gtcctctgagactttccttcagtccttcaccttctttctctctaggcgcaaaaccttcgtactgtttgtggcggctaaggatgtcagggaaaggggcgaaggggttgatcacagggcaaaacctccgccgccaacaacaaagacaangacaagaagaaacccatctcgcgttcttcacgtgccggccttcagttcccagttggccgtatccaccggcttttgaagtcaaggacaaccgccaacggtagagttggggccacagctgctgtctact

SEQ ID NO: 49592 - DNA, 278 bp, Glycine max
  unsure (1)..(278): unsure at all n locations; Clone ID: 701137350H1
gcgattcccgatcgaaaccctaactcgcgatggngntctngctcnnacnanattcttcaatngcnggaantgtnagctgaaantgatgcaagaanccgcagcctcagncctagcgnnaagccctaatctgggaccccgttttgctggtgcccggtgtcggaggntccatgcntgnacgccgttgacgaatccgaaggnaggcgagaacgcgtctgggttgtcttctcancgcngagtacangctcaagaccaaggtttggtngcgttacgatccttcc

SEQ ID NO: 49593 - DNA, 268 bp, Glycine max
  unsure (1)..(268): unsure at all n locations; Clone ID: 701137353H1
tccgaattagggttttccatntcgcagagcaactcaanacaacgaaccannaccaacaatgtcgcagccgcagcctcagtncgcagccgcaacacgggcaagcggcgctggagcaggtgcagtgcttcggtcgcaagaagacggcggtggccgtgacctactgcaagcncgggcgcgcctcatcaagatcnnnggtgccccatcgggntcgtcgagccggagatcntcggtttaaggcttcgagcccatnctcctgttgggaaaganc

SEQ ID NO: 49594 - DNA, 274 bp, Glycine max
  unsure (1)..(274): unsure at all n locations; Clone ID: 701137356H1
aagaaagggtgctagttcatgtgaggaaaattgggatatgcttgcatggacttggggaaaccatctaaatagaggctacacattttgcagatttgaagcaaccagccgaattcggatgatggagagcaaggcaaatgaggagatgaataatgggaatgagtggcntgtgcctatactggccatgacagctgatgtnatccatggctacntacgacangtgcatganntgtggcatggatggatatgtcctcaaagccatttgaggnagagaatc

SEQ ID NO: 49595 - DNA, 266 bp, Glycine max
  unsure (1)..(266): unsure at all n locations; Clone ID: 701137357H1
gccgatgccgaggatattcaacccctcgtttgcgataatggaaccggaatggtcaaggctggttttgccggagatgatgcgccgagggcggtgttccccagcattgtggggcgtccacgtcacacgggagtgatggttgggatggggcagaaggatgcgtatgttggggacgaggcncaatccaagaggggtattttgactctcaaatacccaattgagcatggaattgtgagtaattgggacgacatggagangatctggctcac

SEQ ID NO: 49596 - DNA, 267 bp, Glycine max
  Clone ID: 701137358H1
ctagctctaccacttaataataatatctttagacgttgattcatatatatctagctttctagctccatcatgaagactggaaacagatttgtggggatagctcatgccaagcagaaacttcagagaacactttcacaaagaatcaaaatggcttcagctgttgctgatgttccaaaaggccacttggcagtgtacgttggagagaaccataggaggttgtgattccatatcttacctaagccaccctttattcagagacttgttgga

SEQ ID NO: 49597 - DNA, 269 bp, Glycine max
  unsure (1)..(269): unsure at all n locations; Clone ID: 701137360H1
atttattgntcactacctccccgtgtcaggattgggtantttgcgcgcctgctgccttccttggatgtggtagccgtttctcaggctccctctccggaatcgaaccctaattctccgtcacccgtcaccaccatggtaggccactatcctaccatcgaaagttgatagggcagaaatttgaatgatgcgtcgaggatttgggattgggaaggcgagggattgcgctgcgtctcttcctcttctctttcgattcatccctcattcataat

SEQ ID NO: 49598 - DNA, 257 bp, Glycine max
  unsure (1)..(257): unsure at all n locations; Clone ID: 701137361H1
gtggaatgttggagangacgggatatttgtgagtccgtcaacttgttaataggaattcccattagagggaaaattgattgggttgcttaaaattgaggtggcatagagtnggtttcttatatgaagagcattgaaggtgctcttnnnnnnnnnnnnnnnngtgtgtgtgtatttntcccttttaannnngggntcatcctatgtgctagccngcttttcgcatttttggggttggctactactnccactctttagaa

SEQ ID NO: 49599 - DNA, 274 bp, Glycine max
  Clone ID: 701137364H1
gtttgattagctctaataaggttaaggaccagagagagaaagagaaataagaagaaaaacacaagatgggttattggaagtctaaggttcttcccaagatcaagaaggttttcgagaagaatagcaccaagaaagctgctgctgctgaggccaccaagtcctttgatgagtcaaaggaggaatacaacaaagcctttgaagaaaagaagactgaacttcaaaccaaagttgttgaaatatatgaggcttcatcaactgaaatcaagagtttggt

SEQ ID NO: 49600 - DNA, 270 bp, Glycine max
  unsure (1)..(270): unsure at all n locations; Clone ID: 701137365H1
ggaacncgcaaacttnaggaggataaggnggaagaatcagaagtagagctttttgaggtttatgatgtggtcctatacatgggcataattgatatattgctgagactccaagaacatgcagtctagagaaatttgtttgaatagggattctcgtaatttttttatccatatgaaattcatattttagatcaagatctttcaatgttgtattgctattaattttatcnttgtctgtatatctccttgagtagaccccttcagatcataacg

SEQ ID NO: 49601 - DNA, 270 bp, Glycine max
  Clone ID: 701137366H1
aaattctctcattttaaaatcacatggctgaattcacagaaaatatgcaattgcaaagcaatattagaccctcccagtttccattcttagagattgatccaagcatggaactcctaaaccagttcttagggatgaaccaacatgtcctagaaaactcaaacttgattcctatgcacaacttggtgcctttctcctgtgacacctttttgggccctcaagagcctgagtgtccaggaaacttggaagaaaatttccctgcccatgtcaacc

SEQ ID NO: 49602 - DNA, 267 bp, Glycine max
  unsure (1)..(267): unsure at all n locations; Clone ID: 701137368H1
gacacactcccatacacacacgttgtctcgcacacattccttcattccgcagcagcaaacatctttaccttaaacgacaacaatggccgatgccgaggatattcaacccctcgtttgcgataatggaaccggaatggtcaaggctggttttgccggagatgatgcgccgagggcggtgttccccagcattgtggggcgtccactcacacgggagtgatggtnnggatggggcagaaggatgcgtatgtnggggacgaggctcaatcc

SEQ ID NO: 49603 - DNA, 268 bp, Glycine max
  unsure (1)..(268): unsure at all n locations; Clone ID: 701137370H1
ctgggatgcttccgggagttgaatgtgctcgaaggagacgcttgcataacagtgctggtgatgattccaccagcaaccgctctttctgtttgtatactaccaggaacctccaatcctcttcctctttactggaaagaagcatgttaaatcgggcatacccagatgaaaatctcggaggagcggcacgcgaagccaaacggagacttgatcagaagttcatggcacacatcanatcagaaagccacaaaagaaaaggcttttcatggtt

SEQ ID NO: 49604 - DNA, 250 bp, Glycine max
  unsure (1)..(250): unsure at all n locations; Clone ID: 701137373H1
ctcaaagattaagccatgcatgtgtaagtatgaactaattcagactgtgaaaacncgaatggctcattaaatcagttatagtttgtttgatggtatctactactcggataaccgtagtaattctagagctaatacgtgcaacaaaccccgacttctggaagggatgcatttattagataaaaggtcaacacaggctctgcctgttgctttgatgattcatgataactcgtcggatcgcacggcctttgtg

SEQ ID NO: 49605 - DNA, 269 bp, Glycine max
  unsure (1)..(269): unsure at all n locations; Clone ID: 701137374H1
gacaatgctagctgttaacaatgcattttctgacagatcgagtgcattgttgactgttcaaacactctcatcagaactagcttctttacattcacgggtggaaaaacttgaagttgcttcatccaaaatntttngtcgagacaagtctaggatgcggaaaattgaagagttaaaagaagccattagagttactgagaatgctaaaatttgtggcagatagagagtatgaancgantcaaggaaaataataggngtgaacttgaaagant

SEQ ID NO: 49606 - DNA, 239 bp, Glycine max
  unsure (1)..(239): unsure at all n locations; Clone ID: 701137377H1
ataaatcttttgacactgttttcaattctcacgaattaataaccaaatacaaatatcctaacctaaaacacgaaagaactaaacacagtttctattctgacaaatatgattaanaatttaaaagtaaaccagaaaagaagttgaatctgaagaataggttgtggaagaagcaaaacgaaggttcctccttagaccaccaaaacttatgccgtggcgcggaaggaggcgttctgtgaccc

SEQ ID NO: 49607 - DNA, 270 bp, Glycine max
  Clone ID: 701137380H1
gcgttctatatattattgaattgacaatgaggcctgctcttgctttgcttcctcttctatttgctttcttgttagctgccactacggaatcaagaaaagatccaggggaatattggaaaatgatcatgaaagatcaggaaatgccagaaggacttcaaggtcttgtttcatttcaatctgaaaataaccctaagactcaagagcagcttggtaaaggttccaaaaaccattgtgaagagtctctagttacaaatacacaagttaacagtg

SEQ ID NO: 49608 - DNA, 267 bp, Glycine max
  unsure (1)..(267): unsure at all n locations; Clone ID: 701137381H1
ggnnccttggattgtnagtgccagtnatgatcagaccattcncatttggaactggcagtcacgtacctgtatatctgntnttaactggncacaatcactatgttatgtntncttcattccatccaaaanangatantgctgnntcancttccctggntcaaactgttcgtgtttgggatattggttctctcaaaaggaaggccgggcctgctgcagatgacatcctacgattgantcaaatgaacacagatctttttggaggtgttg

SEQ ID NO: 49609 - DNA, 269 bp, Glycine max
  unsure (1)..(269): unsure at all n locations; Clone ID: 701137382H1
catcagcacaacacaacaattcactaagctaaaatcacttcatcatggcttcctcgtgtgcttcctctgccattgcagctgttgccatctccacaccaagttcncaggccgantggatcactcttgggnagcacaaaagcttcttttcttagtgggaggaaactgaaggtgaacaactttacagcaccagttggagcacgatccagcactacagtttgcgcagttnctgagcctgataggcctctgtggttcccaggcagcacccctcc

SEQ ID NO: 49610 - DNA, 266 bp, Glycine max
  Clone ID: 701137384H1
gggaacgctactacttctgagatgcgtgttggatcaacggctaattgttgttacctgcagctggaagctcctcaacagaataatgtaaccgagtcatcatcagatatgtcagatcggatgatcaagatccagatcgcaaatcaccctctttatccagatttactctctgcatatatagaatgccaaaaggttggagcaccgccggaactggcatgccttcttgaagaaataggccgagaaagccaccgcatgaatgctcgccgtga

SEQ ID NO: 49611 - DNA, 263 bp, Glycine max
  unsure (1)..(263): unsure at all n locations; Clone ID: 701137385H1
cgggtggtgacttgtgctcatgtcctacagggatatggtctgactgaaacctgtgcgggaacctttgtctcattaccaaatgaaatagaaatgcttggaacagtgggccctcctgtaccaaatgtggatgtttgcctggaatctgttcctgaaatgggatacgatgccctagcaagtacaccaagaggagaaatttgtgtaaagggaaaaaccttgtttgcagggtactacaacgtgaagaccncataaagaggttctgattg

SEQ ID NO: 49612 - DNA, 269 bp, Glycine max
  unsure (1)..(269): unsure at all n locations; Clone ID: 701137387H1
gcagttgtaagctcagggaaacgttttatttcacactctgcgattcgcgatgggccgacgatgactatgaggatatcgacatggggtacgaggatgagccaccagagcccgagattgaggaaggtgcagaggaagatttggagaacaaaaacgatgagttaactggagagcctattgacactgaggataaggaagaggaacaaccagtggagcggcctcgaaagacatcanaatatatgactaagtatgagcgtgctaggattttaggt

SEQ ID NO: 49613 - DNA, 269 bp, Glycine max
  Clone ID: 701137388H1
cagaaccgaacccattcagaagcaaatccgaaaacccctcacttaatattactggtattcagctgttcatgacaaaagcctgaaccaatcatgtcagaaggtgcagaaattgatgagcgtgtggaccttgatgaggaaaattatatggaagagatggatgatgatgttgaagaacaaatagacgatgatggagtggatggagttgaagaagaaaatgctgaaggtagttttgaagaagatgaatatgaggactcagctgctgaggctgg

SEQ ID NO: 49614 - DNA, 247 bp, Glycine max
  unsure (1)..(247): unsure at all n locations; Clone ID: 701137389H1
cttagcttttgtttgtcccatcaaacttttgaagatggccaacnagaagtgttgctgctaataccttcttttgagagtactagcttggcttctctggatcaaaagttggccatggccaagcgctgctctcatgagggtgcgatggcaggagccaaggcagctgttgctgctactattgccactgccattccaactctggctagtgtaaggatgctaccttgggcaagagcaaatctcaatcacactg

SEQ ID NO: 49615 - DNA, 266 bp, Glycine max
  unsure (1)..(266): unsure at all n locations; Clone ID: 701137390H1
ggtcctttganatgttggcctggtggcttgtgtctctcacgatccattggtgatatggatgttggtgaatttattgtccctgtaccacacgtaaagcaagtncaagctttccactgctggaggnaggnttattctcnagcantgatggtgtctgggatgcnctaantgcagaaatggcccttgattgctgtcgtggcatgtcacctgaggctgcagcaacccatattgtgaaagtacgctcatcttttgcacaattttttaatgct

SEQ ID NO: 49616 - DNA, 264 bp, Glycine max
  Clone ID: 701137391H1
aagcatattcctgagtcaaatagttctgtccatatagaatttgtgaagtgagagtccaacctttcattttcaattttcaaagatgcctcgtggaacacttgaagttgttctgatcagcgccaaaggaatcgatgacaatgattttctctccagcatagatccttatgtgattctcacatacagggcacaggagaaaaagagcactgtgcaagaagatgctggatccaagccacaatggaatgagagctttcttttcactgtctc

SEQ ID NO: 49617 - DNA, 262 bp, Glycine max
  unsure (1)..(262): unsure at all n locations; Clone ID: 701137392H1
tgctttgtttcactctttgctcttgatttcttcccttntattggcttctcaaatccatgtttcctctgggaaactagtccctggactatcatggaattactatttgttgacatgtcccaagcttgagaggattataaggaagcatcttgaggatgtcttcgagaaggacagtggagtagctcctggcatacttcgactcttcttccatgactgctttcctaatggatgcgatgcgtctatattgttgaatggagacggtgac

SEQ ID NO: 49618 - DNA, 263 bp, Glycine max
  Clone ID: 701137393H1
agcagactactctcagtgagcatgataatgaaatgtccaaggaggctggtgaaggtacttgagaagttgagaaatacagatcgtgcatattaccagttgtgccaccttgtgaggcaaggtgaacagcccaaagagggattcctccttcttgcaaaccttgttgaggaccagatgggtggtaacagtgggtatgctgaatggatgctgcagatatctcgacaagtgcagcaatcataatatatagctccctggctaaataagca

SEQ ID NO: 49619 - DNA, 155 bp, Glycine max
  unsure (1)..(155): unsure at all n locations; Clone ID: 701137394H1
tggaaagcagcttttgtttataatagcaccactgcaatataatgtgtacttttacttcatatccttgaaatgatttcaagagagtaaccattggacacgatattgatgtaaaatttagttttagatttttnaatttattgttactattagcctag

SEQ ID NO: 49620 - DNA, 266 bp, Glycine max
  unsure (1)..(266): unsure at all n locations; Clone ID: 701137395H1
aggaaggcaagtttatntagggggttatgatatggaaganaangctgcaagagcttatgatatggccgcactcaagtattggggaaatcctcccatatanatttcccttnggaaaattatcaaaacgaantngaggaaatgaagaacatgacgagacaagaatatgtagctcatttacgaaggaaaagcagcggattctcaagaggggcctccatgtacagaggagtaacaaggtctcacaggctagcatttacacagcaccacca

SEQ ID NO: 49621 - DNA, 269 bp, Glycine max
  unsure (1)..(269): unsure at all n locations; Clone ID: 701137396H1
ctcacccattttnntcgtagccaaacactctgaaattctcagttatgtcgtggcaagcgtatgtggatgatcacctactgtgtgaaatcgaaggtaaccacctcactcacgccgctatcatcggccaagacggaagcgtttgggctcagagcaccaacttccctcagttcaaacctgaggaaataactgccatcaataatgactttaatgagcctggatcacttgctccaactggattgtatatcggtggcaccaaatacatggtcatc

SEQ ID NO: 49622 - DNA, 266 bp, Glycine max
  unsure (1)..(266): unsure at all n locations; Clone ID: 701137402H1
cttcaattcatatcatatcaattagatttnttttcagagtttgccagtgagataccatggacaactacaacagcaatgacttttggaaattcagtgaccagttgaggcttgaatctggtttggccaatctgtctctgaatgattattccatttggagcaacagctacagctccaagaggcctgatcagaggaggaactttgatgtcaagggcagtgatttcaacaactcatcaaagccttttgatgatgatttcaatgatggctgg

SEQ ID NO: 49623 - DNA, 264 bp, Glycine max
  Clone ID: 701137403H1
aacccaatcacgaggaggcaagtcctcttctccaccagtcccaacccaaatccgaaccaccaacgccacctgagactcccgagtttcttctcggatggaccgctgatgggctcccgctgggccacggcagcgtcgtgggccagcccatgggccgcgccccttggaactcctccatctgcgcctgtctcggccaaaccgatcacttctgcagcagcgatctcgaagtttgtcttcttgggagtgtggctccttgcgtgctgtatg

SEQ ID NO: 49624 - DNA, 263 bp, Glycine max
  unsure (1)..(263): unsure at all n locations; Clone ID: 701137404H1
gaatcttcaaatggtatcaatggntctggcaacttactaccattgacatccttgcgtactattaactcaagcgacaatatgtctatgcacaccactcaaactcagggatacattccaattgctgccaaaggccataaagattctgtttatgcactggctatgaatganagtggaacaattcttgtctctggtggcacagaaaaggttgtgcgtgtctgggacacaagatcaggatcaaagactctaaagctaagagagcatta

SEQ ID NO: 49625 - DNA, 260 bp, Glycine max
  unsure (1)..(260): unsure at all n locations; Clone ID: 701137405H1
caacgtcagagtttgccgtagggttctccttggttcgtggtttctggtacagatagaagggaatccttcttctctctgnnnnnnnnnnnnnnnnnnnnnnnnttctgagtttgaacttggagtaactgggtctatntttttnttcatattagagtggccatcacgggattttcttggtatatataaaaganacaaaaattgtctcttgggttggttccaagcaagtagaggaaactatccataagtttatagtattntgt

SEQ ID NO: 49626 - DNA, 263 bp, Glycine max
  Clone ID: 701137406H1
cttgtctcaaagattaagccatgcatgtgtaagtatgaactaattcagactgtgaaactgcgaatggctcattaaatcagttatagtttgtttgatggtatcttctactcggataaccgtagtaattctagagctaatacgtgcaacaaaccccgacttctggaagggatgcatttattagataaaaggtcaacacaggctctgcctgttgctttgatgattcatgataactcgtcggatcgcacggcctttgtgccggcgac

SEQ ID NO: 49627 - DNA, 263 bp, Glycine max
  Clone ID: 701137407H1
ctatgctcacattgaggccggtttgtctgcactgcagattccccctgagtataagtatgcaaaggagcttttcaaggtgtgtgatgctgatagggatggaaggatcgattaccgcgactttaggcgttacatggatgacaaggagttggagctttaccgcatatttcaggctattgatgtggagcacaatggctgcattctccctgaagagctttgggatgctcttgtcaaggctgggattgaaattgacgaggaagagctgc

SEQ ID NO: 49628 - DNA, 264 bp, Glycine max
  unsure (1)..(264): unsure at all n locations; Clone ID: 701137408H1
cttccaactcctacaacgcttttctctgcactcatgggcaaggtcnagatcggaatcaacggatttggaagaattggccgtttggttgccagantcgctctgcaaagagacgatgttgaactcgttgccgttnacgaccctttcattaccaccgattacatgacatacatgtttaaatacgacagtgttcacggacactggaagcatcacgatgtcaccgttnaggacgagaagacccttctcttcggtgacaaggcagtcact

SEQ ID NO: 49629 - DNA, 243 bp, Glycine max
  unsure (1)..(243): unsure at all n locations; Clone ID: 701137409H1
aaaaagcaaagctaccatctttctttccatattctctctctcattgttacccncgttggtggatagcaaaacttcagcaacccttttgcatctgatctaagaatcccaacctcaaatacccattttttgtcatttcatgatctaggttatagttcgtgaaaatgacgaggatgatccgtnatttttgggatactatgcaaaangatgcagtgccggcggtgtcggctgatataatattgcttc

SEQ ID NO: 49630 - DNA, 258 bp, Glycine max
  unsure (1)..(258): unsure at all n locations; Clone ID: 701137410H1
aaggaatcaagatttttcccaatnaactatgggtgacatctcacaaatcacctgctgattttgctgccatttcgagaggggacgaacgagacagcaacatatcatctccgaccaaatcccgttcattcaggcagtgttcatttctctgcccctcacttacttattcactcccaactccaaaaccatcntcgtcaatatggcacaagcacacgctntattttctcctttcaatcctcgccttcttccttcttcctcccc

SEQ ID NO: 49631 - DNA, 255 bp, Glycine max
  unsure (1)..(255): unsure at all n locations; Clone ID: 701137412H1
tgctgagataagatatgtttccaaagtttcttattcctatgccatctacctttctgtttganatcctagcgctgtatatagataccttggcatttatttgctagtagttttatgtaaatggctaccttgaggacaacttctagggtgcttttattcctatcttttgaagaaaaatcagtgaagttacctccaccctcttccataacttgcttcaaaatggataaagcaattgtctcggcttcttgaagggttagg

SEQ ID NO: 49632 - DNA, 257 bp, Glycine max
  unsure (1)..(257): unsure at all n locations; Clone ID: 701137413H1
gcaagtntcttcaatgaaggaagctttctctttattcgacacagacggtgacggtcggatcgcnccgtcggagctggggatcctgatgaggtctctgggagggaacccgactcaggcccaactcaaagccatcgtggccgaanagaacctnacggctcccttcgacttcccccgattcctcgntcttatggccaaacacatgaaacccgaacccttcgatcgccaactccgcgacgccttcaaggtcctcgacaagg

SEQ ID NO: 49633 - DNA, 254 bp, Glycine max
  unsure (1)..(254): unsure at all n locations; Clone ID: 701137414H1
ctcactgcagatctcaattgcatcgctgtccatggctaccatcgttagcatcaaggcccgccagatcttcgacagtcgtggcaatccanctgtcgaggtggatttgacttgctccgatggtacttttgccagagctgctgttccaagtggtgcatccactggganttatgaggcccttgaattgagagatggaggatctgactaccttggaaagggngtatcanaggctgttgacaatgtgaacaccgtcatgg

SEQ ID NO: 49634 - DNA, 259 bp, Glycine max
  unsure (1)..(259): unsure at all n locations; Clone ID: 701137416H1
aatgctcctttcatgttgaacttggattgtgatcactatgtcaataacagcanggctgcccgagangccatgtgcttcttgatggacccacaaactgggaagaaggtctgctatgtccagtttcctcaaagatttgatggtattgatacacatgatcgttatgccaacaggaacacagttttctttgatattaacatgaagggtctagatggtattcaaggtcctgtatatgtggggactggatgtgttttcaggaggc

SEQ ID NO: 49635 - DNA, 266 bp, Glycine max
  unsure (1)..(266): unsure at all n locations; Clone ID: 701137418H1
tcgattctctgttttgcccttcgatacacttgttacgcgccaccgcaagaatccttcccctttccctgggtttcgtcaataattctcatcaaaatctaactatggcactcaaggctgcctcaggttctataccgagtgcngacacaagtngtgacgataaggnggaaganaagtctganacatatagtcatagcatgacagangccatgggtgctgttttgacttataggcatganttaggaatgaactataatttcatccgtcca

SEQ ID NO: 49636 - DNA, 263 bp, Glycine max
  unsure (1)..(263): unsure at all n locations; Clone ID: 701137419H1
gctagcactagctagtagtccaactacatatctgccactgtcataccaaatcagaccaactaagtggtctatatggcttttaataattagnactagtttattaagtgggtacgtaaagtagctagcatatgnttatttgacaagtaaatctctgctcatattctagaaaaaatagttatagatctcttcaaatttgactnttcttttttctgaagtattgagtatatgttgcggttaanaacgttacatgatgtgccaattca

SEQ ID NO: 49637 - DNA, 266 bp, Glycine max
  unsure (1)..(266): unsure at all n locations; Clone ID: 701137423H1
cgaatcangtgtgtttcataatcatatgaagctctgccggnntcacaattaacccgacaagtacataatgtnctttttgntgtgatcttgacttgcgggacagagctgccctcgagaaaatattttcaaccgtaaagtttgatgccgtcatacattttgctgggcttaaagcagtgggtgaaagcgtgaagaaaccactgctctactttgacaacaatttgatagggacaatcgtnctatttgaagtcatggctgcccacggatgc

SEQ ID NO: 49638 - DNA, 265 bp, Glycine max
  unsure (1)..(265): unsure at all n locations; Clone ID: 701137424H1
cccgacccatgtcgggtctctcattcgggtcatcgcaaacacactccaacccgacccgaagcattctctgccgcaactttcacggnaaacgaatccctcagcctcttatccgcccacttcntcacgccgncgttcanctccgccgcaatcttcgncgtctccaccangctaatcctccgataacctccgtcgtcgttgaattcgaattcaacgcctcttccccgctcagcagctccaaaacaaccactccgaaggcgtacacgtc

SEQ ID NO: 49639 - DNA, 258 bp, Glycine max
  unsure (1)..(258): unsure at all n locations; Clone ID: 701137425H1
ctttcttcctactactcccattcccacatttcgacaacatggacgaggncttcgacatgccgacggcggaggcaatgggcgaggacttcgacttcgccggcgccaccgggggcgacctcgacggcagcagcagcaaccccatcttgaaggtcggcgaggagaaggagattggaaaagagggtttgangaagaaactacttaaagaaggtgaaggatgggacactcctgaagttggtgacgaattcaagttcactatac

SEQ ID NO: 49640 - DNA, 259 bp, Glycine max
  unsure (1)..(259): unsure at all n locations; Clone ID: 701137426H1
gcggcattaaaaatgcagatcttcgtgaaanccctaacggggaagaccataaccctcgaggtcgaaagcagcgacaccattgacaatgtcaaggctangattcaagacaaggaaggcatccctccggatcagcagcgtttgannttcgccggaaagcaacttgaagatggaaggaccttggccgattacaacatccagaaggaatcaacccttcaccttgtcctcaggcttcgtggtggcatcatcgagccttccctca

SEQ ID NO: 49641 - DNA, 254 bp, Glycine max
  Clone ID: 701137428H1
gtttctgggtcgcttctcctttcagccccttagggaaaatccgttatttgggccctcttcatccaccttaacaaagatgggagcacttcggtgggatgatgttgtgaatcatcatcaagcatggagactcgtcacttgcatttggttgcatgctggagttgttcatttagctgccaacatgttgagtctggtctcattggcattcgccttgaacaacaatttgggtttgtgaggataggaatcattacttgttg

SEQ ID NO: 49642 - DNA, 201 bp, Glycine max
  unsure (1)..(201): unsure at all n locations; Clone ID: 701137430H1
tcnntnntcgttgatggcgtcacaagcaagcctcctccttcagaagcagctcanagatctttgcaagaaccccgtcgatggcttttccgccggtttggtcgacgaaaccaacatttttgaatggagtgtgactataattggacctcccgatactctttatgaggggggatttttcaatgccattatgagctttccacccaa

SEQ ID NO: 49643 - DNA, 189 bp, Glycine max
  unsure (1)..(189): unsure at all n locations; Clone ID: 701137431H1
gggagctanagccatanggagnnaaactttcaaagagngtgaaagcaaaancanntcttcngntccttgtttatatatacttnggtgctaagctgtgtgagttcattganaagcctgaaatggcaactatgctgacaaaggagcatggtgctgaacctcaaggagaccgagctttgcctcggtttgcct

SEQ ID NO: 49644 - DNA, 262 bp, Glycine max
  unsure (1)..(262): unsure at all n locations; Clone ID: 701137432H1
gctgccaccatgcataggatcaacaccgcaaggtccattttttctgctgttttcagaagcaaatctcggcctcactctgctgctttctccacctccttgctcttcgacgaaactcagacacagtttaaggaaagtgttgctcaatttgcaacggaaaatattgcccctcatgcntcgaaaatagaccaaacaaattatttcccaaaggaggtgaacttatggaaaagcatgggggaatttaatctccttgggattactgcac

SEQ ID NO: 49645 - DNA, 266 bp, Glycine max
  unsure (1)..(266): unsure at all n locations; Clone ID: 701137433H1
gaacgagtgaccttcttcgtttctcgcaaagtttaagtaatcatgggtaaggaaaaggttcacatcaacattgtcgtcattggacatgtcgactctgggaagtcaactaccactggtcacttgatctacaagcttggaggtattgacaagcgtgtgattgagaggttcgagaaggaggctgccgagatgaacaagaggtcattcaagtntgcctgggtgctcgacaagctcaaagctgagcgtgaaagaggaattaccatngatat

SEQ ID NO: 49646 - DNA, 265 bp, Glycine max
  unsure (1)..(265): unsure at all n locations; Clone ID: 701137434H1
agggcttttccaccacgccggtgcaggtcgcgacttcaccaacgaagggggttcttgacgcgtgagatcgttgcgattatacgatcctaacaaagtgagattttagggttacataatgaccaagnagaagaaaccaagtggtggggttgttggagagggtgatgatttggagtctctcatacacaagcacgcccttttttttcgataagttgatcgagttgattcccgccaagttctatctgccaactgatgacaaggagaagcc

SEQ ID NO: 49647 - DNA, 261 bp, Glycine max
  unsure (1)..(261): unsure at all n locations; Clone ID: 701137435H1
cgaaaatgagcggagnggagncggnagaagnagggagcgagctttgtgatcgattgcncgaancggttngaggataanattatggacattgcttctctggagaagttccttcaggagaggantaacgttggcggcaaggccggtgcactcggcgattccattactgtcactagggacaagagcaagatcaccgtcacctccgacagcaattctctaaacggtatctgaaatatttgaccaagaagtacttganaaagcaca

SEQ ID NO: 49648 - DNA, 265 bp, Glycine max
  unsure (1)..(265): unsure at all n locations; Clone ID: 701137439H1
gcttcaatcaccgaccacaccacccntcaacgacatggcttcctgcttncccttctcaagantgcccaaggccaccctatgttggtggaactgnaaaatggggagacatataacgggcatttggttaattgcgacacatggatgaacatccatctgcgagaagtcatttgtacatctaaagacggagatagattttggaggatgcctgantgctacatacgaggcnatacaatcaagtaccttcgagtacctgatgaggttattg

SEQ ID NO: 49649 - DNA, 260 bp, Glycine max
  unsure (1)..(260): unsure at all n locations; Clone ID: 701137440H1
aattccactcccacgaaacggtttctccaaacccaattactcgacaaaacgcccatgtttcaccccttcagcttcaacactcagaatttcttgctctggagtggctgagtttgatggatctcatcagaaaaaaggaggtttgtntaatttcaatggaatcaagggcgtggctgtggtattcttgcagcttgtgctgttacttctgctgcatttcctgttactgctgctactcagaggcttcccccattgtcaactgagcc

SEQ ID NO: 49650 - DNA, 258 bp, Glycine max
  unsure (1)..(258): unsure at all n locations; Clone ID: 701137441H1
gttgataacggttagggaagcttcttcttgttcttcttctcccctcagcttctggcttaatcgtttcaacgcaaaaccctccaaaacactcaaaacaacatccatttgccaagctagtttctctgtccaaagaagacccactcattcatggaatactcgccatctctctaccagtgagctagcaaattttgatcccttgggtattaactcagatntatcttctggtctgaattctacctggaaaaatctggtgtgctc

SEQ ID NO: 49651 - DNA, 256 bp, Glycine max
  unsure (1)..(256): unsure at all n locations; Clone ID: 701137442H1
ctcccctgcaatcaacggcaccccccacaaanatgacaggagagacagtgaanccaaaagcttaccctttggccgatgcgcaantcgcaataacaatcttggatcttgtgcaacaagctgccaactacaagcaactaaantcgggtgctaatnaagcgactaagacactgaacagaggcatttctgagttcgttgtgatggccgcagacactgagcctcttgagattcttctccatcttcctctccttgctgagga

SEQ ID NO: 49652 - DNA, 254 bp, Glycine max
  unsure (1)..(254): unsure at all n locations; Clone ID: 701137446H1
ctcccctgcaatcaacggcaccccccacaaaaatgacaggagagacagtgaacccaaaagcttaccctttggccgatgcgcaactcgcaataacaatcttggatcttgtgcaacaagctgccaactacaagcaactaaaaaagggtgctaatgaagcgactaagacactgaacanaggcatttctgagttcgttgtgatggccgcagacactgagcctcttgagattcttctccatcttcctctccttgctgag

SEQ ID NO: 49653 - DNA, 257 bp, Glycine max
  unsure (1)..(257): unsure at all n locations; Clone ID: 701137447H1
gggatcatctgatcccgattcaggtaaaggaaagatcaagatgnanaagcacatanctcatggctttcacttggtaaagggaagatcnggtcatgccatggaagactatcttgttgctcaatttaagcaagttgacaacaaagagttgggtttatttgcaatatntgatgggccactctggtcacagtgtacctgattacttgaagtctcatttgtttgataatatcttgaaagagcctaantnctggacagacctg

SEQ ID NO: 49654 - DNA, 258 bp, Glycine max
  unsure (1)..(258): unsure at all n locations; Clone ID: 701137448H1
ctgaaccttccgtgcagcgcagagctttgctggcatacccaccgtnacgaanttaacctctctacgtaacagcacacagcgatttccccaaatcatcgaaaccctaactcgcgattcccaattcgaaaccctaactcgggatggcgattttgctgggcgaaattcttcaatcgctggagctgtggctgaagctgatcaagaacccgcaggcgcagccctacgtaaaccctaatctggaccccgttttgtggtgcncgg

SEQ ID NO: 49655 - DNA, 263 bp, Glycine max
  unsure (1)..(263): unsure at all n locations; Clone ID: 701137449H1
ctctctatccgnnngcgttattcntcagctgtagctgcaaggnctcaaggaagcttataaaaagagagcacatctgttttattcagttccgatngcanggttaaattttgaagccacacatactgacaaccgtgatattctgaagatatttgcagctgaaggtgttgagttcctnttatcttgtgaagggaaggtacccgtgtcagaatgcaatgggaaaatnatctgcctatttgncatgcaaactgntgcagaccttncag

SEQ ID NO: 49656 - DNA, 241 bp, Glycine max
  unsure (1)..(241): unsure at all n locations; Clone ID: 701137450H1
gccaaaccaaaattgaaagctctgacnttgggataaagtgcnntgcgacctcagaccgtgctcctgtgtgggaccagatnaaatcaagctnntttcagttaaatgaggacatgntggaatcgttgtttggatgnaaagccacgaattttacccccaaagnacctcncagaaanaaatcagttcttccttcngttgatcaggagaacagggtgttagacccgaagaagtcacagancatagt

SEQ ID NO: 49657 - DNA, 261 bp, Glycine max
  unsure (1)..(261): unsure at all n locations; Clone ID: 701137452H1
gaatcaggagggtggttggagaggnccacggttgaggacatggacatagcagttcgagctcacttgaatggatggaagttcatcttcnttaatgatgtcaaagttctatgtgagttaccagagtcttatgaagcttataagaaacaacaacatcgttggcactctggcccaatgcagcttttcaggctatgtcttcctgctatnctaacttccaagatatcagtatggaagaaggctaatttaatatttttgttcttcctg

SEQ ID NO: 49658 - DNA, 261 bp, Glycine max
  unsure (1)..(261): unsure at all n locations; Clone ID: 701137454H1
cgtcgagaaggttcagttcanatcctccgtctccaccatggcaactcccaangcatcgtcgaaatggaccgagaacatttcctcaatagcagctcgcatcttcttccttctcatcatctttcagatccctcttttcanggtgacttgcagatctggcatgtgtacaacccctttgcatgtcacgtcgtcacaattaattgcaagtnagatctttcctgttgttgttgtgaagggccttctgtacccaggggctgcagtgaa

SEQ ID NO: 49659 - DNA, 257 bp, Glycine max
  unsure (1)..(257): unsure at all n locations; Clone ID: 701137457H1
ctggtggaaacagagggcgaggtagaggctgattctaanaagtggcaggaactactgcaatgtgtatcggtagcaacttcactgcccgtgtttcctgtgcatccttggcttttaacttgaagtgtttttcttgtgtttatgatcacaaaaatgttagtgctattatattactcgaggaaagtttctctgccagactgcccccatctcctttttaatcccttcctaacagaaaacgtgcctttccctttctttccttc

SEQ ID NO: 49660 - DNA, 213 bp, Glycine max
  unsure (1)..(213): unsure at all n locations; Clone ID: 701137459H1
atctgtgacgagcatcatggcctcgagancagtgctattgttggctatgtgtgtgcttccggcnatggttgtggccattcgcccagcaaagaaccctntttgcgtgaagggtcgcgtctactgtgacccttggccgtgctggtnttgagacctcagcaaccacctacattgccggtgctgagattatgttgcaatgcaagagcagggttagca

SEQ ID NO: 49661 - DNA, 181 bp, Glycine max
  unsure (1)..(181): unsure at all n locations; Clone ID: 701137461H1
aaaaatcnntanattaataatcaatgtcnaaatgaacttncatgttacngaaaattacnnattgtattaacatcagntgggtcatgaattacaatgtganttgtacaaaattccatngttcagcttcatnagtaaggtttaccctgtttgnnatccctcttaagctggnccnttaatttct

SEQ ID NO: 49662 - DNA, 257 bp, Glycine max
  unsure (1)..(257): unsure at all n locations; Clone ID: 701137463H1
gggtttgatcgtttntttgagagggagcttgaaattcttggtagcancanacaccgntatctagtgaatttacgaggatattgcaattcacctacgtcanagttgttaatatatgattanctaccaggtggtagtcttgacgaagcacttcatgaaagagctgatcaactagactgggattcgcgcttgantataatcatgggagctgcaanagggcttgcctacttgcaccatgattgttcccccaggatcataca

SEQ ID NO: 49663 - DNA, 259 bp, Glycine max
  unsure (1)..(259): unsure at all n locations; Clone ID: 701137464H1
ttggcttcctacgganagaaagagtggtacttcttttcaccacnggaccggaaatacccgantggttccaggccgaaccgggcggcgggaaccggttactggaaggcaaccggggcggataagcccattggccaccccaaaccggttgggataaaaaaaagctttggtgttttacgcanggaaagctccgaaaggggacaagagcaattggatcatgcacgagtatcgtctcgccgatgtagatcgctccgttcgcaaa

SEQ ID NO: 49664 - DNA, 263 bp, Glycine max
  unsure (1)..(263): unsure at all n locations; Clone ID: 701137465H1
ctgggttacaagagcatactgccacaaggttcttcgtctctcagctcgctactcaggatttaccanagtctgtaatttgcaatgttcatggtgtgaatcccaaattcttgaaaattggagaaaagattgctgcagagagggagctagggcagaaagcctttacaaaaggggcgtatttcttgggaaagatggtgtgggcaaagggatacaaggagtgccccattttatcccgggaagttttcgaaagcnagacgggtataatt

SEQ ID NO: 49665 - DNA, 256 bp, Glycine max
  unsure (1)..(256): unsure at all n locations; Clone ID: 701137473H1
agagagaagatggggaagaagacgaagaaacccggcaaaggcaaagagaaaaccgagaganaaaccgcgagagccgaagagaagaaagctcgcagggaaaccaagaagctctctcccgaagacgacatcgacnccattttgttgancattcaaaaagaggangctaagaagaaggaggttcacgtcgacgacaacgttcccgcgccttctcctncgctccaactgtcnctcaccgtcaatccattgaaggagancg

SEQ ID NO: 49666 - DNA, 72 bp, Glycine max
  unsure (1)..(72): unsure at all n locations; Clone ID: 701137475H1
gggttggntcagctaagttctcagaaaggcaaccaattgnnacagcagctcagggtgacaaggnctacaant

SEQ ID NO: 49667 - DNA, 255 bp, Glycine max
  Clone ID: 701137480H1
agagtccaacctttcattttcaattttcaaagatgcctcgtggaacacttgaagttgttctgatcagcgccaaaggaatcgatgacaatgattttctctccagcatagatccttatgtgattctcacatacagggcacaggagaaaaagagcactgtgcaagaagatgctggatccaagccacaatggaatgagagctttcttttcactgtctctgacagtgcttctgaacttaatctgaagataatggataaag

SEQ ID NO: 49668 - DNA, 261 bp, Glycine max
  unsure (1)..(261): unsure at all n locations; Clone ID: 701137481H1
aagaaagaaggattaagcatatattcatcaganagattaagcataatcatcagaaaaatggcatgcaatggattctgcctcagactcattgctttagttcttgtgattagcatatcaagtgttaattgcatagaaactgatgcagttgaacccattattgatattgcttcgctgaatcgagatagtttcccaccagacttcatctttggggctgggtcgtcatcataccagtttgaaggtgcagcaaatgagggtggtagg

SEQ ID NO: 49669 - DNA, 258 bp, Glycine max
  unsure (1)..(258): unsure at all n locations; Clone ID: 701137482H1
gagaagtgttcacgtctttgagaaatgggtgcttcggcatcggtcacagaaaaatccatccatgaattcatggtcaaggatgctaagggcagagacgtgaacctcagcacctacaaagggaaggttcttcttgtagttaacgtcgcttcaaaatgtggatttacaaattccaatnacacccagttaactgagctttacagcaaatataaagacagaggtcttgagatactggcatttccatgcaaccagtttctnaaa

SEQ ID NO: 49670 - DNA, 261 bp, Glycine max
  unsure (1)..(261): unsure at all n locations; Clone ID: 701137483H1
gcccgatcttcctctatcgatctctgctgctntcctctccgctttccagattcgccgcattttgcaattcctaaaganatccanaatcgaaatcgcggtccgttggctctcgattcccacgctcnacgttcacgattttgattganatganacttgaaagggcttgatagtcaacaagggaagaganaatgctgatgcccaggttcatgggaaagtgcttctnttttgggcaatggctgcaatgatnactgcctttgcatt

SEQ ID NO: 49671 - DNA, 256 bp, Glycine max
  unsure (1)..(256): unsure at all n locations; Clone ID: 701137485H1
acagcactctccctaatccttctgtgtatgcaaaatgagancatgcaaatgcaaatncaatgttccctctgctctcattcttcttgtcacattcctttnnattgntncntccgtccactgtgaagacccatntcggtacctcacttggaaggtcacctanggtgacatctatnctctcggtgtcaagcagcaagggntctaattaatgngnagngtccagggctncaaatagatgctgttagaaatggaattgant

SEQ ID NO: 49672 - DNA, 259 bp, Glycine max
  Clone ID: 701137486H1
cacaactccctgccaacatgggtatctccagagattctatgcacaagaggcgtgccactggtggcaagaagaaggcatggaggaagaagagaaagtatgagcttggtcgccagcctgctaacactaagctgtcaagcaacaagacagtcaggaggatccgggttagaggtggaaatgtgaagtggagggcactgagattggatactggaaattactcctggggaagtgaagctgtaactcgcaagactcgtatactaga

SEQ ID NO: 49673 - DNA, 255 bp, Glycine max
  unsure (1)..(255): unsure at all n locations; Clone ID: 701137489H1
attcccattcctattcctcctttccctctcctctccgctcctccaattccccccaaactttctccctccgccgcttcgccgccgcctctctcgcttgcnnnnnnnnnnnnnnnnnnnnnntcgacgccatggcccagaaaatcggaaagtccacgcgccgccccggtgcctcctccaaggcccgcgtctatgccgatgtcaacgtcgttcgccccaaggaatattgggactacgagtccctcaacgtccagtggg

SEQ ID NO: 49674 - DNA, 253 bp, Glycine max
  unsure (1)..(253): unsure at all n locations; Clone ID: 701137490H1
gccacctccaacttctctattgttctctccgtctccctagccttctttttggtgctacttaccaaggcacactcgaccgataccgtttctttcaccttcaacaagttcaacccagtccaaccaaacattatgctccaaaaagatgctagtatttcatcctctggggtgttacaactcaccaaagttggcagcaacggcgtgcccacctcgggatctctcggtcgtgccctttacgctgccccaatccagatnt

SEQ ID NO: 49675 - DNA, 251 bp, Glycine max
  unsure (1)..(251): unsure at all n locations; Clone ID: 701137491H1
ctgcctcgcactggagtaccctctccaatttccttcaaatcccatcaaataagtttctcttataccctctgannnnnnnnnnnnnnnnnnnnnnnnnatcatggctcttttgatgtattttgtgctttttcttgccctcgctggccattcaagtgctctttactgtgtatgcaaagatggtgtgggtgatcaagctcttcagaaagcaatagactatgcatgtggtgctggagctgactgtacccctattc

SEQ ID NO: 49676 - DNA, 252 bp, Glycine max
  unsure (1)..(252): unsure at all n locations; Clone ID: 701137492H1
gctagcactagctagtagtccaactacatatctgccactgtcataccaaatcagaccaactaagtggtctatatggcttttaataattagtactagtttattaagtgggtacgtaaagtagctagcatatgattatttgacaagtaaatctctgctcatnttctagaaaaaatagttatagatctcttcaaatttgacttttcttttttctgaagtattgagtatatgttgcggttaaaaacgttacatgat

SEQ ID NO: 49677 - DNA, 215 bp, Glycine max
  unsure (1)..(215): unsure at all n locations; Clone ID: 701137493H1
tngattatgttgataagaagatatatnntcttggaacnaaganntgganctcaaaaggagaagaaaaagaagctgcnnagaaggagttcatagaagcccttaaattgttggaggaacagctgggagacaagacttattttggaggagacaatctaggttttgtggatatagcgcttnttccattctacacttggttcaaagcctatgagactttt

SEQ ID NO: 49678 - DNA, 243 bp, Glycine max
  Clone ID: 701137494H1
ttaaactcaggagacaatgaaaacgatatggacaacgatacattcaaatgatacaagagatttggaaaagtcaaagaacatattgctttcacctgtcagtcaattgtgctaattgcgaactaatacgagcatattgcgttcaattaccatcaaattatacattggatgaagaaattagatatatcttatcatcatgtgaaaaatgttagctgcacaatctgtaagaactaagaagtattgttt

SEQ ID NO: 49679 - DNA, 258 bp, Glycine max
  Clone ID: 701137496H1
gatggcatgaatctctcagcccctcaaaccttccgctcgaaggaaatttccaagagcaatgttgttgacgatatggtcaacagcaacgccatcctctatgagcctggtgaacatccggaccatgtggttgtcattaagtatgtaccttacgttggggacagcaagagggccatggatgagtactcttctgagatattcatgggcggaaagaacacaattgtgttgcacaacacttgtgaggattcactgttagctgct

SEQ ID NO: 49680 - DNA, 265 bp, Glycine max
  unsure (1)..(265): unsure at all n locations; Clone ID: 701137501H1
ctcctatgtattcggngtcatnggctaatgagcttttggactttgtnttcntttgtgtgcaattttntcnntaatttttcggttncaaaattnttggctgttatttgtgctgcngactccctcttntagaaaattatggggtccggtgaagcgtctcgaatcattgtatccggattcaantccacgaggatattatgctgatcctgtttcnnnnacaaatgggtttatttttgtccggatacnanggggttttcatgngatcagg

SEQ ID NO: 49681 - DNA, 265 bp, Glycine max
  unsure (1)..(265): unsure at all n locations; Clone ID: 701137502H1
ctcaacacagnggagaaaataacataattgagtctcagaacctaagtgnccctacgggggaatcttctaaacttttcgctgatacaagttcttctggtgngcnaattgaaagttagagaacttatagaaatgaacatcttgtcgttgcnctanatatatntagtgtttggcacaacttattttgcnaaaatgnagatacggttcttgtatctaaataagtaagggtttgaacaagtttgcataaccaattgtnatagaatttaat

SEQ ID NO: 49682 - DNA, 269 bp, Glycine max
  unsure (1)..(269): unsure at all n locations; Clone ID: 701137506H1
gnagatggaggncgcatcagcatnaaagttcattccacaccaaatcngnggggtccaaaacgacgcgcttcgatncggtctccntggagtcaagngcgacatcgntggttctcaccctcttnnatcttcactncaatctacnaggagaatgggtgaagcgntgaggaggcnatgcnnngttaacctgtacggnactgcttttcccatganggaggagcttgnacaggcaaatcctgtccaggttccagcggnctcctggancaattcnt

SEQ ID NO: 49683 - DNA, 269 bp, Glycine max
  unsure (1)..(269): unsure at all n locations; Clone ID: 701137507H1
gttttcatattangtcttcaaagcaaagnacncacaatgttctgaaatccatantcccacatcanatggnanaanntaagancacatcagatanaccacaatcacatgnacaacncagattatatatgcccaacacataggcaggcacgtaagacttggacacntgagacnccnaccgctcagaaaccntgaatcntganatgctccttcttcacgataccagcctggaccaggaaggtagaaacantcttcctctgatcaccttgaag

SEQ ID NO: 49684 - DNA, 266 bp, Glycine max
  unsure (1)..(266): unsure at all n locations; Clone ID: 701137508H1
ctcctcctgagttttgttcttcaatgagaattggtgacacccttgttcatgacccagaacaagttcagtctcanagtggaaaggnatttgttttcaaaccctttggagaagatggcaccgatgcagaatacatgaggcaacaggacctgttactgttaggccctccaagattcttgttcaccatagtagaagaatcannagaagatttagaatctgatgatggcaaatccaagtgtgacaagagtggaaaangttcaaggggtaga

SEQ ID NO: 49685 - DNA, 265 bp, Glycine max
  unsure (1)..(265): unsure at all n locations; Clone ID: 701137509H1
atctctctctccactcccatntcgaaatcaaagtcnttntgagttccgccgaatgaccgtagttgcagcancnatggatttggcatccaatctcggtggcaagattgacaaagccgaagttctctctgtcgttcagaagtatganaagtatcntgtttgctatggaggtcaagaggaagaganacaagctaattataccgatntggttaanaaatactatgatcttgttaccagcntttatnngtgtggctggggggaatcttnc

SEQ ID NO: 49686 - DNA, 100 bp, Glycine max
  unsure (1)..(100): unsure at all n locations; Clone ID: 701137515H1
gcgaaacgctacntcgttatctttntcnccgacttccggcggcgtagatccgaggagttacgggaaaccctaaacttcattctttccttnaaaacngagg

SEQ ID NO: 49687 - DNA, 266 bp, Glycine max
  unsure (1)..(266): unsure at all n locations; Clone ID: 701137516H1
ctcgaccaagaaaaaatggcagagggtctcgttctccgcggaaccatgcgcgcccacaccgacgtcgtgacggcgattgccactcccatcgacaactccgacatgatcgtgacggcgtcgcgcgacaaatccatcattctctggcacctcaccaaggaggacaagaccnacggtgtcccccgccgccgcctcaccggacattctcacttcgtccaggacgtcgtcctctcatccgacggtcagttcgccctctccggcncctggga

SEQ ID NO: 49688 - DNA, 265 bp, Glycine max
  unsure (1)..(265): unsure at all n locations; Clone ID: 701137519H1
tctttncatatccantattcattccttgtgcttgtgcttgctatggtgntcacattgatgnncccnaccaatgcaaccctctctccccatgtctatggtanagtttgccctcaggcattgccagttataaagtcagtggttcaacgagcanttatccgtgagcgacgcatcggagcatctcttctgcgcntgcntnnccatgattgtntcgtaaatgggtgtgntggatcaatattgctagatgacncccgaaacttcnctggcg

SEQ ID NO: 49689 - DNA, 266 bp, Glycine max
  unsure (1)..(266): unsure at all n locations; Clone ID: 701137521H1
gacgaagngcaccatttcgagtccaaggccgacgccggngcctccaaaacctnccctgcagcnngccggtagcanccgnnngancggcnacatcgtcatcaaaggccgccccngcaaggttgtggaaatttcgacttccnaaacnggnaagcacggtcacgctaagtgtcactttgttggaattgatattttcactgccagtanacttgcggatatngtgccctcttctcacaactgtgatgtncctcatgtnantcgtactgatt

SEQ ID NO: 49690 - DNA, 235 bp, Glycine max
  unsure (1)..(235): unsure at all n locations; Clone ID: 701137524H1
cagaaaccttcaacgatngccgctgaancgatnccctactagancngcgtcgttgccagntgccaacgattcnaccgccacgggcaanncaatcgcgggagaacgaccncngccgctgcngtcgtaagcngaagangatgaanaaggtatcttaggccccggntnnntaantcttccgaatagnttgaggntgcgaanganaacaangattcnaaacagttgttnaacaaatnga

SEQ ID NO: 49691 - DNA, 261 bp, Glycine max
  unsure (1)..(261): unsure at all n locations; Clone ID: 701137527H1
ggncatggtggtggncagngntgtcagnnacctggntgcaccanaggtgctgngngccgaactgcttattgcnaggcccatggtggnggnnagaggtgccaacacttgggntgtnctanangtgctgaggggnagncggattattgcattgctcatggcggtggtnggcgntgtgggtatccaggtgggtgcaacanagctgcacggggtaagtcaggactttgcattagacatggagggggtaagaggtgtngatagnag

SEQ ID NO: 49692 - DNA, 267 bp, Glycine max
  unsure (1)..(267): unsure at all n locations; Clone ID: 701137531H1
cgacangctcgtggaactcaaagccggtcttccccccctcaagcacaagtttgtncttctggtacacgcgccgaacacctggagttcgaaatcnaacatcatacgaggncaacataaagaaaattgttgaatttagtacggtngaaggattttgggtctgctactgccatcttgctcgtcccgctnctttacctagtccaacagatttgcaccttttcaaggaaggnatccgtcctctatgggaggactctgctaactgcnatggtg

SEQ ID NO: 49693 - DNA, 265 bp, Glycine max
  unsure (1)..(265): unsure at all n locations; Clone ID: 701137532H1
aangatgcaggcncggcaganttnccggaatttntggcacaccgatctcnngngntccatncaggccgatactccttatngttgccncgcgnngtggtgtgcnccntgtgtgncttnccntctncgcaaacgagcnctcnatgatgatatgtcaaggtacacatgtngtgctggctacatgccttgcngtggtaggtgtggaganagtaaatgtcctgaattttgcctttgcactgaggttttcctctgctttggaaattcagtc

SEQ ID NO: 49694 - DNA, 263 bp, Glycine max
  unsure (1)..(263): unsure at all n locations; Clone ID: 701137533H1
tgtactcatgntaggtntctgnngctgaactcaagtttcaatntttnacctanccatggcttcctctctcnttctttgcagtaactacgtcttcnccncttcccaaaaccccttcagangcnnccatttagctcnnntcngnccaaatgggccctccanttttcnctcaaagcntcggtttcagagnccccacttggtcagagccatggtttctgattccnacacttccaggagacaaatagagnttgtgtatgaccccgaag

SEQ ID NO: 49695 - DNA, 261 bp, Glycine max
  unsure (1)..(261): unsure at all n locations; Clone ID: 701137534H1
gcaacttcctctgttttgctcccctgtttnagccttatcataagcttagnntggcacacanggnattttccattgccctagtgactctcnttgttctctttgtcgccacgaacctccnaggtgccacggctgactatggtggtggttggcagagtgctcatgccactttctatggtgggggtgatgcttctggcacaatgggtggagcntgtgggtatgganatttgtatagccagggatatggaactgacactgtggctc

SEQ ID NO: 49696 - DNA, 263 bp, Glycine max
  unsure (1)..(263): unsure at all n locations; Clone ID: 701137537H1
aagatgactcctatcttgttcnctctcntctntcttctttgngccttcacctcatatctagcttcanccaccgctgatgatgatcatgtatacgacactgacggcgataagcttcaatacggtgtcaattattttcgtgttgccagtgataagaggaaatggcggtggaatacaagtagcnaaancaggaaacgaaacttgccctctgactgtggtggcatctggcaacgagctctctgangggttacnnataaagattgcat

SEQ ID NO: 49697 - DNA, 263 bp, Glycine max
  unsure (1)..(263): unsure at all n locations; Clone ID: 701137538H1
ggngagcttgtnattctctatcaacaaggaaantgtcaggtgaagaggttgttgttgcagctgagccagctgctgccatcccagncgagcctatggatatcatgactgccttgcaacttgtgctcagaaaatctctggcttatggtngtcttncacgaggccttcacgaaggggcaaaagtgattgagnagcatgctgcacaactcngtgttctancagaagactgtgaccagcctgactatgttaaactggttaaggccctt

SEQ ID NO: 49698 - DNA, 263 bp, Glycine max
  unsure (1)..(263): unsure at all n locations; Clone ID: 701137539H1
ctctttgctctgctctgcttagggttccaacttcnaacccaacagcactgatcgtnctcatgcancaaggganaatgaggcctatnttctntggaantnttgaatatgatgcccggcagtcagagctggagcngcttnttagangatatgggnaggttgatagggtggatatgaagnctggatttncttttatctatatggaaggcgagagagatgctgaggctncaattcgtgctcntgatcgagtngaatttggtcggang

SEQ ID NO: 49699 - DNA, 262 bp, Glycine max
  unsure (1)..(262): unsure at all n locations; Clone ID: 701137543H1
gctntatnttatggctngcatganggttacatgggtgattgtnatcntgtgcntggccgtggtgggtgcaccgatgntggcgcaagcatggacatgaatgatgtgacggtgaacntggcacagtgcctatcctacctgatgcngggaggancaccttcaacactttgctgcagcggagtcaagancattcttggctctgctgtcnccaccgttgacaaacaaactgtgtgcnactgtctcanggcggnatgctgctaggtac

SEQ ID NO: 49700 - DNA, 261 bp, Glycine max
  unsure (1)..(261): unsure at all n locations; Clone ID: 701137547H1
ctgtgnggcanttcacttgggtntttgaggatgccaagantncaantgttgagnntgtgttgntcttggctggngatcatctatatcgaagggattacatggaccttgtgcagngtcacgtggntaganatgcngatattacagtttcatgtgctgccgtgggtgacagccgtgcatcagattatggattggttnnngtagatgacagaggccgcatcattcaattttcagaaaaacctaagggtgatgatctgaaagcaa

SEQ ID NO: 49701 - DNA, 254 bp, Glycine max
  unsure (1)..(254): unsure at all n locations; Clone ID: 701137548H1
tgttgctctgcctctgcacagngnntggtgtgggagggganacagacntgntctatctgtgttcacngcaccactgtttcccggnctgacacccttatctagaagaacaagaatcagcacatacacccgccacaacgccatagtcatcatcacttngaagaacttcacaattnntattttcttggatatggcgngtcttgctcttgaaaccgaggatgtaatctcagatatatacctttcactgggacttaagg

SEQ ID NO: 49702 - DNA, 260 bp, Glycine max
  unsure (1)..(260): unsure at all n locations; Clone ID: 701137549H1
caaccttaaacctttctttcttgtaaactttatngattgattctgagaataganctaagagggtatagacatggctagcgcaattgcagcttctgttttggntctgcttctggcnttccccactgtatttggagctgaccatgaagttggtgacactagtggatgggccctcggagttaattacaacacctgggcctctgggaaaactttcacagttggtgacactttggtgttcaagtatgactccactcatcaagttg

SEQ ID NO: 49703 - DNA, 264 bp, Glycine max
  unsure (1)..(264): unsure at all n locations; Clone ID: 701137550H1
cncaaagattaagccangcatgtantaagtntgnactaattcanactgtgaanctncgaatggctcattaaatcaggtataatttgngtgatggtatctacnactcggataaccgtagtnattctagagctnatacgtgcaacanacnccgacttctgnaatggatgcatttattagataanaggtcaacncaggctctgcctgttgcnttnatgattcatgatanctcgttcggntcgcacggccnttgtnccggcgacgcat

SEQ ID NO: 49704 - DNA, 263 bp, Glycine max
  unsure (1)..(263): unsure at all n locations; Clone ID: 701137556H1
gctgcactataccagantgtctcagggaagnggcagtgcatctttgcctattgtggtcacngtggtttcactactgtgccttttggaacgtgctaacgcngcaacttactccgttggaggncctggggganggacctncaacactaatgcttggcccaatggaaaaagnttcagagctggtgatatcctaatcntcnactatgactcancgacccacaatgtggttgctgtggacagaagtggatacnacagctgcaagacac

SEQ ID NO: 49705 - DNA, 260 bp, Glycine max
  unsure (1)..(260): unsure at all n locations; Clone ID: 701137563H1
gaaaatgaaggtccttgttttcttcgttgcnacaattttggtngcatggcaatgccatgcgtaacgatatgttccctctccgaatgaacactggcatggtgcccgtactccggaggtgagatgcgcaagttggnggcttgctgtggaagcacacaacatctttggctttgagaccattcctgaagagtgcgttgaagcaacaaaggaatacatccatggcgaacaatatagatcagactccaaaacagttaaccaacaag

SEQ ID NO: 49706 - DNA, 264 bp, Glycine max
  unsure (1)..(264): unsure at all n locations; Clone ID: 701137564H1
gtacccgcctagccattgatttggaaaagtccaagcttcanagatgagtaagcttcagagtgatgctcttagagaagctatcncaggaatcatgactgattccaaggaaaagaacaggaaatttgtggagaccattgaactccaaattgggctgaaaaactatgatccccagaaggacaagcgttttagtggctctgttaagttgcctcacattcctcgccccaagatgaagatttgtatgcttggagatgcccaacacgttga

SEQ ID NO: 49707 - DNA, 261 bp, Glycine max
  unsure (1)..(261): unsure at all n locations; Clone ID: 701137565H1
gganaacatcgncaaactcgtaantnctatgctacctacaatgctctcttggaaataaaagaattgatgctaaagganacatctttattgaattcgatcatttcccagtttcaagaggcctttagtagcnctgatggacgtataaaacttgttcattccatggaaggaattgtcnagggaagtcaacagaagctagaaagggttcatgtaggacttcaagnagaagagagaattcgtaatgatctgaaggataggtatgct

SEQ ID NO: 49708 - DNA, 261 bp, Glycine max
  unsure (1)..(261): unsure at all n locations; Clone ID: 701137566H1
gcaacttccttgtctnacagntcctgtgttccggaganaggaanggnaagganagatgtcggggcnancgcngcgtctgaacgtggtccccacgtgacgatgctgggagtggtgaaggcccgnttggtcggcgccacgcgcgggccacgnnntcctgaagaagaagngcgacgcgctcacggtgcagttccgccagatcctgaagaagatcgtctccacaaaagantccatgggcgacntcatgaaaacgtcgtcgttcgt

SEQ ID NO: 49709 - DNA, 259 bp, Glycine max
  unsure (1)..(259): unsure at all n locations; Clone ID: 701137568H1
gttggngtcttcaatcaggttctccaggcgatcatcccaactccaatactgcccccnacctcaanaatcaatcagggantattcaattntctgctggtctaagcaacacaagattancacagnntggcaattctactnctcttgggcgtagaggccactctggaggaatcagcagcaggnncnttgggccaagtagtagtaataactactcaactggaaataacactagcacatccctnnngggnngctctnnnnnnnt

SEQ ID NO: 49710 - DNA, 261 bp, Glycine max
  unsure (1)..(261): unsure at all n locations; Clone ID: 701137569H1
tgggaattagggttattcgcgtggcgaagatgattgaggtggttttnaacgatcgattggggaagaaggtgcgcgtgangtgcaacgncgatgataccatcggcgacctgnagaagcttgtngcggctcagactggcacaagagccgacaagatccgcatccagaagtggtacaccatctacaaggatcacatcactctcaaggattacgagatccatgacggcatgggtctcgaactctactacaactaaacacaacang

SEQ ID NO: 49711 - DNA, 261 bp, Glycine max
  unsure (1)..(261): unsure at all n locations; Clone ID: 701137570H1
tttccctctctttctctggaaaattcccccgattttctcgagaaagtgaaacggaattatgagctttcaggacatcgaggctgggcggcccttcagttcgaggcgcgggtngatgaacgggcagcaagacccgacgcaagcggtggctgccggaatattccagatcaacaccgccgtctccaccttccagagactcgtcaacaccctcggaacccccaaagacacccccgacctccgcgaaaaactccacaagacaagata

SEQ ID NO: 49712 - DNA, 262 bp, Glycine max
  unsure (1)..(262): unsure at all n locations; Clone ID: 701137572H1
ctacaatggctactataccagttaatcccaagcctttcttgaacaanttgactgggaagcctgtaattgtgaaactgaagtggggaatggagtacnagggctatctcgtttccgtngattcctatatgaacttggcagctggccaacaccgaggagtacattgngggacaatttactggaaatttgggagngnttttaatcagatgtnacaatgttctctaccttcgaggagtaccggaggatgnggaaatcgaagatgctg

SEQ ID NO: 49713 - DNA, 260 bp, Glycine max
  unsure (1)..(260): unsure at all n locations; Clone ID: 701137575H1
tnatagagcatantatnaganngtgaaanctcatggnggttggcctcaacanganggngaacatggggtttgangnaactgagctaaggcttggactgcctggnaacgtaggaggcactggcactgaagaagtgctcatcaggnaganangtttctctgagactganactgaaactgaggaggatgngtctgctaccactgtggntttgatgcttaatctttcntctaaggnngctgctgctgctggcngatccaactgt

SEQ ID NO: 49714 - DNA, 257 bp, Glycine max
  unsure (1)..(257): unsure at all n locations; Clone ID: 701137576H1
ggggcaaganccctgatgctcaangccttctngttcggnctgaaantcattcctaggnntgcnaagcattttagtgcggctcatgtctatntcatgttctgctatgattganattatgcnananagtgatatanactnattttntttttngtcactatnattngnttggcngcnacnagtntgcnctcaaacttggcgtacacctctnttatttcagaccattgtgaatgtggagtgtgacnagattgcnacgcggc

SEQ ID NO: 49715 - DNA, 258 bp, Glycine max
  unsure (1)..(258): unsure at all n locations; Clone ID: 701137579H1
gccttcccaaatcaccaatttaacagcatncattcacaagacggttgntttgcttgtcttgtgttanatctcttaacaggatttgggtnttgacgcttactgggntgtaacanacagaaacagctttcttnttgggatgcccctttgatttctggttctggacacaagctgtaggtgttacttcaactggattctggntagatattagntacagcttgaagttatgtctgcttatggccatcanatggagcagatgta

SEQ ID NO: 49716 - DNA, 200 bp, Glycine max
  unsure (1)..(200): unsure at all n locations; Clone ID: 701137580H1
gagtnttgagcntngaggcgccatctctcaccaaacccaacgacccaacaacaccttccaacacttccagcaccntagtctggagggggggccgggcgaacgagcccactccgaaanatgtttgcggtngcgtccatcgccgccggcatacagttcgggtgggctctgcngctgtctctcttaaccccctacgttcagct

SEQ ID NO: 49717 - DNA, 261 bp, Glycine max
  unsure (1)..(261): unsure at all n locations; Clone ID: 701137581H1
cttctctgcagcttttgcctacaactcccttcaccatggctgaacnaaccgngaangcttttctgaagcaaccaaaagtgtttctcagcacaaagangactgggaagggaaananacctngaaaaggtgggaaccgcttttggaagtccattgggcttggatttaagactcccagggaagccatcgaagganccnatattnncaagaagtgccccttcactggcaatgtttccatccgtggccgtatcttggctggaacat

SEQ ID NO: 49718 - DNA, 259 bp, Glycine max
  unsure (1)..(259): unsure at all n locations; Clone ID: 701137583H1
gttgctccagtngccggcactaaacancatggcggncaaggcagtcaccatccgaaccnggaagtttatgacaaacaggcttctctccagaaagcagttcgtcgttgntgtccttcatccagggngggctantgtttccnaggctgaactganggagangctgggaagantgtatgacgtgaaagacaccaacactgtattngtcttcaagttccgaactcattttggtggtggcaagtccactgggtttggtttgatt

SEQ ID NO: 49719 - DNA, 227 bp, Glycine max
  unsure (1)..(227): unsure at all n locations; Clone ID: 701137585H1
cacatgccccantgttgaaaacattgtcagagaagcngtcaaaaagnagtntnatcaaacatttgtnacggttcctgctannattcgtctcntcttccatgattncttcgtgcagggttgtgatncntcngttttggttgnatccncaaannacnncaaagcagngnnnggatcanccanataatgtttcgctagctggagatgtatttgacacagtgattcnngca

SEQ ID NO: 49720 - DNA, 262 bp, Glycine max
  unsure (1)..(262): unsure at all n locations; Clone ID: 701137587H1
gctngctggggncttgttctganttcattcgcggngttggagaagccttattttgagtttctgagaaagganttggggcacgatcgtgtgtgggcggttggagccgttgctccctgaggacgcganagaggngcgnggagggtcgagttcggtgtccgtgaacgacgtcgtttcttggttggatgaannggaagatttannngtggtgtatgtntgtntcgggagcatggctnttctgtccanggatcaaacggaggcgatt

SEQ ID NO: 49721 - DNA, 264 bp, Glycine max
  unsure (1)..(264): unsure at all n locations; Clone ID: 701137588H1
gnagtntcctgtgcatcgtctccgaaaatgancgacgcagatgtctcaaagcaaatccagcagatggtgcagttcatccgccaggaagctgagganaaggccaacgagatctctgtctccgccgaagaggaattcaatatcgagaagctgcagttggtcgaagccgacangaagaagatcaggcaagaatacgaacgcaaagagcgccaagttganattcgcaagaagattgagtactcgatgcagctaaatgcttctcggatt

SEQ ID NO: 49722 - DNA, 260 bp, Glycine max
  unsure (1)..(260): unsure at all n locations; Clone ID: 701137589H1
gttagcatagnggncnaaaagtctggaaganaaganaagcttgcttgcaaagtgtgcttctaccactctttcttcgaagcttattggtggagagnanganttttttgcacccatggttgtggatgctgtaatttcaattgganatgangacaggttgaacatgattggnataaagaaggttcctggtggtaccatgcgggactcatttctagtaaatggtgttgccttcaaaaagacattttcatatgctgggtttgagc

SEQ ID NO: 49723 - DNA, 259 bp, Glycine max
  unsure (1)..(259): unsure at all n locations; Clone ID: 701137590H1
gttcanatggcttatgcngtctcagngacngatgctgcgaaggctccacgagcaccggacggngtggaatcatacataacggagatgttccttnggggaaagnnatattacctctatgtacacagttacttgcgatacggtatgctagcagctcgtgcagaggctttaaaggttcgtgattctgaaaatccttgtattttggctggctttgatgggtattacgtatatggaggngtgcagtataaggccaaagctcccc

SEQ ID NO: 49724 - DNA, 215 bp, Glycine max
  unsure (1)..(215): unsure at all n locations; Clone ID: 701137591H1
atctgtgncgngcntcntggcctcgagagcngtgctattgttggctatgtgtgtgcttccggtcatggttgtggccattcgcccagcaaagaaccctttttgcgtgangggtcgcgtctactgtgacccttgccgtgctggttttgagacctcagcaaccacctacattgccggtgctgagattatgtngcaatgcangagcagggttagcaacg

SEQ ID NO: 49725 - DNA, 257 bp, Glycine max
  unsure (1)..(257): unsure at all n locations; Clone ID: 701137592H1
gcggaatcagcggggaaagaagaccctgttgagcttgactctagtccgactttgtgaaatgacttgagaggtgtaggataagtgggagctggaaacagcgaaagtgaaataccactacttttaacgttattttacttattccgtgaatcggaagcngggcactgcccctnctttttggacccaaggtcggcttcggccggtcgatccgggcggaagacattgtcaggtggggagtttggctggggcggcacatctgt

SEQ ID NO: 49726 - DNA, 259 bp, Glycine max
  Clone ID: 701137594H1
gcgaaacgctgtcgttgcgccaatcgcggcgttgttgttggtggtgctactcgcggcgagtgtggtggtggaggctcaggagaactcggacgtgaagacgctggtgaagcacatgcacgggaagaagtactgcgacaaaggatgggaatgtaagggctggtcaatttactgttgtaacctcactattactgattatttccagacctaccagttcgagaatctcttctccaagcggaactcgccggtggcgcacgccgtc

SEQ ID NO: 49727 - DNA, 259 bp, Glycine max
  unsure (1)..(259): unsure at all n locations; Clone ID: 701137596H1
gaaattagcgtganaaatgttgggtgtgttcagcagctccatagtgtcgccgccggaggagctcgttgccgccggcgnccgtacaccgtcgcgaagatgacggcggcggcgctgcggaagtggttcgaggagaagaacccctccgcagtgtcggtggaggtcggagagcatgtccagctcgcttatacccaccagaacgagtcgccgtttcagcccagatccnttnctgtganggatgaggtattctgcttgtttgagg

SEQ ID NO: 49728 - DNA, 270 bp, Glycine max
  unsure (1)..(270): unsure at all n locations; Clone ID: 701137601H1
atgattntnaccatgatacagtccaccagtttgcaccancctatcacgantatgnnctntatantcacagcgaaggtgnggagggaactaagaagtacaggtcacgaactnttgtnccanttggcccagaganggattctgtgagaagaaataaacatatgtttggaaacaagttagatgacatacagctctcaagtttgtctnatnctaccagtagcactccttcaaattctggttccatgcctgatgcttcanattctgatgcaacta

SEQ ID NO: 49729 - DNA, 265 bp, Glycine max
  unsure (1)..(265): unsure at all n locations; Clone ID: 701137603H1
caaaaccctagcggcgcctgctttcttcgttcgtcttttgcatcagccatcaggatggagtctcaggtgaagcatgctcttgttgtcaaagttatgggtcgtactggatccagaggacaggtgactcaggttagagtgaagtttttggatgatcagaaccgtcancatcatgaggaatgttaaaggaccagtgagagaaggagacattctcaccctactcgagtctgaaagggaagcaagaaggttgcgctagagggtatttttt

SEQ ID NO: 49730 - DNA, 264 bp, Glycine max
  unsure (1)..(264): unsure at all n locations; Clone ID: 701137604H1
ctaaaattaaaattgaaaagatcaaaatccaaattacaccaagttcatagtaataataactnataacaacaagttaaacccaggataataatgagaaanaagagtaccggaaagaaacaaggtggcggtggtggtttntgtnttccaatttccaaatgaaacgaanccctaaccagagttttgttcgtccttgtcatggggctttctgcagaggatcatgtgcatcggagagaaaatcccagagtcaccccctctggtcaaata

SEQ ID NO: 49731 - DNA, 263 bp, Glycine max
  unsure (1)..(263): unsure at all n locations; Clone ID: 701137605H1
agggtttnagcgcanttncttctagatntaaggaagatgggtaaggaaaaggttcacatcagtattgnggtcattggccatgtcgactcnggganatccactaccactggtcaccngatttacaagcttggaggcatngacaagcgtgtnantgagaggtttgagaaggaagctgcngagangaacaagaggnctttcaagtatgcctgggtgctggacaaacttaaggctgagcgtgaaagaggaatcaccattganattgc

SEQ ID NO: 49732 - DNA, 264 bp, Glycine max
  unsure (1)..(264): unsure at all n locations; Clone ID: 701137606H1
ctcctacnacgcttttctctgcactcatgggcaaggtcaagatcggaatcaacggattnggaagaattggccgtttggttgccagagtcgctctgcaaagagacgntgttgaactcgttgccgttaacgaccctntcattaccaccgattacatgacatacatgtttaaatacgacagtgttcacggacactggaagcatcacgatgtcaccgttaaggncgagaagacccttctcttcggtgacaaggcagtcactgtttttg

SEQ ID NO: 49733 - DNA, 265 bp, Glycine max
  unsure (1)..(265): unsure at all n locations; Clone ID: 701137607H1
gcccggcacaatacnaacaacaagcaaaacagattcaggagagaanccagcttngagacagttatggcncacggtgcttacagcaagcggcgcgtgancgcaacgctaganccnnctccaagcctctcggcancgncaagaagtccaaaccctccgtttccctcaaaaaccagantcgatcccntgagcgcangctccgcaagancctgcctcccgaggtgcgcgaggcgcnggagcaaaagttggaggcatgaagaagcagcag

SEQ ID NO: 49734 - DNA, 266 bp, Glycine max
  unsure (1)..(266): unsure at all n locations; Clone ID: 701137608H1
ggcttcaacatgcaccaagtntcccattccangaacggccacctgatgcagagctnctngagagagatggagatcaagatnatagagatganagatgggatcccgattctgacagggaggttggcgatgacagcaatcctgttcgcagaagggtganaagtgaatgcnttgatgctgaggataaagntacananagntatcataaacatctagattgtngaagagantatcttacgccttncaaggagatttcatgctccaaggtg

SEQ ID NO: 49735 - DNA, 264 bp, Glycine max
  unsure (1)..(264): unsure at all n locations; Clone ID: 701137609H1
ctctgacacatttggggccttgttgagtgtgttttngcaagagggtatggcgaaggacgntgaggttgctgagcgtggctccttctctgggaaggactaccaggaccctccaccagcaccactcattgatgctgaggagctcacaaagtggtccttttacagggctcttattgctgagttcattgccactttgctcttcctctacattactgtgcncacagttatagggtacaagcaccagacggatcatgctgatgcgtgtgg

SEQ ID NO: 49736 - DNA, 263 bp, Glycine max
  unsure (1)..(263): unsure at all n locations; Clone ID: 701137610H1
ctctgcncncctgagcagctggtaactcattacaagattggaagtntcaaattaggcgatgtngatgatntntntactgaaggtaggtacagttaggggcaagcncaagaagggnggaatagttgacattaatgcngctgcaagaatcgtncttcatgattggaatgaaggtaaaattatatatnataccatgcccccaaatagggatcaaggggaaccttcagaggccaatatagtttctgatttttcaaaagagtttaaca

SEQ ID NO: 49737 - DNA, 208 bp, Glycine max
  unsure (1)..(208): unsure at all n locations; Clone ID: 701137611H1
gaaaattgcaacananatacntacnacggaactcanccnanntcaatggttgcgagagtaacggaatngagtgtgtttgaagtgantatgggtccnatgaggatgctgaataacaganaganaggacagcagaagaagttttgttaacctataccgtatntattatatcnatatnnaccantnttgttctgccattccacacaacana

SEQ ID NO: 49738 - DNA, 263 bp, Glycine max
  unsure (1)..(263): unsure at all n locations; Clone ID: 701137613H1
cgcaccgcaaacagtgagccatggccgtcggaaagaacaagcgcatntgccaaggggaagaagggtggcaagaagaaggcagctgatccctttcccaagaaggattggtangacattaaggctccttctgnttttcnagtgaaaaatgttggcaaaacccncgtgctcncgtactcanggtaccaagattgcttctgaaggactcaagcatagagtgtntgaggtctccttggctnatcttcaangggatgaggatcatgcat

SEQ ID NO: 49739 - DNA, 261 bp, Glycine max
  unsure (1)..(261): unsure at all n locations; Clone ID: 701137614H1
gcattttccaacacgattacacgancgaatcanacccctctttctcnccgaagctgcttttaatatcgtactggccttgcgattgnnctccnctttaatacatactgtnctctcttcgatttgagggaacagtacaagagtctgagcatcggttaacccaactgcacaggttttaaactgccgtcatggtatcatcgtggtgttgcgggaaattgtggacaaatgtgcccgttgtggctgtaaattgtggttgtggagact

SEQ ID NO: 49740 - DNA, 263 bp, Glycine max
  Clone ID: 701137615H1
gtttggaagaagctgatccgagaagatggtgcagcgtctcacctaccgcaaacgccacagctatgctaccaaatccaaccagcacagagtcgtcaagactcccggtggcaagcttgtttatcagaccacgaagaagagggccagcggacccaagtgccctgtcactggaaagaggattcaagggattccacatttaaggccagcagagtataatagatcaaggttacacagaaaccgaaggactgtgaaccgtgcatatggtg

SEQ ID NO: 49741 - DNA, 264 bp, Glycine max
  unsure (1)..(264): unsure at all n locations; Clone ID: 701137616H1
ggcttttgcagttacgcccaagataataacggtgtcattcgataagcaaaaccaaaggaggagtttcgaaggattgtttgggaaaaggtatcgggtaagggtgaagcgaagtcaagatcattcagtgaagtgtggtattgagcgaanagcagcgatggaaagaaagggggcggaggaggaggcgtgtcaaattcgaactacgtggtgccgctggacaacatggcgaactcatcctgcataacacgtcctttagccgagatactc

SEQ ID NO: 49742 - DNA, 267 bp, Glycine max
  Clone ID: 701137617H1
cccttacgttatggacccaccaattcaccatccacttgggaaacgccctgccgccgaggacgattccgtaatttccgattgcgagagcggggtttccgggggcgacacggcggctggctttgtgccggccgacgaaaacgccgacctcgtccggaccagattcgttcgtggcctggccgcgcacgggttgaaacccgaggttttggcggttggcagaaacgcgtgttcctccgttatggcgcaacgcgtcaacattcctttcacgtt

SEQ ID NO: 49743 - DNA, 264 bp, Glycine max
  unsure (1)..(264): unsure at all n locations; Clone ID: 701137618H1
ggccgtttcaacaactntggctgtaatggtgggttgccatcacaagcctttgagtacatcaaatacaatggaggacttgagacagaggaagcatacccctacactggaaaagatggtgtatgcaaatnctcagctgaaaatgttgccgttcaagtcattgactcggtcaatatcaccntgggtgctgagaatgaattaaaacatgcagttgcatttgttcggccggttagtgtggccttncaggtggtgaatgggttccatttc

SEQ ID NO: 49744 - DNA, 266 bp, Glycine max
  unsure (1)..(266): unsure at all n locations; Clone ID: 701137620H1
gtccgcaccaccctcggccctcgcggcatggacaagctcatccacgacgacaagggaaccgttcaccatgctccaacgacggngccaccatcatgaagctccctcgncatcgtccaccccgcngcaaaaatcctcgccgacatcgccaagtctcaggactccgaggttggcgatggaaccaccactgtggtgttgcttgcagctgagtttttaagggangcncagccattcatgaagacggtgttcactctcaaaacttgatacgg

SEQ ID NO: 49745 - DNA, 265 bp, Glycine max
  unsure (1)..(265): unsure at all n locations; Clone ID: 701137623H1
caaaatcgaattatcanagaaacaagtgaattgaatttcattgacagagtcagagtgaagtgttncgcaaatcngaggtgcgcnttgcantgtggtngatttgtaagnatggcgccagnntcggctctcgcaaagnacaagctggngttcttgggtgatcagtccgttgggaaaaccagcntcancactcgcttcntgtacganaantncgacaacacttatcaggctacaatcggtatcgatttnctgncaaaaactatgtatc

SEQ ID NO: 49746 - DNA, 264 bp, Glycine max
  unsure (1)..(264): unsure at all n locations; Clone ID: 701137624H1
ctcgtggtgttttactgtatggaccccctggcactggcaaaacaatgcttgccaangctgttgctaatcataccactgccgccttcatcagggttgtaggatctgagtttgtgcaaaagtatcttggtgagggtccacgaatggttcgtgatgtatttcgnctcgctaaagagaatgcgccngctatnatatttattgatgaggttgatgcaatagccactgctagatttgatgcccaaactggagctgatagagaagtacagc

SEQ ID NO: 49747 - DNA, 263 bp, Glycine max
  unsure (1)..(263): unsure at all n locations; Clone ID: 701137625H1
ccgccctgnagcgtctggncgccgangncatcgaggccctccgcgagcgccgcctccagcagatgaagaagatggcggagaagcgctcccgctggatctccctcggccacnccgaatattccgagattccctccgagaaagacntcttccccgtcgtcaaggccagcgaacgntcgtctgccacttctaccgcgaaaactggccttgcaaggttatggacaaacacttaaatattttggcaaagcagcatatcgagactcgct

SEQ ID NO: 49748 - DNA, 253 bp, Glycine max
  unsure (1)..(253): unsure at all n locations; Clone ID: 701137626H1
cgcttctcagtttctcgtntncccaatcgcagctaaaaaatcctctgtaccctttgacccttttctcaataagaagaaattaggaaacgcaacaatggctcnagcggttgaagaatggtataagcagatgcccgtcatcacgcgctcctatctcaccgctgctgttgtcaccactatcggatgctcccttgatataatttctccgtatcatttgtacttgaaccctatattggtggtgaagcaatatcagttt

SEQ ID NO: 49749 - DNA, 259 bp, Glycine max
  unsure (1)..(259): unsure at all n locations; Clone ID: 701137628H1
gaaagaggaatngcgaanaccgaggngctnccgatcccgattnacaacaacctagaacctgncnatggcggaagttccgcactcgaagaagcnnngcttctttcgacattttgaagtccaaattcatcgatatcttcggccatcatcctcaaatctttgcncgctcacccgggagagtgaacttgattggggagcatattgattatgaaggttattcggtgctgcctatggcaattcggcaagatacgatcgtggcgat

SEQ ID NO: 49750 - DNA, 262 bp, Glycine max
  Clone ID: 701137629H1
ggggtttgcacctctcacctcacgcgggtctcagcagtacgtgtccctcactgtccccgaactcacccagcaaatgtgggacgccaagaacatgatgtgtgccgccgatcctcgccacggccgatacctgacagcatcagccatgtttaggggaaagatgagcaccaaggaagtggatgagcaaatgatcaacgtgcaaaacaagaactcatcctacttcgttgagtggattcccaacaacgttaagtcaagtgtgtgtgac

SEQ ID NO: 49751 - DNA, 255 bp, Glycine max
  unsure (1)..(255): unsure at all n locations; Clone ID: 701137632H1
cnctaatggaaggtgaaggaaaagcattcagagtccttggttttaatcaaaatcanagggcngcatttgngcaaatttngatgaggtttggggtnggtgattttgattggaaggagtttacttcccgcatgaaacagaagacttacgaagaaatcanagactatggaacccttttcttgtctcatattgcngaagatanaactgattccgccacattcgcagatggngttccaaaagaaggactccgaatccaag

SEQ ID NO: 49752 - DNA, 265 bp, Glycine max
  unsure (1)..(265): unsure at all n locations; Clone ID: 701137634H1
aataactgcaggcagctctgacttcagtgcaagcaagcatcaaaacattgcttnanaagcatcaantcagcgnttctgcaagttccaantttccaactatccacagaaacggtcgtttgaaaaaaagctgttaattcgggagcgatatggaggtcgaactcaaagagctgcacgccgatcttcaatctctgagcnaatcgcttcccgatccatctcaccatgatttgctccgcaagattcaattgcgtgttggggaccttgcgaa

SEQ ID NO: 49753 - DNA, 254 bp, Glycine max
  unsure (1)..(254): unsure at all n locations; Clone ID: 701137638H1
angaaaatgaaggtccttgtnttcttcgttgctacaattttngtancatggcantgccatgcgtagcgatntgtnccctctccgantgaacactggctatggtgcccgtactccggaggtgaaatgcgcaagttggaggcttgctgnggaagcacacaacanctttggctttgagaccattcctgaagagtgcgttgaagcaacanaggaatacatccatggcgaacaatatagatcagactccanaacagtta

SEQ ID NO: 49754 - DNA, 262 bp, Glycine max
  unsure (1)..(262): unsure at all n locations; Clone ID: 701137640H1
ctcaatctcactgngttatgagttatgtgtgagcnccaaccaacaanggngtctctgactaccgtnatggttctntattaccttgtngatcgctggtgcagacgcagcggcggagcccaaacggngcgtnttgacaccggggggntgagcagagacacctttcccaaaggnttcttattcggaacggccacgtctgcgtaccaagtggagggtatggcccacaaagacggtcgcggcccaagcatttgggacgtctncatca

SEQ ID NO: 49755 - DNA, 219 bp, Glycine max
  unsure (1)..(219): unsure at all n locations; Clone ID: 701137641H1
tgcggctcgntntgntncttggtgtnncccaaaatggcttcncttnnngcncttgccatnnngtnaagttgccaaggnngcagctgnagttgcaggaaatgtctttgctnttgggttgtttgtgtctcccatacccacatttaggaggattatcaganatgggtcancagagatgttctcagggttgccatanntttattcccttctnaactgcttgat

SEQ ID NO: 49756 - DNA, 259 bp, Glycine max
  unsure (1)..(259): unsure at all n locations; Clone ID: 701137642H1
ccaagattgacaggcgatccggcaaagagcttgaganggagcccaagtttttgaagancggtgntgctggttttggtaagatgattccaaccanncccatggttgttganactttctccgagtatcctccacttggnaggtttgcngttagggacatgcgtcaaactgttgcngtgggagtcatcaagaacgttgagaagaaggatcctaccggagccaaggtcaccaaggctgcccagaagaagaagtgaatcgtgcg

SEQ ID NO: 49757 - DNA, 258 bp, Glycine max
  unsure (1)..(258): unsure at all n locations; Clone ID: 701137645H1
aatgctnngagttggacncagggnccaagattccttctcttgggggagggnctnggcnagctgaacctggttttttagctgaanctctcaccacagccattcaggntggatanaggcatattgactgtgctantgcgtataagantcaagcatagattggttctgctcntaagaagctttgtgatgatggtgtggtgaagcgtgaggacttatggatcacttccaaacnctngtgttcagatcatgcaccagaagatg

SEQ ID NO: 49758 - DNA, 263 bp, Glycine max
  unsure (1)..(263): unsure at all n locations; Clone ID: 701137648H1
gcctgcnctngcttngctncctcttctatttgcntncnngttagctgccacnacagaatcaagaaaagatacaggggaatattggaaaatgatcatgagagatcaggaaatgccaganggnctncaaggtctngtttcattncaatcngaaaataaccctaagactcaagagcagcntggtaaaggttccaaaaaccattgtgaagagtctctagntacaaatacacaagtnaatagtgacttcgaacccataccaagtgttg

SEQ ID NO: 49759 - DNA, 265 bp, Glycine max
  unsure (1)..(265): unsure at all n locations; Clone ID: 701137649H1
cacanatactgcacttcctgggagtngaaggaccaaaaacttctgaccccagcaaatatattcgttatatnnataacagagtacatcttgagaatgcgactgtnagggccagtgctgtgagcacattggcaaagtttggtgctgctgttgatgcactaaagccccgcatatttgtactgctaaggcggtgtcttnttgatagtgatgatgaggttcgtgacagagcaacactttatctgancacacttggaggtgatggttcagt

SEQ ID NO: 49760 - DNA, 263 bp, Glycine max
  unsure (1)..(263): unsure at all n locations; Clone ID: 701137650H1
caggcgtgagtgccactcttccatctttcccttgtcccagattcccnccactcatngcnattncttcgatccgntttctaaatnccacacccctccgttccactgcttcgccgcgacaagttacaagaatggcttcgaagaatgctcaacaagacacgcgcttagccagaatcgcctctgcgatccgagncatccccgactttcctaagccaggaattttgtttcaggacataaccncgctgcttcttgatacaaaggctttc

SEQ ID NO: 49761 - DNA, 263 bp, Glycine max
  unsure (1)..(263): unsure at all n locations; Clone ID: 701137656H1
ctggattctaagagggagatggacanccttgctgcattggatgagatgaagtcaatgaagtctaggcatgcaactgtcagtgttgatgaaatgctggaggctctgcagcgcacagcagcngacaaggaganaaggctggaagaagaagacgaagctctgataaaatcagttgtctttcataattcagacggttntgtcagaagaattcgtgatgaagatattganacagaggaggaattggttcagttttcaaatggacatgg

SEQ ID NO: 49762 - DNA, 261 bp, Glycine max
  unsure (1)..(261): unsure at all n locations; Clone ID: 701137657H1
cttgaaantnctactgtngttaccaaggaagatgtgcngcccttngatatagaagggacatggagagctatggaagagtgttacaagttgggaatagcaaagtccannggcatatgcgattntggtatcaanaaaactcacnaaactcttggaaatagccaccattcctcctgcagtcaatcaggtggnaatnaacccatcntggcagcnagggnaactcagggagttctgcaagcngannggaattcatgttagtgcttg

SEQ ID NO: 49763 - DNA, 258 bp, Glycine max
  unsure (1)..(258): unsure at all n locations; Clone ID: 701137661H1
gcgggatgnaagcnganacagtgcaagaacagcgcnaangcgcgcagtgntgaagagggctctnaagaacaaagcttngggcatcaccttcaacgagaaagatctcaatgactatgtcaccggctttcacaagcgcaagaagaagagaagaaaggaagcccanaagcaacagaacgaggctctgngccgcaaacgcaacgacgaacgcaaaaggaggaattggnaagagaacatgttntaatggaggcgtgccacctg

SEQ ID NO: 49764 - DNA, 239 bp, Glycine max
  unsure (1)..(239): unsure at all n locations; Clone ID: 701137662H1
gttttttttactatggcaacgantncttctaatggagcaacaaagcaacctcccatgccancctcccttgcggttttccaagttctttcagtccaatatgagaattctggttactggaggagctggatttattggctctcacctagttgacaaattgatggaaaatgaaaaaaatgaggtcattgttgctgacaacttcttcactggatcnaaagacaaccttaaaaaatggattggcc

SEQ ID NO: 49765 - DNA, 116 bp, Glycine max
  unsure (1)..(116): unsure at all n locations; Clone ID: 701137663H1
ctcttnncttccctctgnttccgaatcngaatcgaaatggcttcggagactgngacgnttgcttttcaggccgagatcnaccagctcctcngtctaancatnancaccttccacac

SEQ ID NO: 49766 - DNA, 266 bp, Glycine max
  unsure (1)..(266): unsure at all n locations; Clone ID: 701137665H1
ccatgggctancctcattgctcccatcanctttncgcctggttnagnttgcngaagctcntaganaagcgtttccnagnatgggggactgaggagaagancgttatngcaatattnnntcacananatgttcatcanaggcaacanatcaganagatttatgaggaantttaccangnggacctcatcaaacgcctagantctgagcnctctggtgactttgagagagcngtgtaccgttggatgctggaacctgcagatcgtgat

SEQ ID NO: 49767 - DNA, 262 bp, Glycine max
  unsure (1)..(262): unsure at all n locations; Clone ID: 701137670H1
ccaanaccctacncccatccaannccaattcaccctcaatcatggggtctgaaggtnccactgtgcgttcgttcctaggancttcagattattggaagagcttgagagaggtgagaagggaattgganatggaactgtgagctatggaatggatgatgctgatgatatctacatgcagtcctggactgggactattattggcccccctggtactgttcatgaagggcgtatataccagcngaaattattttgtggcaaggnt

SEQ ID NO: 49768 - DNA, 62 bp, Glycine max
  unsure (1)..(62): unsure at all n locations; Clone ID: 701137671H1
ggtcccantnanaagaagttggatcnggttnattagattcangagggtcagccggcagcnac

SEQ ID NO: 49769 - DNA, 262 bp, Glycine max
  unsure (1)..(262): unsure at all n locations; Clone ID: 701137672H1
cttgngacaagggcnagngattaaaggatgggntcaaggtantataacgatgaagaaaggtgaaaattccctnttcaccatcccggctgagctagcttatggtgaaactggttctccnccaacanttcccccnaatgcaactcttcaatntgatgtggagcngttgtcttggactagtgngaaagacatatgtaagganggaggtttatttaagaagatacttaccaagggggagaaatggganaacccaaaggatcctgat

SEQ ID NO: 49770 - DNA, 257 bp, Glycine max
  unsure (1)..(257): unsure at all n locations; Clone ID: 701137673H1
catatcaaaatgttatttatcagaacaaatttttattcaagaataaagtagttcttgatgttggtgctgggactgggantttntcacnatttggtgccaaagcaggggcagaacacgtctatgcggttgagtgctcccatanggctgacatggcgaaggagattgttgaagctaacggttactctaatgttgtnacagttttgaaggggaagattgaagaaattgaacttccagttgctaaanttgatataattatt

SEQ ID NO: 49771 - DNA, 257 bp, Glycine max
  unsure (1)..(257): unsure at all n locations; Clone ID: 701137674H1
caaaaagtcagtgcagcgaaaacggacgatccgaagaatacccttttcatctctctctacaatannnnnnnnnnnnnnnnnnnnnnnnagtaaattattgtacctgacgatcttctcggtttgatcntatatcaatggaatttttttagacagaactcggattcacagggaaatctgattgcataggancaaaaaagacaacacctttttatctctacacaagtnattatggcggttgctgagaatgttggggccaa

SEQ ID NO: 49772 - DNA, 256 bp, Glycine max
  unsure (1)..(256): unsure at all n locations; Clone ID: 701137678H1
ttataatcagtggcggcgagaatttgagcagcgtggaggtgnagtcgatattgtacnngcatccngcngtgaacgatgcggcggtggtggcgaggccgcacgagtattggggaggtacgccgtgcgcgtttgnnagcttgaaaaaagggataaaatanaaagagaaacccactgagaaggacataattgantattgtanngacaacatgccgcatnatatggttcccnaaacggttgtnttcanagacgagcttcc

SEQ ID NO: 49773 - DNA, 260 bp, Glycine max
  unsure (1)..(260): unsure at all n locations; Clone ID: 701137679H1
gaaggggatgctctccatggnnaatncgggaccnancancaacggctcccantgcttcatcaccancacccgcancccncacttgganggaaancacgtcgtgttcngtaaggttctgaaagggatnggcatcgttcntnccgtggancatgntgttgcccggggaaaacgaccgtcccacttcaggatgttgtgatagttaattgtgggnanattgctgaatnggaagattatggagttgttaacttctttaaggatgg

SEQ ID NO: 49774 - DNA, 261 bp, Glycine max
  unsure (1)..(261): unsure at all n locations; Clone ID: 701137680H1
aactctcnctcactctcgcgctctctctttcacaaccttcactttactctctctgacagctaaaatgcaaggaggattncaatcattnttgtcacacgggaatgtcattagaaatgctgttctacaacgggtgcgcatggtgaaccccctgttacagccaattgtctcttcgcggtttgaatctgttacacctgctcgcattgaggagcatggttttgagagcaccacaatttcagacatcttgaatgataaaggcaaggg

SEQ ID NO: 49775 - DNA, 262 bp, Glycine max
  unsure (1)..(262): unsure at all n locations; Clone ID: 701137681H1
gggaagctggatgggtggttcttccagatggttcnactttcccatcaagatctcagggtcaanagccagctggtggtaattctacaatngtcacttcatcatcttcccttgcggcttcacaacngactccatctgcntctctcaggggagttgcttcnggctataggagcccnttagagtataatgcntgtcaaacaaaaggtgttntnatgcctactccgnctccttatgatcnntcctcaagtncccggtctcaaacatc

SEQ ID NO: 49776 - DNA, 252 bp, Glycine max
  unsure (1)..(252): unsure at all n locations; Clone ID: 701137685H1
agganactgagttaaggcttngactgcctggaaacggangcacttaagaagtgctcatgcaggaagnggggtttctctgagactgaaactggtcatgaagatgagtctnccaccactgtggatttgatgcttantctttcttctaaggangccgcaaccannnnnnnnnnnnnnnnnnnnnncaactgntangcacaagactttgcctaangagaagacccttctgccagcagntcntgctaagccnccagc

SEQ ID NO: 49777 - DNA, 260 bp, Glycine max
  unsure (1)..(260): unsure at all n locations; Clone ID: 701137686H1
gggttactgtctgttcaagctaccatctctcnctctctttcttagtgcctccttgccagaagnnaaantngcccaagaaactttcctattcnnatctgaatcagtgaacgaggggcaccctgacaagctctgtgaccagatctccgatgctgtgctcgatgcatgcntggngcaggacnctgacagcaaggttncctgtgaaacntgcaccaagaccaacatggtgatggttttcggagagatcacaaccaaggccaacg

SEQ ID NO: 49778 - DNA, 262 bp, Glycine max
  unsure (1)..(262): unsure at all n locations; Clone ID: 701137687H1
gnttatctatccagattntncganttcttaacggtagcatgttctcacgccttcgtcaaccttctgcgttttgccacacttcattantctatcnatcttgaggcttcgattcaccacagaccctgaatnttgaattgctcttaaacttcaaacttcccactttnttgtngttgttttggtcgtttggatttggtgttttcaagatcatggggtggtacagaaggggnaagcncgctcttgatcatnttcgtagattggcttc

SEQ ID NO: 49779 - DNA, 260 bp, Glycine max
  unsure (1)..(260): unsure at all n locations; Clone ID: 701137688H1
gaaaagcaanatggtgaagatttgctgcattggtgctgganatgtggggggtccnactatggcagtcattgcacttaagtgcccatccattgaagtcgctgttgttgatatctcnaaatcccgcattgcagcctggaacagcgaccagcttcctatctangaaccnggccttgatggtgttgtgaagcaatgccgtggcaagaacctctncttcagcactgatgttgaaaagcatgtctttgaggctgacatagtgtttg

SEQ ID NO: 49780 - DNA, 258 bp, Glycine max
  unsure (1)..(258): unsure at all n locations; Clone ID: 701137689H1
gcttctcaagtgaggcactatgatcttcttgaggaactttatggttcacatcgtgccacgggactcgtggaatgtattccgaggcaaattcatcaagctatggataggggcaatgtcaagtttatctaaggaaaaaggaagtagagatggcaaacaaaagaaaaggcaaaaaacatctcaacctcaatcacctgagcccgaagcatctgaggncattncacatatattggatcatagtctctatttctgaaaacaaaa

SEQ ID NO: 49781 - DNA, 258 bp, Glycine max
  unsure (1)..(258): unsure at all n locations; Clone ID: 701137690H1
cgcagnatctaaagtatgtctccaacagtcacacacaaatgtcctcntctctgaaacgctgcacatccganaccaaatacgagancaganagcgaaaccctgaaccaaaatcatgtgccctattggtaatcnacgtgcaaaaccacttctcatccatggccaccccaatcctccataacctcaacaccaccatctccctctgccgccgcgcntccatccccgtcatcttcactcgccactgccacaagtcaccctccg

SEQ ID NO: 49782 - DNA, 237 bp, Glycine max
  unsure (1)..(237): unsure at all n locations; Clone ID: 701137695H1
gccggaggtatcagatacgttattaccatggccggacttganagctaaactaaatagtganttactgaataatttgggcaactttatcaaccgagttttgagttttattgccaaacctgcagggcaaggatatgattccattatcccctctgttcctgataatgtaagtggtgactcccatggtccgaccaaaaagttggctgataaagttgctgcatatatagaccaatacataga

SEQ ID NO: 49783 - DNA, 264 bp, Glycine max
  unsure (1)..(264): unsure at all n locations; Clone ID: 701137696H1
attcttatttatttcagattaatacttgataacctaaacaatatatctatatatagannnnnnnnnnnnnnnnnnnnnatagaacgtaaaanaaanaangaatantaantgnaaaanggngcatgtngattntatngaaantaaagggcaacaatcattttngtntaccatgggtaaggcacaccancgcngacatantaaccnatataagaaatgcngacatgaatnaaaaaggnatggttcaaataccatttactaacataa

SEQ ID NO: 49784 - DNA, 272 bp, Glycine max
  unsure (1)..(272): unsure at all n locations; Clone ID: 701137701H1
tccacaacacttcttcatccatgacgcttggttcttcaggatccagtgtcgtggttccaaggaacttcagattgctggaggagcttgagaagggagaaaaaggaataggagatggcacagttagttatggaatgnntgatggtgatgacatttacatgcgctcttggactggaaccattattggtccctataatactgtacatgaaggaagaatttatcaattgaagctgttttgtgataaagactaccctgaaaagcccccgagcgtccgg

SEQ ID NO: 49785 - DNA, 271 bp, Glycine max
  Clone ID: 701137702H1
gacgttccacattggtcaggtcccgatctcacgatggggaagtcaccaggaaaatggatcaaaactgtactgttcgggaaaaagtcatctaaatcaaatatttcaaaaggcagagagaagcttgttaatcaaaaaggagtagtagttacctccaaggtgccagaaactggtttggcttagaaccaacctccgatactattgccagacatgaggaagatccagagctggaaaataaagaagcagaaaatgttttacccgggaatcaagaaat

SEQ ID NO: 49786 - DNA, 240 bp, Glycine max
  unsure (1)..(240): unsure at all n locations; Clone ID: 701137703H1
gcttgtaggaggaaaggagggatcaggttcaacntcaatganncactcctacttcaacctagttctcatacacaaacgttggtggtgctggtgatgtgcattctgtttcaatcaagggttcaagaactggttggatgccaatgtcaagaaactggggtcagaactggcagagcataactttntcgattgtnnaagcctctnctttaaaggnaaccnaagtgattgcngaatttgtgttcc

SEQ ID NO: 49787 - DNA, 273 bp, Glycine max
  unsure (1)..(273): unsure at all n locations; Clone ID: 701137704H1
ctcttcttccaagtccaancacgcttttctctacagtcatgggcaaggtcaagatcggaatcaacggatttggaagaattggccgtttggttgccagantcgctctgcaaagagacgatgtggagctcgttgccgttaacgaccctnncattaccaccgattacatgacatacatgtttaaatacgacagtgttcacggacactggaagcatcacgatgtcaccgttaaggacgagaagacccttctcttcggtgacaagccagtcactgttt

SEQ ID NO: 49788 - DNA, 276 bp, Glycine max
  unsure (1)..(276): unsure at all n locations; Clone ID: 701137705H1
cgaccgccanccccaaaatccaagcncaactcagcgaagccctcgcncnaatcggtcaccangatntcnccaaatccnggacctctcgtctcnctgaacgcancgcaaatncnccaaaaggcntcncagtccnccgattacgcntccagtaacggtatnctcggcaccgntaacncnatttgcaagagggttaggnttgcagtatnaaacaatgacctatnactggacntaaagtactggctcganaacttcgcctctcctttggtggagatttcc

SEQ ID NO: 49789 - DNA, 277 bp, Glycine max
  unsure (1)..(277): unsure at all n locations; Clone ID: 701137709H1
anaaagagaagcctcgttggagaatgatttggcaaatatgtgggttcttgtggctaagttaaagaaagaagggggtgccgtcccagaatcaaacatcaatataaaaaaagttgatgaggaagcacatacaaatgatctgaaaactaatggcattgaaagtgatattgtccccaaggagcagattttagatgtatcaataccagaaaatgaaatagccaatgaagaccctttggttgttcgacttaaggcacgcatgaaagagatgagggataaagaa

SEQ ID NO: 49790 - DNA, 273 bp, Glycine max
  unsure (1)..(273): unsure at all n locations; Clone ID: 701137710H1
cnttgcttcatcgtattccacccacctcggaggcctaagccaaagcagatcctgcggacattgtaagtaaatcttatgaagatggagatgataactaatgttaccgagtatgaggcaattgcaaaggaaaaattgccaaagatggtttatgactactatgcatcaggggcagaggatcagtggactttgaaggagaaccgaaatgcattctcaaggattctgttccggccgcgtattcttgttgatgtgagcnagatagacttgactgcaact

SEQ ID NO: 49791 - DNA, 270 bp, Glycine max
  unsure (1)..(270): unsure at all n locations; Clone ID: 701137711H1
accctancccgacgccaccattcatccgatccaatgagttcgagaggagccagcgcgctgctatctcgagccagcaggattcgctcgaagcttcaaacggcgctggaagccaccgttttggaggtggacnacgtgtcgtaccagcacgcgggccacgccgccgtgaagggaagttccgacaaagaaacccacttcnacgtgaagatcgtatcgcccaagttcgagggccagagcctcgtcaaacgacaccgtctcgtctacgacctcctc

SEQ ID NO: 49792 - DNA, 277 bp, Glycine max
  unsure (1)..(277): unsure at all n locations; Clone ID: 701137712H1
aaactcttaaagataggtggcatttgctacaataagaaactagccaagactcntcagaacaatatcagagtctggttccaaaagccttttatgaaggattgattggtcttaatttagttaaagatgtccagaatgctggagggatattgagcatgaaagacctcaaaagttaacactgttaaacagaaggaacccatattctaatgatgttcttggtctaaagcttccttgggcatgcctccccctttcaggtggggcatccaatggatgctactgg

SEQ ID NO: 49793 - DNA, 259 bp, Glycine max
  unsure (1)..(259): unsure at all n locations; Clone ID: 701137713H1
tgcatccctcttgatttgtagtttgttttgtgcttnngataaaagttctgccaaatcaagaggggttttaagatcatagtgtgtgtnttgcaacaatggctaagttctttgctgctatgatcttggcactctttgccatttccntacttcaaacagtggtaatggctgctaatgaacaaggaggccacttgtatgacaacaagagcaaatatggaagtggaagtgtcaagagttaccaatgcccatcacaatgctcgag

SEQ ID NO: 49794 - DNA, 268 bp, Glycine max
  unsure (1)..(268): unsure at all n locations; Clone ID: 701137715H1
cgtggtgttgttactgctgctcttttctcttttcttttctctttagttctctcttcccctttctttttctttttctncttcttctgagcttgtttaagcttttcttccattaacatattatcanaatgtgtggtattcttgctgttcttggttgttctgatgactctcgagccaaaagggtccgcgtgcttgagctctctcgcagattgaagcaccgtggccctgactggaggggctccatcaacatggtgactgctttttggcacnt

SEQ ID NO: 49795 - DNA, 270 bp, Glycine max
  unsure (1)..(270): unsure at all n locations; Clone ID: 701137718H1
ggaggtgaaagttcatgtcacactccaaatatacttcagattgaaaacttagaggagttgccattgaccatatgccacttaaataaaagatcaattggaaccaatgctgtgactgtgggttatacaatgaagccttctngtgtcgaagattttgcaaagaggggtgcatttcctttgtgtcctactcaaaatgggttgatgttgttcctctcacatccaagcttccattatcatctcagttaaaggatgttgacatagttcttcacaaag

SEQ ID NO: 49796 - DNA, 271 bp, Glycine max
  unsure (1)..(271): unsure at all n locations; Clone ID: 701137719H1
gatgttaaggttggagcacagaaattctcagagaggcaagcattggggacaggagcttcagggtgacaaggactacaaggaggcaccaccagcacccttgtttgagccaggggagttaaagtcatggtctttttacagagctgggattgcncagtttgtggccacattcttgttcctctacatcactgtcttgactgtcatgggtgtcaacagggcacccaacaagtgctcctctgttggcattcaaggaattgcatgggctttcggtggc

SEQ ID NO: 49797 - DNA, 274 bp, Glycine max
  unsure (1)..(274): unsure at all n locations; Clone ID: 701137720H1
caaagatcaaatctgcaagttcagttttgattgttgggggaggtccaactggtgttgagcttgcagcagagattgctgttgattttcctgataagaacgtcaccatagtgcataaaggaacgaggttgcttgaatacattgggncaaaagcttcaagcaagactttaaagtggctcaaatcaaagaaaattgatgtgaaactagaacaatcggtcgatttgagctcctcttctgaagaaaataagacatatcaaacttcaaatggagagactat

SEQ ID NO: 49798 - DNA, 277 bp, Glycine max
  unsure (1)..(277): unsure at all n locations; Clone ID: 701137721H1
cgagcctcctattaaacccaagcataaaaagctgttctattaaagacacatccagtacccaccataaacaggaccttgaatgccatccaaacctcncaagtttatatcaaagaaaacagtattgcgattggcatatcgatcattcctatcaataccatcaaacctctgtggaaactggacatagcaaacatttttcccaaggttgggatccatcataaagcacatagcttccctcaaggctttactgttgtttatgtagtgatcacaatcaagattc

SEQ ID NO: 49799 - DNA, 167 bp, Glycine max
  unsure (1)..(167): unsure at all n locations; Clone ID: 701137722H1
gaggtatctgaagtcanagggnaagatgttgtntcanttccngtgaacangnnttgactnataaanntgntgtctacccttctncacttgccnnagtcanctccatcaaaattgataggcaatatctctgaagnggctgctngnccccngatcaggagttagaacaa

SEQ ID NO: 49800 - DNA, 275 bp, Glycine max
  unsure (1)..(275): unsure at all n locations; Clone ID: 701137723H1
aaggnacctctgtattggggaataactgctgatgggctacgtagcatttgctgatgatgcagaattgcttaatggtgcttgtngcaagtcacttgcttctttccctcaaggatgtttctactctacagctgttggaggattgatgtgctatgagaatcctaaaaataagattactgcagttcctgctaatgaggaggaaatctgggggccactttcaaggtgacaaaatgtaacctaggattcccatcttgtgatgtcacggttcataaattctc

SEQ ID NO: 49801 - DNA, 277 bp, Glycine max
  unsure (1)..(277): unsure at all n locations; Clone ID: 701137724H1
ggaaaatcaccactgacatcggggttcatgcaaccgctacaaagtggttcaacctcttcgcaacacaactccatcatgttcaaaacctaactgatagagtgcatggaaccaagctgcatcaaggtgaagactggcatcacaacgagacagtcaagcactggacttataccatagatggtaaggttacaacatgtctggagagtattgatccattgatgaacagagcaaaacaatcacctacaagctcttcagtggtgacattgggncataattataa

SEQ ID NO: 49802 - DNA, 272 bp, Glycine max
  unsure (1)..(272): unsure at all n locations; Clone ID: 701137725H1
caaattaagaacaaaccataccccaagtcacggttttgccgtggtgttcctgatcccaagatcaggatttacgatgttggtatgaagaagaagggtgttgatgagtttcctttctgtgtccatctggttagttgggagaaggaaaacgtttctagtgaggccctggaagctgcncgtattgcttgcaacaagtacatggccaaattgctggaaaggatgctttccacttgagagtcagggtgcacccattccatgttcttaggatcaacaag

SEQ ID NO: 49803 - DNA, 268 bp, Glycine max
  unsure (1)..(268): unsure at all n locations; Clone ID: 701137727H1
gagcgtgaaggcaccggccgccggccatgacattcaagcgcaggaacggaggtcgcaacaaacacggccgtggccatgtcaaattcatccgatgctccaactgcggcaaatgctgccccaaggacaaggccatcaagaggtttcttgtgaggaacattgttgaacaggctgcagtcagagatgtgcaggaagcctgtgtctatgancaatacacgcttccgaaactatatgtgaagatgcagtactgtgtttcctgtgctatccattc

SEQ ID NO: 49804 - DNA, 269 bp, Glycine max
  unsure (1)..(269): unsure at all n locations; Clone ID: 701137728H1
tcaaaacaccatagtgagaaatgacttccaagggtgcaattctcttgtgtctcaatgttctcttcttcactgtggttagttccacatatgttccatgcaanccaccccccaaaactcccaaacacccacctgtcccaaagccaccttccccaaagcaagtttcttgccccaaggacactgttaagtttggtgtgtgtgctgatgtgttaggtttgattaacgtgcaactagggaagccaccaaaaaccccatgctgcagcctcattcag

SEQ ID NO: 49805 - DNA, 269 bp, Glycine max
  Clone ID: 701137729H1
caacttccttgtctgacagatcctgtgttccggagaaaggaaaggaaaggaaagatgtcggggcaaacgcagcgtctgaacgtggtccccaccgtgacgatgctgggagtggtgaaggcccgattggtcggcgccacgcgcggccacgccttcctgaagaagaagagcgacgcgctcacggtgcagttccgccagatcctgaagaagatcgtctccacaaaagaatccatgggcgacatcatgaaaacgtcgtcgttcgcgcttaccga

SEQ ID NO: 49806 - DNA, 268 bp, Glycine max
  Clone ID: 701137730H1
ttttgaaaggcctcttgttgatctgcaaaagaagatcattgatgtacagaagatggcgaacgaaactggactggacttcagtgatcagattctctcattggagaccaagtaccaccaggctttaaaggatctgtatacgcatctgactcctattcagcgggtcaacatcgcacggcaccctaacaggccaactttccttgatcatgtgtttaacataactgagaagtttgttgaactccatggtgatcgggcagttacgatgatcctg

SEQ ID NO: 49807 - DNA, 265 bp, Glycine max
  unsure (1)..(265): unsure at all n locations; Clone ID: 701137731H1
gcaagccccactcaaccaccacacacgctcctcgtncacgctacccctttctggctcttcttctaccnttcaagttttaaaagtataaagatggcagagacattcctatttacctcagagtcggtgaacgagggacaccctgacaagctctgcgaccaaatctccgatgctgtcctcgacgcttgcctcgagcaggaccagacagcaaagttgcctgcgaaacatgcaccaaaaccaacttggtcatggtcttcggagaaatcac

SEQ ID NO: 49808 - DNA, 272 bp, Glycine max
  Clone ID: 701137732H1
ggcccttcctcggagaagattgcacttcccaacaagaactctttgagaggttatgaagtcattgatgccatcaagtctaaggtggaggcactatgccctggagtggtgtcatgtgctgatatcgttaccattgctgctcgtgactctgttgcaattcttggagggccaaattggaaggttaaacttggtagaagggattccacgacggcttttcaaccttgcaaacagtggtgtgcttccaggaccgaattcttccctcagcagccttatcc

SEQ ID NO: 49809 - DNA, 264 bp, Glycine max
  unsure (1)..(264): unsure at all n locations; Clone ID: 701137733H1
ggtaggcctcagctctccaatatgtggtcaatgctgcctttttggctgccctttatagtgattatcttgatgctgctgatacacctggatggtattgtggacctaatttctntcaactgatgtgctccgtaattttgccaagncccagnttgattacatcctnggaaataacncnagganaatganctatgttgtaggtttggtaatcatacccaaaacangttcaccatagaggagctctataccgaagannaagatcggttt

SEQ ID NO: 49810 - DNA, 267 bp, Glycine max
  Clone ID: 701137735H1
aatctacctgtttcccggatgcttagtggacataaggggtatgtttcctcttgtcagtatgttccagatgaagatactcatttaattactggttctggtgatcagacatgtgttttatgggatattactactggccttaaaacatctgtctttggaggagagtttcagtctggacatactgcagatgtacttagtatctccattaatggatccaactcgagaatgtttgtatctggttcttgtgatgcaactgctcgattgtgggac

SEQ ID NO: 49811 - DNA, 270 bp, Glycine max
  unsure (1)..(270): unsure at all n locations; Clone ID: 701137736H1
ggagctcaaatatggataaagcaattcaaagacagagagtcctgcttgatcatcttcaacccatttcttcaagttcaaatttttcttctcaaacccatcaatctacggatctctcagcttcattatgttttgccaagaattcttcgcacggtcaaataggtggatcagatgacgacgtggtgattgtagctgcatatcgtactgccatctgcaaagcaaagcgtgggggctttaagganacccttccagatgacctgcttgccacagttc

SEQ ID NO: 49812 - DNA, 271 bp, Glycine max
  unsure (1)..(271): unsure at all n locations; Clone ID: 701137738H1
ggcctttcaggctctattctccagagaggtgttgcctcaaagcttttcacctcctcatgctttgaagaataagaatcagcaaatggacaacgccaataataacaagcaaaacatagatgacaaagacgaagatcctgacngcaagaaatgcagttctaattatgaagcaatgcagaaaaacctgccatttgtagaaaataacgagggactgttaaccatagggntggacaaggaaagctaagactcgtcgaacaggctttaaaccctacaa

SEQ ID NO: 49813 - DNA, 270 bp, Glycine max
  unsure (1)..(270): unsure at all n locations; Clone ID: 701137739H1
tcctttctctgctctttgtcttctctgacacatttggggccttgttgagtgngtttttgcaagagggtatggcgaaggacgttgaggttgctgagcgtggctccttctctgggaaggactaccaggaccctccaccagcaccactcattgatgctgaggagctcacaaagtggtccttttacagggctcttattgctganttcattgccactttgctcttcctctacattactgtgctcacagttatagggtacaagcaccagacggatc

SEQ ID NO: 49814 - DNA, 195 bp, Glycine max
  unsure (1)..(195): unsure at all n locations; Clone ID: 701137740H1
ttccttcactctccgctctctctgccactgagccaagaagatggcctcacaggtttgcaaatctgcttccagagccgcgaggtcccttctatcctctcgttttcactctcaaggacgtgcgcttggggctgctgcggctgtttcattgagcagcaaagngcctcttttttacggaaagaacggttctggaaatgg

SEQ ID NO: 49815 - DNA, 273 bp, Glycine max
  unsure (1)..(273): unsure at all n locations; Clone ID: 701137741H1
cttcacttcactaatacatcatggcagacgagacccagaacaagtangagagctctgaggttgaggtccaggatcgtggtgtttttgactttctcggtaagaaaaaggatgaagaagacaagcctcatcctcaggaggaggtcatcgccaccgagtttcaaaaagtcactgtctcagaccaaggagagaacaagcacagcctcttagaaaagcttcaccgatctgacagcagctctagctcttcaagtgaggagncnggagaagatggagaga

SEQ ID NO: 49816 - DNA, 266 bp, Glycine max
  unsure (1)..(266): unsure at all n locations; Clone ID: 701137746H1
ttagactctgtttcgacaggagaagtgtctacaggtcaagcagatgaaattggagagtacaganagctgtccctggaccattgtgggattctgccaaatacctgtttgccttgcctcacttccaatgcacttgctgttgaaaaaagaaggccaatgagtcctgatacacctagttcgcggagaaagtcgctttctaaactctcctcaaatggagagaagggtcttcagatatgactttactttcccctaaggcatttaaacaaaaa

SEQ ID NO: 49817 - DNA, 275 bp, Glycine max
  unsure (1)..(275): unsure at all n locations; Clone ID: 701137748H1
ctcggaacctatgangtgccagaanggagtggacattctaggaagatacgatgcagagtttgcaaaaatcctcacaaaagacgctttgaaattcgttgctgagctgcaacgtgagtncaggagcgatatcaagcatgcattagagagcagaagagaggcaaagaagaagtacaatgaagggactcttccggggtttgatcctgccaccagtcacattagagaccaggagtggctgtgtgcacctgttccaccagctgctgctgataggaaagtgg

SEQ ID NO: 49818 - DNA, 269 bp, Glycine max
  unsure (1)..(269): unsure at all n locations; Clone ID: 701137750H1
cgtgtccttccacattggtagcggcggagcgancacgcgagcctacgacggagccatatccgccgctaaaaacgtattcgaaatggcttctgggctcgncttgcccagaatgcgcgttctggacatcggaggcggcttcacctctggnccgccgtttgaagccgcggcattgaaaataaacgctgcgattcaggccagcttcgggaacgaggaagggctcgtggttattggcgaaccgggtcgttacttcgctgaaacggctttcacgt

SEQ ID NO: 49819 - DNA, 267 bp, Glycine max
  Clone ID: 701137751H1
tggctcctcggtctagcagcaaggacgcccaagaccttttccgcgctctttggtctgcttatgctgcaacccccactaatctcaagatcattgatctctatgtcatctatgccgtattcaccgctttcatccaggttgtttacatggctttggttggatcatttccatttaactccttcctatcaggagtactttcttgtgtaggaactgctgttcttgctgtttgtctcaggatccaagtgaataaagagaataaggaattcaagg

SEQ ID NO: 49820 - DNA, 270 bp, Glycine max
  Clone ID: 701137752H1
ttagcgatgtagcattcaaggtgggaaggaacatcgattgggatggaatggcgaactttctggtctccgatgaggctcgcagggagttctccaatctccgtcgcgctttcgacgaggttaactcccaactccaaaccaagtttagccaggaacctgagcccattgattgggattactatagaaagggaattggcactcgtttggtggatatgtacaaggagcattatgagagcattgagatccccaagtttgttgatacagtaactcctc

SEQ ID NO: 49821 - DNA, 273 bp, Glycine max
  unsure (1)..(273): unsure at all n locations; Clone ID: 701137753H1
gcantttcgcacgctgtctcaccctcttgttctctgtccaccacgnacaagggataannccatncttggaggcaacactttgagatttcacaaaggacccaattccttctctagttcaaggncctagaggtcggatctctatggctgttgcagttaatgtatctcggtttgaaggcatacctatggctccntcctgatccaattctcggagtttccgaggcgtttaaggcagacaatagtgatgtcaagcncaatctggagttggggcanaca

SEQ ID NO: 49822 - DNA, 270 bp, Glycine max
  unsure (1)..(270): unsure at all n locations; Clone ID: 701137754H1
cttgtnttgtttgttgctacagttttggtagcatatgaatgccatggctcagactaccagaagttccctctccaaatgaaaactgggtttggtgggcaatacagcaatgaggtggcatgtgccagttggaggctggcgtggaagcaaacaacgtagtcaagtggcaaactgttcctgcagcttgcggagagtacatagctgactacgttctaggagaccaatatagatcagattccaaaacagttanccaacaagcttatttctatgcta

SEQ ID NO: 49823 - DNA, 272 bp, Glycine max
  Clone ID: 701137757H1
ggcagcgccactgcacagcaacgcgaacccaagtgcccactccaattcaaattcaatcaattcagaaccctaactagggttccatccattggttatggcggaggatattccttcttcttctcctccaatagcagcatcagatactgctcctttgggttcgagtgtgatctccttagtgaatcgtcttcaggacatattcgcccgcgtcggctcccaatccaccatcgacctcccccaagtcgccgtcgtcggaagccagagcagcggcaagt

SEQ ID NO: 49824 - DNA, 258 bp, Glycine max
  unsure (1)..(258): unsure at all n locations; Clone ID: 701137758H1
gtactcactcaatccganaccnaaacggcgcatgcntaccgtcagtgtggggcgngatcgcctgtttgcggctctaggaaagacttacacacaagatnnaantnaagacttgtgcttcaatttcgggatcgagcttnacnangtcacgantgagaangcaattgtgagaaaagagaagcatttggaggaagaagaagctgatgaggangaagaagttatctacaaaatcgaagttcctgccaacagatntntnctcct

SEQ ID NO: 49825 - DNA, 265 bp, Glycine max
  unsure (1)..(265): unsure at all n locations; Clone ID: 701137760H1
actccagcnaatggatatganaaaggattccctggaaggccagatggtttgcagaagtttcctccattaaattatgatggttccacanaatananaacanccagttctcagtctccatgggaagtctttctgtggatgancttanagcnagcagcatcagaacatctgctgatgangatattactagcatccatactttgttgcngggatgaaagaaatggtccaaacaagaatatgagaagcatctngttgatggtcaagatca

SEQ ID NO: 49826 - DNA, 266 bp, Glycine max
  Clone ID: 701137761H1
cggcgagcaatggcgacatcgctggtgcgatcgggttttcttcgaagcgccctaagaggaagcgctcgtggctcccaggttccgaagcgaaactttgcttcctctggtcatcacgatgatgcatatgagacggccaaatgggagaagattacatatctaggcattgttagttgcactggtttagccgtttataatctatcaaagggccacccacacttcaaagaacctcctgcttacccatatttgcatatccgcaataaggaatt

SEQ ID NO: 49827 - DNA, 266 bp, Glycine max
  unsure (1)..(266): unsure at all n locations; Clone ID: 701137762H1
ttctgccaaatcaagaggggttttaagatcatagtgtgtgttttgcaacaatggctaagttctttgctgctatgatcttggcactctttgccatttccatacttcaaacagtggtaatggctgctaatgaacaaggaggccacttgtatgacaacaagagcaaatatggnngtggaagtgtcaagagttaccaatgccctcacaatgctcgaggagatgtagccagacccaataccacaagccctgcatgtttttctgtcagaagt

SEQ ID NO: 49828 - DNA, 269 bp, Glycine max
  unsure (1)..(269): unsure at all n locations; Clone ID: 701137763H1
cgaagtcgtaggagggtttcaaaagatggagnacatgcagagcttctggcaattgggcgatgaactccgtggacactcaaaagcatcggaggatcacaaatggttaatggttgcttcgaaattggcggaacagacaagattgaagggggagcgtgtgaacaaccttgatctttcaaagggccccattgaaacaaggtcaagggataaatttgggttccaggaagagaacaaatttgattctntaacttaagcatgttgaacctggactc

SEQ ID NO: 49829 - DNA, 270 bp, Glycine max
  Clone ID: 701137764H1
cagggtctactgagtggctacaaatgaaccacctttggggtgcaaattggtgcattattggaggacctttaagaggaccattctcagtgaaattgagctcctccactgggagaagcctctctgcaagagatgttattccaactaattgggttccaaaggccacttacacctctcgcctaaatttctacccctaatcacatccttggtgcaattggtacaagtactagtacacccagggctttttcccaaagggggtaactaatatttaat

SEQ ID NO: 49830 - DNA, 265 bp, Glycine max
  Clone ID: 701137765H1
ggataaaccagtggccaaggaatatatggcgttttctatggttttcattgttagcaacattatgctgcttttcagttcagcatttgccaaaactgctagtcctccctctctgagcccaactccagcaccagccccggcacccgactacgtgaacctcaccgagttgctcagtgttgctggtccatttcacaccttccttggataccttgagtccaccaaagtgattgacatttccaaaaccaagccaacaacatgaagaaggatt

SEQ ID NO: 49831 - DNA, 266 bp, Glycine max
  unsure (1)..(266): unsure at all n locations; Clone ID: 701137767H1
gcggcaccgccgtcatcgacggcggtctggcgacggagctggagcgccatggcgccgacctcaatgatcctctttggngcgccaagtgcctcacntccttccctcacctcattcgccnagtgcaccttgattacctggaaaatggtgcagacattataatcacagcatcttaccaagccaccattcaagggtttaaagccaaaggctattctgatgaagagagtgaagccttgctcagaagcagtgttgaaattgcacgggaggca

SEQ ID NO: 49832 - DNA, 267 bp, Glycine max
  unsure (1)..(267): unsure at all n locations; Clone ID: 701137768H1
catcgatttcatagatctattaagattatctgnaatggcagcaatttacagtctttacatcatcaataaatctggtggattaatctattataaggattatgggtctgctggacgaatggataccaatgatagcttgcgggtggcgagtttatggcactcaatgcacgctatctctcagcagttatcacctgtttcaggttgtttaggaattgaacttctccaagcagatacatttgatcttcattgctttcaatcactgactgggac

SEQ ID NO: 49833 - DNA, 252 bp, Glycine max
  unsure (1)..(252): unsure at all n locations; Clone ID: 701137770H1
gggattgtttttgtttcttttttttnnnttagcatcatcaaganccagagcatcatcatgttaacancatttgacccattctnaanggtcctgcataggtaggantcttanaccccttcttnagttttnctnattttcnggttcngttctgttgttgaagangctgacatgnnaaaanaagtttcttcctaagnaatccnctttgcngctttgactcaccaatataancatcaattgcngtatcctttgctt

SEQ ID NO: 49834 - DNA, 273 bp, Glycine max
  unsure (1)..(273): unsure at all n locations; Clone ID: 701137771H1
gccgaccangctcgaacctcacgtcgcaaaaaaacacttcttttcccccnctccgaggttgtcgtgtcggagcatagccatgttgttccctcgaggaaattgatgatttttcataacattggggtctcgttttgcttgtggggtcaccttgaangagggaaaagnaacgagctttggggctgaatcgtggtgggtctgttgagtatgcatagatctggagctacgatggcgtggaacgtgttcaagttcngcactgctctgcgtggattgggt

SEQ ID NO: 49835 - DNA, 269 bp, Glycine max
  unsure (1)..(269): unsure at all n locations; Clone ID: 701137772H1
gtcnctccttnctctgccttataattcttgtgacccttttngcnggtagcattgaaagtgcaccancaaacgtgaagccaagccattatgctgcacccttcaataggagtgtttttccttctggttttctatttggaataggctctgcagcttaccagatagaaggagcancagctatagatggcagaggaccaagtatatgggacacctatactaaacagcaaccagggaagatttgggatcatagtgatggaagtctagcaattgat

SEQ ID NO: 49836 - DNA, 266 bp, Glycine max
  Clone ID: 701137776H1
ggaatattcgacaggtagagtttcttcaatggctcctaaagttgataagaagaatgatccaaaggcccaggccttgaagactgctaaggcagttaagtcaggtgctacctttaagaagaaggtaaagaagatccgaacttctgtcactttccacaggccgaagaccttgaagaaggacaggaaccccaagtaccctcgcattagcgccccgccgaggaacaagcttgatcattatcagatcctgaaataccccctcaccactgagt

SEQ ID NO: 49837 - DNA, 261 bp, Glycine max
  unsure (1)..(261): unsure at all n locations; Clone ID: 701137777H1
tttaactgccacggtggctgacatagagaaagtcagatcagatttttcaatgtcaataaccgtggataacacaaagttatgtggatttggagggtggtttgatgtacattttcggggaagaagtgaggatccagctgaacaagagattgagttaaccacagctcccagtgtaanttatggtacacactggggccaacaggttttcctcttgcatcctcccatgcatctgagtgaaggtgatgatttaagggttctttctaa

SEQ ID NO: 49838 - DNA, 222 bp, Glycine max
  unsure (1)..(222): unsure at all n locations; Clone ID: 701137778H1
atctgtgacgagcatcatggcctcgagagcagtgctattgttggctatgtgtgtgcttccggccatggttgtggccattcgcccagcaaagaaccctttttgcgtgaagggtcgcgtctactgtgacccttgccgtgctggttttgagacctcagcaaccacctacattgccggtgctgagattatgttncaatgcaagagcagggttagcaacgaggttgt

SEQ ID NO: 49839 - DNA, 270 bp, Glycine max
  unsure (1)..(270): unsure at all n locations; Clone ID: 701137780H1
ggangccgattgttccnttgattttccaacgaacaaaagcaatcntgctttgcatatggtcaaactgggagtgggaagacatataccatgcaaccattgcctctcaaagcatcccacgatattttaagattaatgcaccacacataccggaaccnaggtttccaactgtttgttagtttcttcgaataatatggggggaaactttgatctcctcaatgaacgaaaaaaaactttgcatgagggaggatgggaaacagcaggtttgcattg

SEQ ID NO: 49840 - DNA, 266 bp, Glycine max
  Clone ID: 701137783H1
tgatttcttgcttctatatattacttgcttcttttcttgatcatgtcccttgctggtaaaatcagctctgaaattggtgttcaggcaaccgctgcaaagtggttcaacctcttcacaacacaacttcatcacgttcaaaatcttactgatagaattcatggaaccgagctgcatcatggtgaagactggcatcacaatgagtcggtcaagcactggacttataccatagatggcaaggttacaacttgcaaggagagtattgaatc

SEQ ID NO: 49841 - DNA, 269 bp, Glycine max
  unsure (1)..(269): unsure at all n locations; Clone ID: 701137784H1
ccgtgcagtacgtgagancacgaccgtggcacccccatgattctagacaacaattactacagaaatatattggacaacaagggcttgttgatagtggatcaccaactagccaatgacaagaggaccaagccttatgtgaagaaaatggccaagagccaggactatttcttcaaggagttttctagagccattactttgctctctgagaacaaccctctcactggcacaaagggtgagatcagaaagcagtgcaatgctgccaacaagca

SEQ ID NO: 49842 - DNA, 270 bp, Glycine max
  unsure (1)..(270): unsure at all n locations; Clone ID: 701137785H1
tggtctcttgtcttcctcctcatctctacactactccacataggggcncagccnctcaagcccaagcccaagcccaagcccaagcccgttcataaaatcctcctgcagcagcacccagtacccagccctctgcgtctcatccctctccgtctacgcctccagcatccaacaggaccctcaccaactggttcagacagcactctccctctccctgaaccgcacccaagccaccaaaaccttcgtggctaactgcaacaaattcagaggctg

SEQ ID NO: 49843 - DNA, 265 bp, Glycine max
  Clone ID: 701137786H1
tctgcgatgtcggacgaggtagttctgttggatacatgggctagcatgtatggtatgagggctaggattgcattggctgaaaagggtgttaggtatgaatacaaggaagagaatctcatgaacaggagtcctttgcttttgcagatgaacccaattcacaagaagattcctgttttgatcctaatggcaaacccatttgtgaatctgcaataatagtgcagtacattgatgaggtctggaatgacaagtctccatcatgccctcc

SEQ ID NO: 49844 - DNA, 271 bp, Glycine max
  unsure (1)..(271): unsure at all n locations; Clone ID: 701137788H1
caaagtcatttgtattgtccctagcctgaagaacncaagagnttccaaaatttccatgggangaatggcttctcatcaagttcaattcatggttggagaagctcaagaagtgcttttagagcactatgatcaggcagcagattttgtgcnccattgactgcaaccttgagaaccatgaagagatccttagagcagttcaagagggtaggaagcaaaatgggacagtggttgtagggtacaatgcatttagctgcagaaagtcttgtttggc

SEQ ID NO: 49845 - DNA, 267 bp, Glycine max
  unsure (1)..(267): unsure at all n locations; Clone ID: 701137789H1
tatcctactaaaaccaaacaactactcgttgattganaganacagtgtgtgttgtgttgtgttgtgtcggtggcatttttgttggttcgagtgagcgagggaagatgtactctagagattcatggggtggtccgttggagataaacgcgacggactcggcaacggaggacgagcggagccggaacctgcaggacgtggacagggcggcgctgtcgcgtcccttggacgagacgcagcagagctggctcctaggccccggcgagcaga

SEQ ID NO: 49846 - DNA, 266 bp, Glycine max
  unsure (1)..(266): unsure at all n locations; Clone ID: 701137790H1
caggtgcagaagatggctcggagctccacaagaatgaaatgggtctctatcttcacacttctattcctctcccacttcgcccctcacaatctccgcagaagatgggctagtggcgaatggagattttgaggctaccccaagaaacgggttcccaaacgaggcgattgtggagggccccagcgaggtcccaaactggaagtcaaacggcaacgttgagcttgtggaatcggggcaaaaacagggtgggatgntcctcatcgtaccgc

SEQ ID NO: 49847 - DNA, 263 bp, Glycine max
  unsure (1)..(263): unsure at all n locations; Clone ID: 701137791H1
gtaggggctgttggagttattgccggtttatatgttgtgctttggggtaaagccaaagagtttgctgagattaaaccagaggcaccacaatcatcaaacttactagatgatgagataagtagtaggacagatttggaacaaccccttcnatcagagaaattgtctgaacatgcaacagaagcagatancaaggtgtagccatgatgattaaacaaatagaagttttggtgaagttttgatcatttcagaattgaagaaactgg

SEQ ID NO: 49848 - DNA, 262 bp, Glycine max
  unsure (1)..(262): unsure at all n locations; Clone ID: 701137792H1
gatcgtatatgttttactcatcatccaagctctgttatatgctcttcaaagtacaatttggagtctactggagaatcattgcagtatttatcaatncatgataatcgctgcctacgatacttcaaagggcataaacagagagttgtttctctctgcatgtctccaatcaatgatagcttcatgtctggttctctagaccacagtgttaggatatgggatcttcgggtaaatgcttnccagttgagctcaaggtttaaaaatg

SEQ ID NO: 49849 - DNA, 255 bp, Glycine max
  Clone ID: 701137793H1
ctttttcattgggaaacacaacccatgaaatgggcaatgcgactaagagttgttctacatcttgcacaagctctagaatactgcacaagcaaagggcgtgctctctatcatgacctcaatgcatatagagttctttttgatgaggatggtaatcctaggctttcaagttttggtcttatgaaaaatagcgggatgggaaaagttatagcacaaatttggcatttacccctccagagtatcttagaactgggagag

SEQ ID NO: 49850 - DNA, 247 bp, Glycine max
  unsure (1)..(247): unsure at all n locations; Clone ID: 701137794H1
attcgcctacgttgtcaccgacaaggggnccggtcggagggtgaacgaaccgcgacnacttggagtattatcttgaggactattcggggtggttggaggagcgcgtggcgagtgatagctactgggggaagattgtntcgtgtgttagggattctaaagcatgtgggaggatggggataaccattaatgggatgcccgagactcctgatatgttctacatcagacatctcacccctattcagtctgg

SEQ ID NO: 49851 - DNA, 239 bp, Glycine max
  unsure (1)..(239): unsure at all n locations; Clone ID: 701137795H1
ctgaaagtaacgttagaccacgagaaaactttgacttattcacagttttgaaaactcactcacagtagtagaagggagtcctacatcttctagcattaaacaagaagannaaatcaacattttgggtttttcatttggctgcaacttttggtctctctgcagaatctcattcaattggagttcatcctctaaaaggaaaggtggtgtttggactctgggaaaatgggtttgttttctgg

SEQ ID NO: 49852 - DNA, 292 bp, Glycine max
  unsure (1)..(292): unsure at all n locations; Clone ID: 701137801H1
ggttgattcattgatatctcaatctcgtcacgttgatctagggagagaattaaaaccctgggtacctgatgaagaggatccacaatgccctgaactggaaaacatatttgacggccattggaataggggatgggatcagtttgaaacaaatgaggcattgtttggtgtgaaaagcacattcaatgaggaactttatacaagnaagcttgaaaaagggcctcagacaagagaattagaaaaacaagctttaagaatagcaagagaaattgagggtgaggaaacccaagatctt

SEQ ID NO: 49853 - DNA, 279 bp, Glycine max
  unsure (1)..(279): unsure at all n locations; Clone ID: 701137802H1
tctttcttcaacttcaagcttaattcctcatgtctttcagangcctcagccggccaaatgccacatcaggcatgggtgttgctgatcacagcaaaaacaccttcatggaattgaagcagaagaaggttcatcgttatgtgatctttaaggtcgatganaagaaaagggaggttgtggttgataagactggtggcccggctganagctatgacgattttgctgcatctttgccggagaatgattgcagatatgctgtctttgactatgatttcgtcactc

SEQ ID NO: 49854 - DNA, 287 bp, Glycine max
  unsure (1)..(287): unsure at all n locations; Clone ID: 701137803H1
gtgtattggtccccgtgcaatgttctatcttgctgctgcagtgtctgactattatgttccttggaaggaaatggtagagcacaaaattcagtcaggatcatctcaccttttggatgtgaaactagttcaagtgccaaaaatgttgtcagtgcttaggaaagattgggctcctctggctttctgcatatctttcaagttagagacagattcaaacattcttctaaataaagctggtgcagctcttgaaaagtacnagatgcatgcagttgttgcaaatgaactctcat

SEQ ID NO: 49855 - DNA, 269 bp, Glycine max
  unsure (1)..(269): unsure at all n locations; Clone ID: 701137804H1
cgaagagaaggggcaaaagagaaacgnagcgcttatcgaacnacgnacggaagcactgagttnactcggagggagtggaaagtgttgttgcgtaatgtctggtggtatcgctcgtggacgcctcaccgaggagcgcaagtcgtggcggaagaaccatccccatggttttgttgcgaaccggagacgctgcccgatggaaccgtgaatttgatggtgtggcattgcactattcccgggaagactgggactgattgggagggtggctactt

SEQ ID NO: 49856 - DNA, 288 bp, Glycine max
  unsure (1)..(288): unsure at all n locations; Clone ID: 701137805H1
ggtgcagtaacaccaccatctctattataggagtcaagaaaaacacacactaacacccaacaaagctcgtgaacaatattagaaagaaagaaacaacgctctctctttcttcttcttctctctcacattggttattgatctcagtgaagagagagatttgcgattcgcaatggcctcttccgcgacaatgcggttctntncgacctccaccggagccgaggcggctcttcctcgccgcaactcgtcgccggattcatcggcgtcgcggcgagatcctccgccaaatcg

SEQ ID NO: 49857 - DNA, 138 bp, Glycine max
  unsure (1)..(138): unsure at all n locations; Clone ID: 701137806H1
antccaccaaaaaccctaatttcctttctctctaactcttagatcttcacgttttagggctttctccaccttccgcaatgcacaaattgggaagaggtcatcgtgacaaactccagcagttcataacaataactggcg

SEQ ID NO: 49858 - DNA, 271 bp, Glycine max
  unsure (1)..(271): unsure at all n locations; Clone ID: 701137807H1
ggcgttctatatattattgaattgagaatgaggcctgctctncgctttgcttcctcttctatncggctttcttgttagctgccactacggaatcaagaaaagatccaggggaatattggaaaatgatcatgaaagatcaggaaatgccagaaggacttcaaggtcttgtttcntttcnnnctgaaaataaccctaagactcaagagcagcttggtaaaggttccaaaaaccattgtnangagtctctagttacaaatacacaagttaacag

SEQ ID NO: 49859 - DNA, 286 bp, Glycine max
  unsure (1)..(286): unsure at all n locations; Clone ID: 701137808H1
ggtgctatctgtggtactggattggccaaggggttccaaaaagcatactacaacaggtatggaggtggtgccaactctgttggctgatgggctacaacaatggtactgctttgggtgntganattattggnaccttcgttcttgtctacactgtcttctctgccactgaccctaagaggnacgctanggattcccatgttccgtactggcgccacttcctatggatttgccgtgttcatggttcatttggctacaatcccaattactggtactggtnttaacccag

SEQ ID NO: 49860 - DNA, 141 bp, Glycine max
  unsure (1)..(141): unsure at all n locations; Clone ID: 701137809H1
gtatttccctacctctccctttcaagatgcagatcttcgtcaagancctcaccggcaagaccatcacccttgaggtggaaagctctgacaccatcgacaacgtcaagggcaagttcaggacaaggaagggattccccccgg

SEQ ID NO: 49861 - DNA, 286 bp, Glycine max
  unsure (1)..(286): unsure at all n locations; Clone ID: 701137810H1
gggtccgaagttggagatagtgattctggttctgttctgttcttctttctactcacaacaacatcagaatcagaaacaacaatggccaacactaacttggaagatgttccctctctggatctcatgactgagctccttcgtcgtctcaagtgctcttccanacctgacaagcgtcttattctcattggcccactggatctggaaaaggcacccagtcaccaatcataaaagatgagtactgttatgccattagctactggtgatatgtaagagcagctgtagcagc

SEQ ID NO: 49862 - DNA, 119 bp, Glycine max
  unsure (1)..(119): unsure at all n locations; Clone ID: 701137811H1
gggaatcccaatggctttggggctantggcgatgatcctctacgtcattgcttcctncttccactcacctcgttcgcncttccgatgacgccgacgacgcgatcttctacgagtcgttt

SEQ ID NO: 49863 - DNA, 289 bp, Glycine max
  unsure (1)..(289): unsure at all n locations; Clone ID: 701137812H1
tttctcctcgttgttcttcgctttcctgttttcaatttcgattctttcgttaatttaataagatgtttggggaggggcaccgaagaagagcgataatacgaggtactacgaaatcctcggcgtctccaagaacgcttcgcaggatgatctgaaganggcttacaaganagccgccattaagaatcaccccgacaagggcggtgatcccgagaagtttaaagagctggcgcaagcttatgagggntctgagtgcccctgagaagcgtgananatannancatgngggaaa

SEQ ID NO: 49864 - DNA, 285 bp, Glycine max
  unsure (1)..(285): unsure at all n locations; Clone ID: 701137813H1
caggagttctcaaaagtgacattcttaagaatcctgttgtgatagagattgcagagaaattggggaagacaccggcacnagtttcccttgattctggactcattagtgctcttaggcagcacactatgacctgtttgcagtccccgcgaattgaacctcaaaatcngtctctaanatttttcnccattgtcttgtctctccagagaactgtatngaggaattnggcagcggaaaatcgggngctgtntnaangggtgggntccccctctggggggngaaaacngt

SEQ ID NO: 49865 - DNA, 134 bp, Glycine max
  unsure (1)..(134): unsure at all n locations; Clone ID: 701137815H1
cctttacactggttgatgctaaaaaacatggtaccctctattgttggttgttgctgatactcctcatagtcacaaagtaggtggctagcagtagcatgtgagtgaaggagcctgcctgcagttttttnaatcga

SEQ ID NO: 49866 - DNA, 135 bp, Glycine max
  Clone ID: 701137816H1
gggggcgcaacgccctcgacctattctcaaactttaaataggtaggacggtgcggctgctctgttgagccgcgccatggaatcgagagctccaagtgggccatttttggtaagcagaactggcgatgcgggatga

SEQ ID NO: 49867 - DNA, 289 bp, Glycine max
  unsure (1)..(289): unsure at all n locations; Clone ID: 701137817H1
gctgcnaatcctaanccataatggncattccattatgggaagattantcntacaaaagtaattaagttggccaattcagcacctttgatcaatggnaagctccgttatgctgttaacagtgtctcctatgttaaccctgacacccctctcaagcttgctgattacttcaacattcccggantcttcagtgtgaatttactccaaaactctccctcaaatggtccaggatacataggcacctcagtgtngcaaattccccccaggatttnatggaggtntttnccagnac

SEQ ID NO: 49868 - DNA, 139 bp, Glycine max
  unsure (1)..(139): unsure at all n locations; Clone ID: 701137819H1
gggaggagcaagttgagcagaggaanaacaancgnncaagagaaaganaagaagaaaaaatggtgggagaagangtagtaccaatggacgacaaagcgaagaggatgcgagatctgctatccgagtttctactcccctg

SEQ ID NO: 49869 - DNA, 63 bp, Glycine max
  unsure (1)..(63): unsure at all n locations; Clone ID: 701137820H1
gcnaganaatgttaatcatctgatctgaattagtattatatttttggcaggnnaaaagacnna

SEQ ID NO: 49870 - DNA, 288 bp, Glycine max
  unsure (1)..(288): unsure at all n locations; Clone ID: 701137821H1
ctctagggttatnatatctccatttccatttcctctctctcagtttccaagaatcttaagctatgggaaagtcttacccaaccgtgagcgctgattaccagaaggccgttgagaaggcgaagaagaagctcagaggcttcatcgctgagaagagatgcgctcctctaatgctccgtttggcatggcactctgctggaacttacgacgtgagctcgaagaccggtggtcccttcggaaccataaagcacccctccgaactcgctcacnggntaacaanggtcttgannt

SEQ ID NO: 49871 - DNA, 288 bp, Glycine max
  unsure (1)..(288): unsure at all n locations; Clone ID: 701137822H1
cntctttcttcaccatgtcacttgctgggaaaatcaccactgaaantggggttcatgcaaccgctgcaaagtggttcaacctctttgcaacacaacttcatcatgttcaaaaccttactgatagagtacatggaaccaagctgcatcaaggtgaagactggcatcacaacgagacagtcaaacactggacttataccatagatggtaannctacaacatgtctggagantattgaatccattgatgaacagaacaaaacaatcacctacnagctcnnngggggggggt

SEQ ID NO: 49872 - DNA, 290 bp, Glycine max
  Clone ID: 701137823H1
tcaaagcaacctcaaatgatcatcatgaaacagaacatgcacatgctcactctcacgtgggatcacatagatccttctgtgatggtgtttttcaccatcgaagatttgaaggttgggaaaacaatgcctattcattttcccaagagggaccctgcaacatcccctaagttgtggccaagagaagaagcagattcacttcctttctcactgaacaaactcccaaaccttctcaaaatcgtctctgtatctcaaaactctcccaaagccaaggccatggaagatacccttag

SEQ ID NO: 49873 - DNA, 288 bp, Glycine max
  unsure (1)..(288): unsure at all n locations; Clone ID: 701137824H1
gacactcgtcgcgatggaacgtgtagctgaatccgagcgaactctgtacccatacgtgactggatcctctgtagttcgtatcaaatacaaagatgggattctaatggccgctgacatgggaggntcgtatggatctaccctggcggtacaagantgttgagcgtatcaagcctattggaaagcattctcttcttggtgctagcggggagataagtgactttcaggagattctgcgttnccttgatgagcttatcctatatgacaacatgtgggatgatgggaattctc

SEQ ID NO: 49874 - DNA, 281 bp, Glycine max
  unsure (1)..(281): unsure at all n locations; Clone ID: 701137825H1
aagtgcacttctcaaggcaactgattttggcctgtcggtcttcattgaagaaggaaagttatatcgggatatagttggcagtgcttactatgttgctcctgaagttctgcggcgcagatgtgggaaggaaatagatatatggagtgcaggagtcatattgtatatctactgagtggagtcccctccattttgggccgagactgagaagggatattgangccatatggaaggccacatngatttgaantcaaccatggctaacattcaaacaatgccagggt

SEQ ID NO: 49875 - DNA, 288 bp, Glycine max
  unsure (1)..(288): unsure at all n locations; Clone ID: 701137826H1
gcaagagcagaataaccccacaaaggtagaggaatccggtgtagaaactcatacaactgaagcattggaaaatgaagataactccaaggtagaggactcnaatgcgcggagtacgacacaaaaaactgaagattcttcttctaactcagatgcctcggaagagaaggctgagacacatgacagcaatgcaacgaacggtgaagacaagaacaaggacacctcgactaattctgctcaggacgaaaacaccagcaacattatgtccaagaaggaaatgttgcgtctcca

SEQ ID NO: 49876 - DNA, 268 bp, Glycine max
  unsure (1)..(268): unsure at all n locations; Clone ID: 701137827H1
gtcaaattcaanacgagagacacacgacaaaacattctcgggangcgtaancgcccagaatncccgaccattttcacagaccttgttttcncgctcttgatgtttttcaccccccaaatgtggcaataaaaaacgggtggcttaatttgacacaatcggtggttattgcaaagttgagatgncaggtaatagtggttcagaggggttgggcgatgatttcttcgaacagatcttagcattgcctgangcggcacantgggaatgtngc

SEQ ID NO: 49877 - DNA, 285 bp, Glycine max
  unsure (1)..(285): unsure at all n locations; Clone ID: 701137828H1
gntggggccanagtcacttcctggtccaccagaggcccttaccttagcaagatggatctgcaaaagctacagtctccacacctgcacagagcnttttagcgttgagtccacatctggtnctgcaatcttgaagcaactttggcaccatccagatgcaatattgtgctgttctgtaaaaacaaatgcatctccagtgttcacctttgcaaaccagggnggnnttgacatgnttgaacccatcttgnnnctnttnaagaaaanngnggganaantntngaggngggg

SEQ ID NO: 49878 - DNA, 138 bp, Glycine max
  unsure (1)..(138): unsure at all n locations; Clone ID: 701137830H1
cncaatctaacacagaaggccangttttgccgtttgcatttcctcttcaaactctgtctctccagatctaggtgctctgccttcattttacatttggacaagatggcaacaacaacagtttccaacttggccaattgc

SEQ ID NO: 49879 - DNA, 135 bp, Glycine max
  unsure (1)..(135): unsure at all n locations; Clone ID: 701137831H1
ggaagagaggacaagcctgagccaccaccaganggtcgcttgcccgatgccactaagggttctgaccatttgagagatgtgtttggcanagctatggggctactgaccaagatatcgttgctctatctgggggtc

SEQ ID NO: 49880 - DNA, 136 bp, Glycine max
  unsure (1)..(136): unsure at all n locations; Clone ID: 701137832H1
cngacttctggaagggatgcatttattagataaaaggtcnacacaggctctgcctgttgctttgatgattcatgataactcgtcggatcgcacggcctttgtgccggcgacgcatcattcaaatttctgccctatc

SEQ ID NO: 49881 - DNA, 274 bp, Glycine max
  unsure (1)..(274): unsure at all n locations; Clone ID: 701137833H1
gcgtctaacaccaagagcaaagcactgtttgattcanaagaagctttgatgatcgttaaggaactgagagtaacgtttgattgtggtaagactcggagctatgaatggagaatttcccagttgaaggcgattatcaagttaactgaagaaaacgagcaacagatttatcaagctcttcactccgatttaggaagtntgaaaccgaagcctttgtgcagagatgcaagttgaaaaccctttnaaaanccccnccnggntttgnaacttgggtgcc

SEQ ID NO: 49882 - DNA, 288 bp, Glycine max
  unsure (1)..(288): unsure at all n locations; Clone ID: 701137836H1
gcgatccgnganaaactctgtaaacatgttggtttaccaggacctccttacaggtgatgagcgntctctctgactccttccgttacaaggaaattgncgaatggaatgcngtgggaagtngaggggaagtgggttgttaaaggagcagttgatgtagacattggtgcaaacccttctgctgagggtggatgagaagatgagggagttgatgatgcagctgttnangttgttgacattgntgacacattcagacttcaggagcaacccgcattcgataagaagcagttt

SEQ ID NO: 49883 - DNA, 115 bp, Glycine max
  unsure (1)..(115): unsure at all n locations; Clone ID: 701137837H1
agaatatgaagttgtttgttttctnngttgctgcagtagtattggtancatgggccatgccanggcgcaggctaccaaaggttccctctccgaatgaaaactggctatggtganc

SEQ ID NO: 49884 - DNA, 283 bp, Glycine max
  unsure (1)..(283): unsure at all n locations; Clone ID: 701137838H1
ggagnagttgctcttccttctcactctcattgggaggaaaatcttcaaccccaaatggaagccttatattcctgacttcaaacaagcctttgagcacttctgcatccatgctggtgggcgtgctgtgattgatgagctgcagaagaatcttcagctttcggctgaacatgttgaggcatctagaatgacccttcanaggtttgggaacacttcctcttcttcgtgtggtatgagctcaactacattgagtccaagggaaggatgaagaagggtgatagggtgt

SEQ ID NO: 49885 - DNA, 286 bp, Glycine max
  Clone ID: 701137839H1
agaagagggctttgttcatctacccaatctccatgcatgctgtgaatcatccaattcccacccatgttctctcaatgcagaaaaccattttaacagttctatttcttaccttggagttgcattgcttggagtaggaatcgctctagatttttttcttacaactgggggaggaagtggatttgagtcttcattgggaaccaggaatggaatggcttagaagaaatgtatgtgaaaacggcttgtggtttcacccatagcctgcggaaaatgctttattgtgtttcgg

SEQ ID NO: 49886 - DNA, 283 bp, Glycine max
  unsure (1)..(283): unsure at all n locations; Clone ID: 701137841H1
tgatctaaaggcaaggcgcattgtctccgacaatattcactccgggaatggcttccctaccctttccgttgatgaacaagtcgttgccatagagctgccactgaaatacggtccattcattgagtcagtgaacaagagagggctgaacctctctgaggtggtgtgttccacattcacaatggggtggtttggagaaaccaaggacanaaggacagtgagagtggatgcttcatgaaaganagcagccccaatatctgggtnaggctatcgtggactcacaatg

SEQ ID NO: 49887 - DNA, 283 bp, Glycine max
  Clone ID: 701137842H1
tggccatccggtttcccagatctgctccttcctcaccccacaggctgatactagactgtaactttcagaagtcagttgaagagcatgggtcgtggagttagcagtggtggtggtcaaagttccttgggttatctttttggcagtggagaggcccctgccgcaaaaccggcaacaaacaatgccccagcccaactgaagtgcaggctgtaaataatgcgctccttcaaaagcatctcctcctactaaaacaatagaccctaacaagctgtggtataaacgtcat

SEQ ID NO: 49888 - DNA, 137 bp, Glycine max
  unsure (1)..(137): unsure at all n locations; Clone ID: 701137843H1
cntaaataaaaattttagagtttagtttgagtgcatcattgatttcaaganagtaattaanacagaacatcaagatgttcacttgatttcttttattataataanaataataatatttcaaacaaaaaaaaaaangg

SEQ ID NO: 49889 - DNA, 130 bp, Glycine max
  unsure (1)..(130): unsure at all n locations; Clone ID: 701137846H1
ttatcctgtttctttcaatggaagtcatttctgcttctagcttgaatcccaacgctccgatgttcncgccattcgcctatcggacggtggaggattctccgaccagtggtgggactcgttcactcctccc

SEQ ID NO: 49890 - DNA, 281 bp, Glycine max
  unsure (1)..(281): unsure at all n locations; Clone ID: 701137848H1
gcgactttcagtactcctattatcagtntcattgggaaattcagcttcactnccaaganaattttgtccaatgtctcaacttgaattcgganagaacattcccatttaacccactaatttacacaccaaanagtcctncattcaccagtgtccttgantcctccggnnagantcaaaggcttttggtgccttcattcccaaaaccaggtccttattcatacaaaccgnngnttcccaggtgnangggngtnttngncccaanaaacgggnttntntngggg

SEQ ID NO: 49891 - DNA, 285 bp, Glycine max
  unsure (1)..(285): unsure at all n locations; Clone ID: 701137849H1
atggattcgcaggtgttgcttggtgttgcactttcatccgtgggtggtttcagcacttccatcggtgcacttttcgtaatccttagtaaagctccaagtttgaaggtgcttggactgttacagggttttgctgctggtttgatgctgagtatatcattctttgatctgactcataatgccttgaactcacttggcttcctgagaggcaaccttggttttttgctggtgtcaaatccttngcngttgttgccaaatttaacccagaaccaacngtggcnccnccac

SEQ ID NO: 49892 - DNA, 282 bp, Glycine max
  Clone ID: 701137852H1
tcacaatggatcgttatgagaatgattggagtgttgtgaaacgagggtgggatgctcaagttcttggtgaagccccttataagtttacaaatgctcttgaagctgtcaagaagctgagggcagaaccaaaggccaatgaccaatatttgcctccttttgttattgttgacgagagtgggaaacctgttggtccgatagttgatggtgatgctgttgttacattcaacttccgagctgatcgtatgacaatgattgctaaagctctgagtatgaaaatttgac

SEQ ID NO: 49893 - DNA, 284 bp, Glycine max
  unsure (1)..(284): unsure at all n locations; Clone ID: 701137853H1
ctcactgaaatggttcgaggactaatgctgactctgaaatacttctttgaaacaaaagttacaatcaattatccatntgagaaaggccctttgagccctcgtttccgtggtgaacatgcactccggcgatatccaacaggggaggaacgttgtattgcttgcaaactttgtgaggctatatgtcctgcacaagcaatcacaattgaggctgaggagcgagaagatggcagccgcagacaactcggtatgatattgacatgaccaagtgcatctatgtggatttt

SEQ ID NO: 49894 - DNA, 283 bp, Glycine max
  Clone ID: 701137854H1
gaaaatgaaggtccttgttttcttcgttgctacaattttggtagcatggcaatgccatgcgtacgatatgttccctctccgaatgaacactggctatggtgcccgtactccggaggtgaaatgcgcaagttggacgcttgctgtggaagcacacaacatcttaggctttgagaccattcctgaagagtgcgttgaagcaacaaaggaatacatccatggcgaacaatatagatcagactccaaaacagttaaccaacaagcttacttttatgccagagactcg

SEQ ID NO: 49895 - DNA, 286 bp, Glycine max
  unsure (1)..(286): unsure at all n locations; Clone ID: 701137855H1
cggggctacccgctgagtttaagcatatcaataagcggaggaaaaaaatgaagttccaagttatanagctttctcnntggtaaaagcaccccaaaacaaatgatcccaaaagtgactttgcttgcagtgtttgccgtactgttattcactgtcacaccactttcctaccctttgnttagntactctcttcatcatcatctttgaagngnaatangcattatccangannccatcatcagcatttgntgatctgatgngtnngcaagcttgccttcaacttcgatat

SEQ ID NO: 49896 - DNA, 284 bp, Glycine max
  unsure (1)..(284): unsure at all n locations; Clone ID: 701137856H1
tctgtctcgccnaaattcatgatttcgtgttgaatgcatcatcagagttaggtttattttttgacatttggtgtaaaatgggggtgccaacttggagaaaaccagtgatctactgggtttgccttttcgtcattatcaatgcgtttgtanaattagcaatgcattttatcttccgggaagctacatgcatacttactcaaatggagatccgatatatgccaaggttaattcattaacttctattgagaccgagcttccctacagctactacagtctccctactg

SEQ ID NO: 49897 - DNA, 281 bp, Glycine max
  unsure (1)..(281): unsure at all n locations; Clone ID: 701137857H1
cntggtttcactgtctatccttcaccccaagtttcaacctctgttgttgagccttacaacagtgtcctctccactcattcccttcttgagcacactgatgtggctgtcctgctcgacaacgaagccatttatgacatctgcagacgttcacttgacattgagnggccaacctacaccaaccttaatcgtttagtttctcaggtgatttcctcactgaccgttcctgaggttgatggtgcttgaaggtggnggtaatggatccagggcaacttgtgccatac

SEQ ID NO: 49898 - DNA, 287 bp, Glycine max
  unsure (1)..(287): unsure at all n locations; Clone ID: 701137858H1
ggaaagttccaccaccttctgatcctccgttaccgtttgatcctagtcggatgattggtatcatcaagaggaaggccttggatcaaagacttagctgcggtataccatgctgaatgccttgcatactgtcaagagcttttggaacttcaaactaaatgggaagagccatttattgacttaaaaactccagaggaatcanaancccgacagcacgaccctccaaacgtgtaaaaaagttgcgttagggtttcagtggttgatgcataactcattagggcgcaaaagat

SEQ ID NO: 49899 - DNA, 144 bp, Glycine max
  unsure (1)..(144): unsure at all n locations; Clone ID: 701137861H1
gtcgtctnnccncgcngaccaaggtgctgaaagtacaatttggctaattgccaaggcatatggttgtngnacaatggactccttgntatcatcnactcatgaggccactggttaaatactcatggcngtgattgaaancatttt

SEQ ID NO: 49900 - DNA, 282 bp, Glycine max
  unsure (1)..(282): unsure at all n locations; Clone ID: 701137863H1
cacaaccctaccccaatgccaacttaaaggtggtgaagaatgtgcccctcagattcttcatgtggagccaaacaagacctatagaatcaggattgccagcaccactgccctagcttcactcaacttagccatttcgaatcacaaacttgtagnggtggaagctgatggaaattagtttcaccttttgnggttgatgatattgacatcctanncnggggaanttttcagtgcccccttcgnaaagnnccagnnccaaanaaatttntngncaacnnnnggggg

SEQ ID NO: 49901 - DNA, 279 bp, Glycine max
  unsure (1)..(279): unsure at all n locations; Clone ID: 701137865H1
gcatgtcgctgggtcttccagtggcggcgacggtgaactgcgccgacaacacgggggcgaagaacctctacatcatttcggtgaaagggatcaaaggccgtttgaaccgtcttccctcggcctgcgttggcgacatggtnatggccaccgtgaagaagggaaaacccgatctgaggaanaaggtcttgccagctgtgatcttcgccaccgnaanccatggccccgaaaggacggcgttaatgtattcgangataatctggtgttattgtcaatccaggg

SEQ ID NO: 49902 - DNA, 284 bp, Glycine max
  Clone ID: 701137866H1
cgcttattcacccttcattaccaaaatggatattcatagtaatcatggtgcaacttctgaagggattcttgagaatgtgtgggccaaaattatgagcagtgatagagcagatggaagaaaaggtgatgccgcagaatgttctaactcttgggaagaacttcctaaccttgatggaagagaagggtccatggaaattctacaaaggcttccaagtttagggaggtggatatcaatgggagctgatttctgggaagaagttttagaaggtattattctacctaccc

SEQ ID NO: 49903 - DNA, 286 bp, Glycine max
  unsure (1)..(286): unsure at all n locations; Clone ID: 701137868H1
gnagtttcaaagagaggatttggggattgggaaggcgagggattgcgctgcgtctcttcctcttctctttcgattcatccctcattcataatcttccaatccaacaacctcagcctcacactcacacatacacacatctgaacgcgtatcgtccctcccatggcttcaaagcgcatcctcaaggagctcaaggacttgcagaaagacccaccaacttcttgcagcgctggtccagtagctgaggacatgttccattggcaagcaacgattatgggtcctgctgata

SEQ ID NO: 49904 - DNA, 283 bp, Glycine max
  unsure (1)..(283): unsure at all n locations; Clone ID: 701137869H1
taaaacacctgcttctgggcgtcttaaaaatacgtcacactccttctcaaccctaaaatcagtgttctttgtttttttgcagaaaagattaggagatggcgaaggcttgattccctgcttcaatcgcattctcatcgagaaaatcgtccctccctccaaaaccagcgccggcattctactcccggagaagacctcncagcttaattccggtaaggtgatagcggttggacctggatcacgtgacaaggcggggaattgattccggtgtctgtgaaggaaggtg

SEQ ID NO: 49905 - DNA, 282 bp, Glycine max
  unsure (1)..(282): unsure at all n locations; Clone ID: 701137870H1
aaagtgaacagagaaaganatggagaatgcggaggagcagcagcagcaaaacgaggaggttttgtcggttgaacttccggctccttccggttggaataaactgttcttccctaagaaagtgggaacaccaagaaaaagtgagattgtattcattgctccaactggggaggagatcantaccaaannncanttggagcagtacctaaaggcacatccctggcatcctgtcatttcagagtttgactggggaactggtgacacccccaggcgatcagcnnngtt

SEQ ID NO: 49906 - DNA, 281 bp, Glycine max
  unsure (1)..(281): unsure at all n locations; Clone ID: 701137871H1
cgcagtttgccttcgtttgagctctgttctgttctgtgcctccacaaaccaaaccaggcacaagtaatactgtgtaatccaacaaactgaagtatagctaggtgaaaggaagtagtcaagtacaagagaatggcgaagtcattgagatcgaagagggagaagaggctgagggctattcggagggagnttgttnaacctttctatgacaagaaagaagctgctaagcttgctgcccaagaggctgccttgccgcccctaagctggaggttcttcgaaaccaa

SEQ ID NO: 49907 - DNA, 121 bp, Glycine max
  unsure (1)..(121): unsure at all n locations; Clone ID: 701137872H1
gaagacagttccttctagaattgatagtatgcnctacacattgcatgcnaagtggctcgnatgggtctgtgaaccnnttngagcttcaaagatctgctcaaaagggacactntgtacttta

SEQ ID NO: 49908 - DNA, 284 bp, Glycine max
  unsure (1)..(284): unsure at all n locations; Clone ID: 701137873H1
angaaaccctttcacacaaaccccagcaccanncatgtccaccaaantactnctaancctaatcntcatctcttacaccctnctccaatgtcataggagaagaaacgggctttgtgggcacactacaccccaaatccttaggtcttcacaagaaacaaaccctaaggcacttcaaattctactggcatgacatagtgagcatggagccaactccantcagccanaatnatcncaccantccccaaatacnacacnaccattnttcggcatggtcaacgtcatgg

SEQ ID NO: 49909 - DNA, 286 bp, Glycine max
  unsure (1)..(286): unsure at all n locations; Clone ID: 701137874H1
ccccacactgcataccttangtcttccgaattcgaagttaatttgcaagatggctaaggaaaaggctcagatcaacattgtggtggttggtcatgtggaccctgaggaggcaaccaccattaacgagctgaagaagcctgttgtggagaaagaagctccaggncatgccatatgagggcatgcacgtacggcctcggaggggaaccagaaaattatgttaacaaaataatctggaaccctaatgtatcagtgtcatcatcagtgtgtagtttaagctagctttgct

SEQ ID NO: 49910 - DNA, 282 bp, Glycine max
  Clone ID: 701137875H1
ttggtctttatatttagttattgacatcaacaaagtcatggaggaagttaatgtggttcaaaccaagaatggaactgtttcagtagcttctgcgtttgctggccataaggaagctatacagcaaagggaccacaaatttttaagaattgctgttgaagaagcgtataaaggggtagactgtgaagatgggggtccctttggtgctattatagtttgtaatgatgaaattgttgctagatgtcacaacatggttctgaggaacacagaccccactgctcatgc

SEQ ID NO: 49911 - DNA, 104 bp, Glycine max
  unsure (1)..(104): unsure at all n locations; Clone ID: 701137876H1
gcaaaatatgagtgcnnntctccctttttaaatgngagacaaagctgaagacaacacaanaaganaccaatagataacaaactagagatagagtgagagtgaga

SEQ ID NO: 49912 - DNA, 87 bp, Glycine max
  unsure (1)..(87): unsure at all n locations; Clone ID: 701137877H1
ctcctaacaatttctctctnnntccttcttcaccgcatcantggngnnggacggcgttctcctcggcatgtgcnaccctntnctcga

SEQ ID NO: 49913 - DNA, 280 bp, Glycine max
  unsure (1)..(280): unsure at all n locations; Clone ID: 701137878H1
gcaagccccactcaaccaccncancgntcctcgttnnacgctacccctttctnggtcttctnctacctttcangttttaaaagtntaaagatggnagagacattcctatttacctcagagtcggtgaacgagggacaccctgagaagctctgcgaccaaatctccgatgtgtcctcgacgcttgcctcgagcaggacccagacagcaaagttgcctgcgaaacatgcaccaaaaccaattggnnaggtcttcggagaatcaggacaaggccaaggtgant

SEQ ID NO: 49914 - DNA, 276 bp, Glycine max
  unsure (1)..(276): unsure at all n locations; Clone ID: 701137880H1
agaaagcccatggccttgattaaaaagctccgcaaagcgaaaagggaagcaccagcaggtgagaagccagaaccagttcgcacccatctccgcaacatgattattgtgcctgagatgattggtagcatcattggagtctacaatggcaagaccttcaaccaggttgaaatcaaacccgagatgattggacattatccngtganttctctatttcatacaaacccgtcangcncggtaggctggtattgngcccactccnnntngggttctccaana

SEQ ID NO: 49915 - DNA, 281 bp, Glycine max
  unsure (1)..(281): unsure at all n locations; Clone ID: 701137881H1
gatgttaaagcngttgttagtctaggttgctgttacaatttattatctgaagaaatgattaaggatggtgaatctcaatttggatttccgatgagtcacgctgtaagatccattggtttatcacttggaaaaagtgcacgtgatcttgcttgccagagtgctgagagatggaggagtctggacatgcatgctggcattcacaactttgagttgcatgcttttcgggctgcttttcaaatggttcttccaaatattanccggaaatgtgatgggtacncctc

SEQ ID NO: 49916 - DNA, 275 bp, Glycine max
  unsure (1)..(275): unsure at all n locations; Clone ID: 701137882H1
cttcaaatcacagcattcaagataatacaatacgcaacactttttagaaagccttntaactataaactataaaagctttgcccagatgaaattacactgcaggcaaatttttcattcacctttagcttagttatcttcattgtcgcccaaattattctttgtcacatctttgtattagccctggatggcaacaccnnggggagcagcatccataggtattatcttctcannttctacacccttgttgtctnggttttcataggctgaaatgtgcc

SEQ ID NO: 49917 - DNA, 284 bp, Glycine max
  unsure (1)..(284): unsure at all n locations; Clone ID: 701137883H1
cgcaaacgcaaaaatggtgaagtttctganaccaaacaaggccgtcattgtccttcagggacgctacgccggcaagaaagccgtgatcgttcgaaccttcgacgaaggaactcgcgagcncccctacggccactgtttggtggcggggataaagaagtaccctgcgaaggtgatcaagaaggactcggcgaagaagacggcgaagaagtcgcgcgtgaaggcgttcgtgaagctcgncaactaccagcacctcatgcccacgcgctacacgcttgacgtggatt

SEQ ID NO: 49918 - DNA, 285 bp, Glycine max
  unsure (1)..(285): unsure at all n locations; Clone ID: 701137884H1
gcgatttgtttccttccatctccgccgtaccatgtcggaagcaccaccgcctccaactgccgatgcgtcaccgcctccgtactggtgctaccactgcgagaagcgcgtctccgtcgaaacgctcgcgaatctccccgacgtcgtctgcggcgagtgcaagaacggctttgtggaatccatgcccacgccgtcgcgttctcgctccccctccgnctcctccgacgacccctanttcggctcgcagttcctccaggtccttcgcctaatcgctcagtcggcgcgtga

SEQ ID NO: 49919 - DNA, 280 bp, Glycine max
  unsure (1)..(280): unsure at all n locations; Clone ID: 701137885H1
tccttaccaaagagccttggctcgtttctggtccaaattcattgatgataaggtttttggtgctgcatggaaatccgttttcacagctgatgagaaagagcgtgagaagaatgttgaggaagcaattgaggcnctgcagtttcttgagaatgagataaaggacaagaagttctttggaggagaggagattgggttggtagatattgctgctgtctacatagcattttgggtccctatggttcaagaaattgcagggttggagttatcacaagtgagaatt

SEQ ID NO: 49920 - DNA, 136 bp, Glycine max
  unsure (1)..(136): unsure at all n locations; Clone ID: 701137886H1
gngaanncncgggcgtttgaatctatagantanaatcaaaccaanttgnnagaagatcgntcgatcgatcgatgggctctggtcggagttnaagngaagcatggcggcggagggcgcaccggaggngaattgctcc

SEQ ID NO: 49921 - DNA, 283 bp, Glycine max
  unsure (1)..(283): unsure at all n locations; Clone ID: 701137887H1
gatatgatgcctcgaattggtgtcaaagctgatgcaaatttactgataataatggcacgtgtatatgagaganatgggcaaagagaagagctcaagaagctgcaaaggcacatggaggaagctccaaatctaaatgatttagagttccgacagttctataattgtttgttgacatgccatttgaaatttagggatctagattctgcatcanacatggttttggaaatgcttaggaaagcaaaggaagcaagaattctcttgcagctgccaaatttatgacaat

SEQ ID NO: 49922 - DNA, 285 bp, Glycine max
  unsure (1)..(285): unsure at all n locations; Clone ID: 701137889H1
tgagtnacaaccctttttgctccacaacaaggttttctccacagggcaagangctggtttggtgtttgtttcatttcactttacatgaatacatatacatagaagtttgaagggttttagggatttgcatgatgctaggttcattacctatattgcccctcnctgctcntccttctgatggaaatctaggtcctctgcctgagtctcaagtgattgatgataatgaggaggagcagaacaaatcaaattctgcttctgttccggcgccggcaacagttgccaccc

SEQ ID NO: 49923 - DNA, 281 bp, Glycine max
  unsure (1)..(281): unsure at all n locations; Clone ID: 701137891H1
taaaatagtgaagaaaaagcgcatacggcgtttgcgaaattgcgatttcatgtcatagagaggaaaagaggagaggcggggcggagcagagacgaatggcagatcagagcgagcattncnaaacggcgttgcctccggaggaccaggaccgtcccgttcgggtatacgcggatggcatctacgatctcttccactttggccacgcccgtcccttgancaagccaagaaatcgtttccgaatacatacttgttgttggtgttgcaangatcaagtcccccaa

SEQ ID NO: 49924 - DNA, 277 bp, Glycine max
  unsure (1)..(277): unsure at all n locations; Clone ID: 701137892H1
agcgngcttcgtgatcgattgcgcgaancggtggaggataagattatggacattgcttctctggagaagttccttcaggagaggattaangtcggncgcaaggccggtgcanccggcgattccattaccgtcaccagggacaagagcaagatcaccgtcacctccgacangnaatttttctaaanggtatcggaaatnttgccccaggagttntttnaaanccccattgggggttttncctccgntnttnccnccaanagggggggnttntntttnt

SEQ ID NO: 49925 - DNA, 265 bp, Glycine max
  unsure (1)..(265): unsure at all n locations; Clone ID: 701137893H1
cgggccttcgccggcagcggcatctccgtgacggtgaccgcccccaacggcganatngccgccttaaccaaaatcgattcggcgaggcagtgggtggcgacgcacatcaaaccctttcacccctcagaccaaaattaattacatcctcgtgggnagngnngttctccatnggggnnacacnaattttnnnngggcctcgtccctgnnatgaaaaccttcatctcagcctcctaggggngggnaacntntnaaggtcccttgtggt

SEQ ID NO: 49926 - DNA, 105 bp, Glycine max
  unsure (1)..(105): unsure at all n locations; Clone ID: 701137894H1
gcaaattggcgccgtttnnagacaccagaattcctgttntatgcntccttttgagtgaaaaaaaaaaancatcaaaacanaaacttgttntntctcnggttttna

SEQ ID NO: 49927 - DNA, 278 bp, Glycine max
  unsure (1)..(278): unsure at all n locations; Clone ID: 701137895H1
tcgatgctcagtcatctcttttaccattctcttctctcttgctcttgcaggagagagccatgtccatgcatcgctacctgaggaagattattgggaagctgtttggccaaacactcccattcccactgcactgcgagagcttctaaagcanctccctgcaggtgttgaaatcgatgaactccctaagcaaattgatgatacacagtacccngaancattcttntataagaggactttcatcggggcaaacatganagtacattccccanggncccnng

SEQ ID NO: 49928 - DNA, 271 bp, Glycine max
  unsure (1)..(271): unsure at all n locations; Clone ID: 701137896H1
gcnaatcancctanatcttcnnncgnagatcgaaaacgaatcttcttccatggcctccaagcggattctgaaggagcttaangacctccagaaagaccctccaacctcttgcagcgccggtcctgtagcggaagatatgtttcattggcaagcgactataatnggtcccccngatagcccttatgtgggggtgtttttccagtnannattcatttnccccggattaaccattcaagccacccaaggtngatttggnanaaaatttcccccc

SEQ ID NO: 49929 - DNA, 260 bp, Glycine max
  Clone ID: 701137901H1
tgctctatatatactacatacattttgattaattttttacttggtctataatgtttgaactagaagtaaaatactaaacttatgttgatctgaattaaagaagaaaaagcgggaaaacgaataagaattttatgccgaatcagtgaatccattttaaagctaaataaaaccctcctctctttctctgtctctctaacgggaaccaaacatggcttccttccctcctctaggttcactcactctctgcgagtcaatcgtga

SEQ ID NO: 49930 - DNA, 260 bp, Glycine max
  Clone ID: 701137903H1
cgcaaacgcaaacgcaaacgcaaacgcagagcgtgatccattgacgaagatggtgcagcgtctcacctaccgcaagcggcacagctatgccaccaagtccaaccaacacagggtcgtcaaaacccctggtgggaagctcgtttatcagactaccaagaagagggccagcggacccaagtgccccgtcactggcaagaggattcaggggattccacacttgaggcctgcagagtacaagaggtcaaggttacccagaaacc

SEQ ID NO: 49931 - DNA, 258 bp, Glycine max
  unsure (1)..(258): unsure at all n locations; Clone ID: 701137904H1
cngcccgctgcancaatggcttcagagaagaaactttcgaacccnntgagggagataaaagtgcagaagctcgtcctcaatatctctgttggcgagagtggagatcgtctcaccagagcctccaaggtgttggacaacttagtggccaaaccccagtgttttccaaagcaaggtacactgttcgttcctttgggattagaagaaatgagaagattgcatgctatgtcactgtcagaggtgacaaggcaatgcaacttt

SEQ ID NO: 49932 - DNA, 256 bp, Glycine max
  unsure (1)..(256): unsure at all n locations; Clone ID: 701137905H1
ggtccaggcttnnaaatcaacgganacagtattagttgggccaactggaagttccatattggatttgatccacgtgccggtntngtaatatcactggcatccatttatgatttngagnngcacananctcgtaagggcnntnnnnnggntanntttctgagctgtttgtgccntaccaagacccaacagatgatttttactataagactttctttgatgctggagagtttgggtttggtctctccacggtctcatt

SEQ ID NO: 49933 - DNA, 256 bp, Glycine max
  unsure (1)..(256): unsure at all n locations; Clone ID: 701137906H1
cngccacaaccacttctaatggtggtgccatggnggngttgctttcgcaactccaatctaatgtccaaaaggctcttgctggtggaggacccgaggcagtgaagaggaacaagagtaggaacaaatttctgcccgccaaagnntcgatcgcctccttgatcccggttcttccttcctcgagctttcacagcttgcaggacatgacttgtatgaagaacccttgccttctggtggggttgttactgggataggtccc

SEQ ID NO: 49934 - DNA, 256 bp, Glycine max
  unsure (1)..(256): unsure at all n locations; Clone ID: 701137907H1
anttcaattctttgtggttcagaaactctgtacagttaatcaagcccaacctcacctcacctcacctcacaggttttagttgttaattaaatatatagatagaaatccaaggaagaagatgaagcagtttgcctccaaaacgtcgtcgctccatcccacgatgagattagcgtggtttgccccaagccccgccgcctcggcctcttcaacttccccgtgaacgatccccctgttagaccctctactggcatctcag

SEQ ID NO: 49935 - DNA, 258 bp, Glycine max
  unsure (1)..(258): unsure at all n locations; Clone ID: 701137908H1
gngtggttgattcagatgatcttcctctcaatgtttctcgggagatccttcaagaaagcagaattgtaagaataatgagaaagagacttgtaaggaaggcatttgatatgattcaagaccttgctgaaagtgaaataaagaggactacaaaaaattctgggagaactttggtaggttcataaaattaggttgcattgaagacactggcaaatcataagcgcattacaccactattgaggttttacacttccaaaagtg

SEQ ID NO: 49936 - DNA, 256 bp, Glycine max
  unsure (1)..(256): unsure at all n locations; Clone ID: 701137909H1
gnttaaccatgtccctatgtaagtaccctgaggctgaaacagtacccctttatatacccttcaaatctattgacatgttcacccttggaggaaagcatttttgttcttattttgctccatctctgtatatcacacaacttccaaaggcttacttactctaatatatctctgattcaagtggttctgtgagttttcttgttttagtctgaggctttgagttttgtttaatagatatgccaagggcaaatngcagttt

SEQ ID NO: 49937 - DNA, 258 bp, Glycine max
  unsure (1)..(258): unsure at all n locations; Clone ID: 701137910H1
ctcctctgtctttttctctctcttgctatccttttggctagtngcactgctgcaagtgtcaacttccaagaagcgcagtgccaagccaccatgtttcaacattcaacagaagcctttttccttccacttttctcttggggntggttcttctgcttaccaggcagaaggagcagcaagtgtagatgggagaggaccaagcatatgggacacctacactagacagcatactgaaaagatttgggatcatagcaccggtga

SEQ ID NO: 49938 - DNA, 258 bp, Glycine max
  unsure (1)..(258): unsure at all n locations; Clone ID: 701137911H1
cntccaacagctactccaaggtcaacgacgtgttcttgaacttcagaggagaagacacgcgcaagacctttcgtgtctcatctgtatgctgccctctctaatgcaggaatcaacactttcatcgatcacaagcttgcaagggaacggagttgggagaggaactgttagcagtcataaaagggtctcggatatccatcgtcgttttctcggctaactatgcttcatcaacttggtgtcttcatgagctggtcgaaataa

SEQ ID NO: 49939 - DNA, 257 bp, Glycine max
  unsure (1)..(257): unsure at all n locations; Clone ID: 701137912H1
gagaccctccaggagtactggtggtgcaccgagcgcgccctacgactggggccccggtggtggacccgacctcatcgtcgacgacggtgangacgctacccttctcatccacgaaggcgtcaaggccgaggantctatgagacgaccggcgaactccccgaccccaactccaccgacaacgccgagtttcagatcgtgcttaccatcatcnganatgggttgaagaccgatcccaccaggtaccgcaagatgaagga

SEQ ID NO: 49940 - DNA, 249 bp, Glycine max
  unsure (1)..(249): unsure at all n locations; Clone ID: 701137913H1
tgcctcccgtcgctcctcgatccggtgatgccatattcgccaacgtcgaaangcgtcaatgcggagtgtttactttgacgtatggcgcaattgtgcgtcaattgctcacggatctggaagaggctaggaggttaacaagcagcttgatcaaatgggttacaatattggaatccgtttgattgatgagtttttagccaagtctaatgtctccagatgcaacgatttcagagagacgactgatgntattgc

SEQ ID NO: 49941 - DNA, 257 bp, Glycine max
  unsure (1)..(257): unsure at all n locations; Clone ID: 701137914H1
gncantaaggtntctcctaaagtgctctgttttgtnttctctctctctgtctatatgtgactccgcccncaacactctgacctgtgntgtccctcatgtgacaattcgggagctgcaaggtttcggtcttgggtggaatattgggagaacccctccttcgaaaaatcaaggaaaacgaagaagctcgttgattggagaagttggtttaatggctaaagtttgttggccatattttgatccgagtatgagaacttcag

SEQ ID NO: 49942 - DNA, 259 bp, Glycine max
  unsure (1)..(259): unsure at all n locations; Clone ID: 701137915H1
tttttaaaaatattcttattttaaaaaattcctaaaatattttttgttgaaaaatactactgaagagtgaagatttatcaaattgcccacnggtatttgactcgngcgttggncgagagcngaacngaaaccgngcnccganctgaggccatggctgggtctgggagttccatgctgtattcctttcttctcttcacagtcattctctcacttcaagaaatgtaccgagggaaactagcatcatcagaattatacacta

SEQ ID NO: 49943 - DNA, 263 bp, Glycine max
  unsure (1)..(263): unsure at all n locations; Clone ID: 701137916H1
ctgtattcagattacattgcaaaaatggcatcattcaccatgacagcttctatctttggctgcccagctgtcaccaaacggtcggcagtggctgcgcagaggagattactcgtagtgagtgctgccaaagctgaagggaaaaggtcagttatgacaacaatgatagcaatggaaggaggaacttgatgttcnnnnnnnnnnnnnnnnnnnnnttctctgttgcgggatggcagtggcagatgagcctaaaccaggaacctcag

SEQ ID NO: 49944 - DNA, 260 bp, Glycine max
  unsure (1)..(260): unsure at all n locations; Clone ID: 701137917H1
gaccttcttcatccctctagatcgaaaggccaaatttttctttttcttttccttttnccattattatttcatatttttttccccttttcaattcttcaaaaaattctcgcgactaaattcacgtcagtncacggaacataaaattcagtttttttttattaaaatttgttggcaaacaaaaacaaaaaaaaaattgaaattttgatccgttttgccgaattggaccgcgcgttcaattgggttgtcgaattcgaggcaga

SEQ ID NO: 49945 - DNA, 254 bp, Glycine max
  unsure (1)..(254): unsure at all n locations; Clone ID: 701137918H1
gcattcatacgtggtgttgttactgctgctcttttctcttttcttttctctttagttctctcttcccctnnnnnnnnnnnnnnnnnnnnnnnnngagcttgtttaagcttttcttccattaacatattatccaatgtgtggtattcttgctgttcttggttgttctgatgactctcgagccaaaagggtccgcgtgcttgagctctctcgcagattgaagcaccgtggccctgactggagtgggctccatcaac

SEQ ID NO: 49946 - DNA, 251 bp, Glycine max
  unsure (1)..(251): unsure at all n locations; Clone ID: 701137919H1
cntagcttgtgttctctttttcgtgtccatacgcaaatactgaacnttttttgcttgaaaggactctatatccatccatcggattgcaacttcatcccatccagaacagaacagaacagaactggtggttgattgaatcggaggggtaagtgggaagacgtgtcttgttttgtagctttcccttccctctctcttttccccgccgcatgtgccggattagacgcgaatgcttccataattcactctccaat

SEQ ID NO: 49947 - DNA, 255 bp, Glycine max
  Clone ID: 701137920H1
gcgaatcccctgtgatctctcacacaattccaattcctctggatctgcgtctcgatcgatagatctcgaacatgagcactggggagcttctcaacatcgaacctctcgaactcaagttcccctttgagctgagaagcagatctcatgttctcttcaattgtccaataagaccgatagctatgtagccttcaaggtgaaaacaaccaatccgaagaagtattgtgttcgtccgaacactggggttgtcacgcctcg

SEQ ID NO: 49948 - DNA, 256 bp, Glycine max
  unsure (1)..(256): unsure at all n locations; Clone ID: 701137921H1
cgcactcagaccgcagtcgcagccgcagcacgggcaagcagcgctggagcaggtgcagtgcttacgtcgcaagaagaccgccgtggccgtgacctactgcaagcgcgggcgcggttctcatcaagatcaacgctgccccattgagnncgtggagccggagatcctccgcttcaaggccttcgagcctatcctcctgttgggtaaganccgctttcgccggcgtcgacatgcgcatccgcgtcaagggtggcggcca

SEQ ID NO: 49949 - DNA, 254 bp, Glycine max
  Clone ID: 701137922H1
gaaatcctttctgagttctgcgccaactgaatcaagcagatcgaactccgccatagtcttcatcgagacagagatcggaatctgattcccaaacggcaacagtatgagcgtcatcgacattctaacccggtcgattccatttgcaagacgtacgacaaatacgacgtcgaaaagcaccgcgatgccaatgtcctccggcgacgatgcctttgccagactatacgcctccgtcgacgccgacatcgtggccttgc

SEQ ID NO: 49950 - DNA, 253 bp, Glycine max
  Clone ID: 701137923H1
ggggttctcacgatttcgattaaccctttctcccacaaactccgattcttcttgtaaacagcggtgccaggtgttaatctagaagttgatataggatgggggcaatgatgtcgaggttctggttcatgttatccctgcaaaagagtataagattgttgttgttggattggataacgctggaaaaaccactaccctttataaattgcatctgggtgaggttgtaacaaccaatcctactgttggtagcaacgtc

SEQ ID NO: 49951 - DNA, 258 bp, Glycine max
  Clone ID: 701137924H1
cgcactgtcacctgtattcacaaagctcaacaaaaattataacaatacacaaagaagggaaaagacgaatcagaagacagagatatctatcaggactgaaaaagcaatttagaaagagaaatccgaagatggagacttagaagcaaagatatcagattcaaaaccagatgactcaagtcctctaaaactctacttgctcccttttcttgctccgggacacatgatcccacaaattaaccttggctcaagtttttgcct

SEQ ID NO: 49952 - DNA, 253 bp, Glycine max
  unsure (1)..(253): unsure at all n locations; Clone ID: 701137925H1
gttgctacagtnttggtagcatatgaatgccatggctcagactaccagaagttccctctccaaatgaaaactgggtttggtgnncaatacagcaatgaggtggcatgtgccagttggaggcttggcgtgaagcaaacaacgtagtcaagtggcaaactgttcctgcagcttgcggagagtacatagctgactacgttctaggagaccaatatagatcagattccaaaacagttaaccaacaagcttatttcta

SEQ ID NO: 49953 - DNA, 258 bp, Glycine max
  unsure (1)..(258): unsure at all n locations; Clone ID: 701137928H1
ggagnagggtangcaagganantcntanngcgntttgattggagagatcagaganatggttaagangattaaggnagcnaaatccaaacctatggatcctcactctaatgacattgcaccccgtgtgttgcctacgttgttcacaccatcgntaanngccggtaagagttcatttatgtggcttggtccaacaccaagggtattcatcttggatcctgacaaattcagannaaatggctactaaggtctatgattttc

SEQ ID NO: 49954 - DNA, 257 bp, Glycine max
  unsure (1)..(257): unsure at all n locations; Clone ID: 701137929H1
ggnaggttggtgctggtgaccagggtcacatgtttggctatgccactgatgaaacccctgagtacatgcccctcagccatgtccttgcaaccaaactcggtgctcgcctcaccgaggttaggaaaaatggtactgtgcttggctgaggccagatggcaagacacaagtaactgttgagtactacaatgacaatggtgccatggttccagttcgtgtccacactgtcctaatttccacacaacatgncnnnaccganc

SEQ ID NO: 49955 - DNA, 260 bp, Glycine max
  unsure (1)..(260): unsure at all n locations; Clone ID: 701137931H1
gnggaggtggcggtggtggtgtagacacggcgtgacggcgatctcttgagataaatgttggttgannnnnnnnnnnnnnnnnnngttgtattgtagaatgagccaaccaacggtganacgtgccactgcgagcnagatcacactattcgtttttgggaggccaagagtggccgttgctaccgcaccatccaatatcctgattcgcaagtaaaccggctggagataaccccggataaacgcttcctggctgcagctggcaa

SEQ ID NO: 49956 - DNA, 263 bp, Glycine max
  unsure (1)..(263): unsure at all n locations; Clone ID: 701137932H1
cnagaagcatctgagtgcttattatttgtaatatatatagtcactcaagcttctaggatttgtgccagcnacatgaaaatgggaagcaacttcaggnttttgagtcnntgccncnnggcangantgcancaacccagcgcaacancagcntngntttttatgccaagagttgcccaaacgctgagcaaatcgttttgaaatttgtccatgaccatatccacaatgctccatcactagcagctgcattgataagaatgcacttc

SEQ ID NO: 49957 - DNA, 249 bp, Glycine max
  unsure (1)..(249): unsure at all n locations; Clone ID: 701137933H1
cttncctctcccnctcangtnccattttcctttcaaatagtaacactagagancaannagctctagctagaactgataatgtatatacaagccatcattcagaacaattagtgcatcctctttcactgaagaacttgtttagtttgctcctaaaatatttgtcctgaggatgtggtgcagaaatccttacccttcctctttattaaagcttatagcatctgcaatcattaatttcttattccttcaaag

SEQ ID NO: 49958 - DNA, 135 bp, Glycine max
  unsure (1)..(135): unsure at all n locations; Clone ID: 701137934H1
ggnaatcttatcccttacaaggatggatttcccactggtttgcttggaaagagatatcaatcctaccaattcaatggcattctttatgtcttggcttgtttgcttcaattantgcaccttttggangcntcttgc

SEQ ID NO: 49959 - DNA, 246 bp, Glycine max
  unsure (1)..(246): unsure at all n locations; Clone ID: 701137935H1
gcagcaatggtgtacgtcaaggctcagaaatcaaaagcctacttcaagagatatngagtccaagttcaagagnagaagagaggganaaaccgattaccgtgtccaggattcggttgattaatcggacaagaacaaatntancactccgaaataccgatttgttgttcgcntnagcaacaaggacattgttgcangataatatctgctagcattgctggngatattgntcttgctgcagcatatgcc

SEQ ID NO: 49960 - DNA, 252 bp, Glycine max
  unsure (1)..(252): unsure at all n locations; Clone ID: 701137937H1
ggtagccagccagtcatggtgctcttcaatgtttcacgcgtagagaccacttcccttcgatggccagaagcctggaacctctggtctccggcaagaaggtgaaagtgttcgtgcaacctcattacctcctaactttgttcagtcaacattcaatgcattaactgtgganaaagttagaggtgcaacgctagttgtatctggtgatggtcgttatttttcaaaggaagcnattcagattataactaaaatgtc

SEQ ID NO: 49961 - DNA, 230 bp, Glycine max
  unsure (1)..(230): unsure at all n locations; Clone ID: 701137938H1
caanattttagtatttaacnaagcaaaatgcacacatanggccaaaacgnacaagnnttancccaacccaaattggtttcatatcacaganaccaacaggatgccgcttcctccttatggtcccnacccactcgaacaaaagttctacagaaataaaaatgggtacnattcntctaaccacaaatnngcaaagtctaaccaccaaaaatnnnaaaaaggaaaattaaacc

SEQ ID NO: 49962 - DNA, 255 bp, Glycine max
  unsure (1)..(255): unsure at all n locations; Clone ID: 701137939H1
ggctactaccccaacaacgtcactactgatcacattcagcagtatctggatgagaacaagtccttaattctgaagattgttgaaagccagaattcaggcaagcttagcgagtgtgccgagaaccaagcangcttcagagaaatctcatgtacttagctgcaatagctgattctcaaccccaaccacccaccatggcctggncagtaccctccgngtgggatgatgcagcagggnagcacactacatgcaggctcc

SEQ ID NO: 49963 - DNA, 252 bp, Glycine max
  unsure (1)..(252): unsure at all n locations; Clone ID: 701137940H1
ggacaagggggngttggatgatgtgataagaaggcttctggaagggaaaggagggaaacaggtgcaactctctgagtcggagatccgtcaactctgcgtcaacgccagacaaatcttcctctctcagcaattcttctcgacctccgtgctcccatccgcatctgcggtgatatacatggtcagtaccaggacttgctgaggctttttgaatatggtggctaccctcctggcgggcaaactacttgtttctgg

SEQ ID NO: 49964 - DNA, 253 bp, Glycine max
  unsure (1)..(253): unsure at all n locations; Clone ID: 701137941H1
cnaacccaacaagcatcttctccttagtcctccccgccatgatcaaattgttcaagaggaacacaaacactgacacgtgtcatcaccaccgttaccgccaccccgttttgggcctgggcctggccacaaggaggcccacaggcctcctaatgttctggaatccgctatgttgaggcccacggctcctccaccgagcgagaagagagtaattattggatccgtggacgacgtcgttacggggctggcgtcttgc

SEQ ID NO: 49965 - DNA, 251 bp, Glycine max
  unsure (1)..(251): unsure at all n locations; Clone ID: 701137942H1
ggaagattacatgttggccaactgggtcgcttccaataccttcagattttggttgggtttcgtgcttttggaaaattcgttgagtttctgaagctatggaggcttataagagatgggtgaggcagaacaagantttgtgcactccatggagtctttggccaatggattgacatggcttcttcctgaacggttttctgaatcagagattggacctgaagcagtaacaaccattctgggaatcatcacagctc

SEQ ID NO: 49966 - DNA, 256 bp, Glycine max
  unsure (1)..(256): unsure at all n locations; Clone ID: 701137945H1
tctccctcaatttcactagaatgcaaatgatggacaactgagccattaaccaagcagaatgaagaagagcaagatgaaaatgaaaatccagattttcatattcttctgtttcattagttgtttctcttaggttttgctgctgcttccacaaatgatgaagttnccagctttgctttctataaaagaaggtctcgttgatccattgaatgcccttcaggattggaaactggcatgggcaaagcaccaggaacggatg

SEQ ID NO: 49967 - DNA, 262 bp, Glycine max
  unsure (1)..(262): unsure at all n locations; Clone ID: 701137948H1
gnccattcaaccataccgtaccagcagaggaaagagagaaaatttcagaacaaaaaagaagcagaggaaaagagagatagagagagaagaaaagctgtgaagagaagagtctgaaatccgaancanaaanaantggcttttnagatgaagaactgcgagttgtgcaagcttccggctcggactttctgcgagtcggaccaggctagcttatgctgggactgcgacgccaaggttcatggagccaacttcctcgtggaaagac

SEQ ID NO: 49968 - DNA, 135 bp, Glycine max
  unsure (1)..(135): unsure at all n locations; Clone ID: 701137950H1
gnagaatcaggttctggagggaatgaanatgatnagtgatggggaaaanngtagtcctagagaagtggaanaatcgnctaaanagctcagcaagtncctgatggtgcnncaattgctgaagtttctgatnananc

SEQ ID NO: 49969 - DNA, 133 bp, Glycine max
  unsure (1)..(133): unsure at all n locations; Clone ID: 701137951H1
tcgagccncctttcgttgtcgccgttcgttcacagcgtagcctcngctcctcgaagatggcacgtcccagangtggtggtgggttcaggggtggtaggggtgacanaggtagaggaaggggtggcggtgannc

SEQ ID NO: 49970 - DNA, 134 bp, Glycine max
  unsure (1)..(134): unsure at all n locations; Clone ID: 701137954H1
gagatctcatatatcatggctacctccatggtgaagcttatgcttttctctgntctcatactcttgncccttgcaagcanttgtgtctgtaacaccactgncattttcaacatccactagaccctcctaacaaa

SEQ ID NO: 49971 - DNA, 249 bp, Glycine max
  unsure (1)..(249): unsure at all n locations; Clone ID: 701137955H1
gaaaatgaagataaaatagtgtatcttgcagccatgattgggaaaacaagccataagcatagagtttaattgaaatctattgtcagttgaaactgagtagttatcagtggaaagatgagggaaggggcagcaaagtatgcgtcacaggagctagtggttacatagcttcctctctggtgaagaagctcttggccaagggtcacagcgtccatgcaactctcagagncctgagtttgtataagaacgagt

SEQ ID NO: 49972 - DNA, 249 bp, Glycine max
  unsure (1)..(249): unsure at all n locations; Clone ID: 701137956H1
gaaggtccagnggattcggatttgtgaccttcgcctcagagcagncaatgaaagatgcgatcgcaggaatgaacggccaggaccttgacggtcgtaacatcactgtcaacgaagctcagacccgcgnnnnnnnnnnnnnnnnnnnnnnnnatacggtggtcgtcgtgaaggtggatacaaccgtaatggtgggggtggaggtggaggatacggcggtggtagagaccgtggttacggtggtgatggtgg

SEQ ID NO: 49973 - DNA, 249 bp, Glycine max
  Clone ID: 701137957H1
gagggttttggtgtttgaatcgtgaaaatgttcagaaaccagtacgacacggacgtgacgacatggagcccggcggggaggctgttccaggtggagtacgcgatggaggcggtgaagcagggctcgcggccgatagggctccgatccaagacccacgtggtcctcgcatgcgtcaacaaggctaactccgaactctcatcgcaccagaagaagatcttcaaggtcgacaaccacatcggcgtcgccatc

SEQ ID NO: 49974 - DNA, 253 bp, Glycine max
  unsure (1)..(253): unsure at all n locations; Clone ID: 701137958H1
gnttgctactgagtttccacactgcataccttagcgtcttccgaattcgaagttaatttgcaagatggctaaggaaaaggctcagatcaacattgtggtggttggtcatgtggaccctgaggaggcaacaccattaacgagctgaagaagcctgttgtggagaaagaagctccagggcatgccatatgagggcatgcacgtacggccttcggaggggaaccagaaaattatgttaacaaaataatctggaacc

SEQ ID NO: 49975 - DNA, 250 bp, Glycine max
  unsure (1)..(250): unsure at all n locations; Clone ID: 701137961H1
ctatggctacccttattgctcccagcaaccactctccccaagaagacgctgaggctctcagaaaggcttttgaaggatgggggactgatgagaaaactgtcatagtaatattgggtcatagaactgttatcagaggcagcaaatcagaagagtctatgaggnaattttccaggaggatcttgtgaaacgcctagagtctgagatcaaaggagacttgagaaagccgtgtaccgatggatactngaacctg

SEQ ID NO: 49976 - DNA, 246 bp, Glycine max
  unsure (1)..(246): unsure at all n locations; Clone ID: 701137962H1
gtccttagttctgggagtgttgatgcttgagtcttgacggaacgaacggaaacagggganctcaancggacaacaccaagccccctancgaacnggaacacgacgangagggcagaancagagaaccgggaangngnggacngcnagcatacacattataacagtggttgtaggggcaggggtgctgtctttggcatgggttatggcacaactaggatggttagctggcatagccagtatcattac

SEQ ID NO: 49977 - DNA, 253 bp, Glycine max
  unsure (1)..(253): unsure at all n locations; Clone ID: 701137963H1
ttgtatgagggtcctcttgatgatcaatatgcttctgctatcagnaattgtgatcctgaaggtcctctgatgctctatgtctccaagatgantccagcatcngagaaggggagactttccgccctggcgngnannctctggcagggtttcaactggtttgaaggtgaggattatgggacctaattatgtccctggggagaaaaaggatttgtatgttaaaagtgtgcaacgaactgtcatttggatgggaaag

SEQ ID NO: 49978 - DNA, 252 bp, Glycine max
  unsure (1)..(252): unsure at all n locations; Clone ID: 701137965H1
gnatgtcgctgggtcttccagtggcggcgacggtgaactgcgccgacaacacgggggcgaagaacctctacatcatttcggtgaaagggatcaaaggccgtttgaaccgtcttccctcggcctgcgttgcgacatggtgatggccaccgtgaagaagggaaaacccgatctgaggaagaaggtcttgccagctgtcatcgttcgccagcgcaagccatggcgccgaaaggacggcgtctacatgtacttcga

SEQ ID NO: 49979 - DNA, 129 bp, Glycine max
  unsure (1)..(129): unsure at all n locations; Clone ID: 701137966H1
ggagtttacgtcatggtcgttttacagancagggntagcagagtttntggcnacntttctgtttctctacatcacngtcttaancgtnatgggagtcgccggggctaagtctaantgtagtaccgtggg

SEQ ID NO: 49980 - DNA, 249 bp, Glycine max
  unsure (1)..(249): unsure at all n locations; Clone ID: 701137967H1
cgctgctgtcggtgcttcgcctgantctcattccgtttgcgcccactatcacaggttgtgctgaggcttaactggttcttgaagcatatttcagagttttatcagagaacaaatgggttatattggactcacggtgttgcagctctgcacagatataaatatagtggagtagatcattcctatgtggccaaatatgtactacaacccttttggagtcgctttgttaattttttccccctatggatgcct

SEQ ID NO: 49981 - DNA, 242 bp, Glycine max
  unsure (1)..(242): unsure at all n locations; Clone ID: 701137969H1
ggtccccagaagggtggtgttgctgcatacgttgatgagcgtgcttacatagagancttcccttttcaagccggngtgnttatagcattgtaggtncaagagtttaccagaaatggttgggatttgcctttcctacgagactcaccgttagcagttgacctttcgactgcaatattagagttggcagagantggagactgcaaaggntccatgacnaatggcttctgcagcatgcttgccna

SEQ ID NO: 49982 - DNA, 246 bp, Glycine max
  unsure (1)..(246): unsure at all n locations; Clone ID: 701137970H1
cnagagcngtaagactactacccctttggctaggcaagggtccttgtataatctgacccttgatgaggtgcataaccaacttgggaatttggggaagccacttggcagcatgaatcttgatgagttctgaagagtgtgtggannnnnnnnnnnnnnnnnnnnnnnnaggctctggctgggactttggtgttggtgatgctactaacatgccgcatggcaaggctgctgcttccggctcctctctga

SEQ ID NO: 49983 - DNA, 228 bp, Glycine max
  unsure (1)..(228): unsure at all n locations; Clone ID: 701137971H1
caagccccactcaaccaccacaccnctcctcgttcacgcacncccctttctgctcttcttccacctttcaagttttaaaagtataaagatggcagagacattccttttacctcagagtcggtgaacgagggacaccctgacaagctctgcgaccaaatctccgatgctgtcctcgacgcttgcctcgagcaggacccagacagcaaagttgcctgcgaaacatgcacc

SEQ ID NO: 49984 - DNA, 245 bp, Glycine max
  Clone ID: 701137972H1
ctctttggacattttcttgtagtgaatggttctttccttactcgtccctgttcactctctcaatcatctctttttctcttctctctcactctactcaattcaggacacccttttccttctaatcttctggatattggttcacttgagtgcataatatcagcctgaagctctatgtaattctcaacatctaaagccacacaagaaaatcagcatgcgttggttgggtctttctgttgatgtgttcc

SEQ ID NO: 49985 - DNA, 247 bp, Glycine max
  Clone ID: 701137973H1
ggaaatttaccccgtgataccgttacctaaagagaaattagttgacacaaatggagcaggagatgcttttgttggaggatttctttcacaattggttaagcataagcccattgaagaatgcattaagctgggtgttatgcagccaatgttatcatccaaaggcctggctgcacatacccaccgacgcctgattttcattgagtgattcctctttttctgttactgctatgaatttttttcttttatc

SEQ ID NO: 49986 - DNA, 249 bp, Glycine max
  unsure (1)..(249): unsure at all n locations; Clone ID: 701137974H1
gncgaccgtaccaggacagctcatctgggagatcgtgaagaagaacaactcctttttggtgaaagagttcggaaggggcactcagagcgtgcagttcagcagagagcccaacaatctctacaacccaacactttcaagtactccggtttggcgaaccagaaaactgtcactgttcaacctgctggtaaagaccagtccgtgttgctcgcaacaaccaagacaaagaagcaaaacaagcctgctgctttg

SEQ ID NO: 49987 - DNA, 133 bp, Glycine max
  unsure (1)..(133): unsure at all n locations; Clone ID: 701137976H1
anacaacttctagaaccanngcnctttggtatccagaggaaacccctggcctcttgaacctactgttctctacgagaggccaacaggcggagggcttcactttcaggctggaaatgtgtctgaantattgaca

SEQ ID NO: 49988 - DNA, 251 bp, Glycine max
  unsure (1)..(251): unsure at all n locations; Clone ID: 701137977H1
gggttgtgaggggtttaagaacaaacacaggcttggggtagttttcaggaggattttgttttatcagacaatagcccaagtctctgggtgagaattttttgattgcctttcancaacaaatttcttgcagacaaccaaaaataagtgttcatttttttggtgcaaacataattcaacacaagaagaaaggngggtatttgtcggcttgattttcaaaccagaagagagtggcctcaacatggnctgaaggg

SEQ ID NO: 49989 - DNA, 253 bp, Glycine max
  Clone ID: 701137978H1
gcaaaagatgctgcttctgtgcagaacaaatggttgttggtgaacatacaatctaccaaggaattccgctcgcatatgcttaaccgggatacgtcggccaatgaagctgtttctcagactattagtaaaactgcatattctggcaggtatatgatgatacaactgaaggcagaaaagtttgcacttattacagactggattcaattcctgtcgtacttgttattgatcccatcactggccaaaagatgcgctc

SEQ ID NO: 49990 - DNA, 255 bp, Glycine max
  unsure (1)..(255): unsure at all n locations; Clone ID: 701137979H1
gnaagatcactatcattatcgctgaacaatgttatttaacaaaagtatcaaccacaaataaaaacaacaacccaacttcccaatcatcgtcacgtccagcaaaatacattcannagcgatctaaaatctgggaacccacattggcattaaaaaccatgaccatacaattttttagagaaatattatgggcaccatgcctcttcaacaatcccctaaacgttgcttaggcatcagcaaacccaagctcggaaagct

SEQ ID NO: 49991 - DNA, 256 bp, Glycine max
  unsure (1)..(256): unsure at all n locations; Clone ID: 701137980H1
gaacttagctctgtttttaattattccttgcattctcttgtattaagatggaagcaactaccatcaccaatgggagccaaaacggttcgttttgcgtgnccacgacgaagggaagcagnganccgnnaacggggagcggcggcagaggcgatgaaggggagccacctggaacgaggtgaagcgcatggtggccgagtancgcaagccggtgggtccngctcggcggagagacgttcaccatcgctcagtgggccgc

SEQ ID NO: 49992 - DNA, 251 bp, Glycine max
  unsure (1)..(251): unsure at all n locations; Clone ID: 701137981H1
gggaatatttgcgtatctgaattacgacgtgaacagagacagacgatanntcttggcaggttctcttcaatggcctcagcagattggagtaccgtggatacgattccgcaggcatcgcgatcgacgattccaatttctctccccttgttttccgtcaagaaggaaacattgaatcgctcgtcaaatcggtttatcaagaagtgggagaaactgaactgaacttgggggaatgcttcggcatcacgcgggaa

SEQ ID NO: 49993 - DNA, 248 bp, Glycine max
  Clone ID: 701137982H1
ggcgcttcatcaagatgggtatttctagggattccatgcacaagaggcgtgccactggtggcaagaaaaaggcttggagaaagaagagaaagtatgagcttgggcgtcaggcagcaaacaccaagtatcaagcaacaagacaatcaggaggattcgtgttagaggtggcaatgttaaatggagggcattgaggctggatactggcaattactcatggggtagtgaagcagttactcgcaagactcgta

SEQ ID NO: 49994 - DNA, 247 bp, Glycine max
  unsure (1)..(247): unsure at all n locations; Clone ID: 701137984H1
gnttctttattaattctctctttcaaatatatggcagaagatgcttcaattattccaacacacacaaaagnccggtactactctgaacatggtagtccaggtgatgttctcaaattagatcctattggcccttaccccaacaactcaaagatgaccaagtgctcatcaaggtcatcgctgcatccattaatcccgttgattacaagaggatgcacggcgagttcaaggacactgaccctcatctgcc

SEQ ID NO: 49995 - DNA, 247 bp, Glycine max
  unsure (1)..(247): unsure at all n locations; Clone ID: 701137986H1
tccaccgtcttgtttacactagtcgccgcattgttcgtaacctccgtccgtggctcagtccccggcgtcctccccagccctgtctccaaagcgcacccccgtgctggccacgccgcagaagtctcttcgccggcgatttctccttccgccgtgtcaccgtcatcctctcctcctgctccgacggtgaacgctccgtctccttcgcntacctccgtcgactgctcngncattttctccgttgtctccc

SEQ ID NO: 49996 - DNA, 246 bp, Glycine max
  unsure (1)..(246): unsure at all n locations; Clone ID: 701137987H1
ggaagttcgnaaaagtatggctgaggatggaggcttgncttcatcacctgttgcttctcagtcttcccagggggttaatgggctaccagaagtcaagaccaatgaagtgcnaaaagaaaacattnggagaagccagaaaagcctgagagcacttcttcccctagagcttcacatacagnaatttcaagtaccgttaagaaacctattggtgctaagaaagcagtgaagagtggggggctcggcgct

SEQ ID NO: 49997 - DNA, 135 bp, Glycine max
  unsure (1)..(135): unsure at all n locations; Clone ID: 701137988H1
gnttatcaggagcagcacccaataacgtgccaccacctgtcacccaaacggcacggcactagtcgttttttcactttaacactcctccaaaaatcaaatctaaaccaaaaaccgttggttaattacacttaaact

SEQ ID NO: 49998 - DNA, 244 bp, Glycine max
  unsure (1)..(244): unsure at all n locations; Clone ID: 701137989H1
gagatccatcgatcaattaatttccaatggccgatcagctcaccgacgaacagatctctgagttcaaggaagcctttagcctcttcgacaaggacggcgatggttgtattaccaccaagganttggnactgtgatgcggtcgcttgggcagaacccaactgaggctgagctgcaggacatgataaatgaggttgatgctgatgggaatggtaccattgatttcccagaattcctcaatctcatg

SEQ ID NO: 49999 - DNA, 248 bp, Glycine max
  unsure (1)..(248): unsure at all n locations; Clone ID: 701137990H1
ggctgctccttctttggtgttgcttatatcatatatagttaagcttaacaacctccattcaaagttaaagatgcctcgtaccagcactctggagtgctccggttgccctccgcttcgcgctctaactttgacgcgcttggtctcatcaaagttgtggaggcccgcgataagcaacgaggagctccccaggtcgtagagnngtggggcgaccctgaatcatccaaatgtgtgatggctgtttcaatgat

SEQ ID NO: 50000 - DNA, 248 bp, Glycine max
  Clone ID: 701137992H1
taaatatggctgacttgttggaatggtcaaagcaagataagaaacgaatgcttcatgtcgtctaccgtgttggtgaccttgatcgcaccatcaaattttacacagaatgtttaggaatgaagctttgaggcaaagagatatcccagaggagaaatatgctaatgcttttcttggatttggccctgaagaatcccattttgttgttgaattaacatataattatggggttacctcgtatgacattggcc

SEQ ID NO: 50001 - DNA, 252 bp, Glycine max
  unsure (1)..(252): unsure at all n locations; Clone ID: 701137993H1
gtatgtttgacatattgttcggttggtccaaagcttccaaatgtaagaaggcgatcaaacgagcccggtgccggctcaggctactcaagaacaagaggcaggcaatagcaaggcaactgagaaaggacttggctgagctaatacanagtggccatgaagaaactgcatttaaccgggtggaacagcttatgggagatgaaagcttaacagctgcgtatgaattgttagatcacttctgcgaatttatcctta

SEQ ID NO: 50002 - DNA, 250 bp, Glycine max
  unsure (1)..(250): unsure at all n locations; Clone ID: 701137994H1
gatctattttccgcatcttggatatctngctaaaagattgaatattgtgttaatcttctagtagtcaaggggaacaatgaccngcacgagcagccaccaacaggnacgtaagngggccgccaggnncnggganggaagcanagcgcnagaaaagtttgctgattccattcagggaaatcaaggttgaatgtaccatacctaaagntgatggcacgttggcaatcttatgttgggttcagggttcaacatg

SEQ ID NO: 50003 - DNA, 253 bp, Glycine max
  unsure (1)..(253): unsure at all n locations; Clone ID: 701137995H1
atttcttcactttgcaaaaccaaaacagattgaattgctattatccaaannnnnnnnnnnnnnnnnnnnnnnnnnagccatgtacaggttttaantttaacgcctgttnttannannagccnaacgatcttcttataaaccctcaaacctcttgtgctgttcgcattccgataaacaaacacgcagatttgaaggaacgaaagaacgaccggccgttttgtttttgtttattaagaatttattggtttgcaag

SEQ ID NO: 50004 - DNA, 230 bp, Glycine max
  unsure (1)..(230): unsure at all n locations; Clone ID: 701137996H1
ctgaagaagaaggccnnaagacagtgaagctannttctaacaaggagcacaaggggacntagnaangncaacgancttcccccaagngangcggcaaanngtctgaagaaaaccagaaggggaaaccggnacccttgaagnacgtccaaantncaaaangnttcgcagctngacaatttttattgaggacaatcagtcaggttcagagatcacaaaagttcagaagatcg

SEQ ID NO: 50005 - DNA, 292 bp, Glycine max
  unsure (1)..(292): unsure at all n locations; Clone ID: 701138001H1
cggaatcggaatctgaaatgagtagtagggtttggtttctactattccttctgctgatctcgaaatgccatcaagtgtggggctcctacgcgggttccgctagctccatcgtcaacccttccaaggtcaaacagatttccnggaagcnaagagtttccgttnagganggtncccccnggttttggnaaggcccccanttngtctttaaaaccaanggggnnntaaaaacnccngccgnanntttccccccgggggnaantttnttttntcnnacnacccntttttttacacc

SEQ ID NO: 50006 - DNA, 282 bp, Glycine max
  unsure (1)..(282): unsure at all n locations; Clone ID: 701138002H1
ttcaagttcgangangganncnanttctnnnancacacgtggcttcagaagacatcaatatcgaaggattcaatgttccacgagacacaattgtgattattaatggttgggccatgcaaagagatcctaagatatggaaagatgcgacaagctttaaacctgagaggtttgatgaagaaggagaggagaagaagttggtagcatttggtatgggaagaagggcttgcccaggagaacccatggctatgcaaagtgttagctatactttgggattatgatcat

SEQ ID NO: 50007 - DNA, 287 bp, Glycine max
  unsure (1)..(287): unsure at all n locations; Clone ID: 701138003H1
gaaaacgcaaaaccctgtttggcgtcgtggccatggatttccaagtcgtcgttctcggcggtggcgtctccaagaagctcatccctctcgtttcgcaggagcttccgaacgcgttgcttccgttggcgaatcgccccgttctctcctangttctcgagtacttggagcttagcaacctcaaagatcctcattgtngtggtcgatagcncnganncggctcttcatgttggggcttggattcgggggcttatgctgatcgcctccanttgaggttgctgcagttccng

SEQ ID NO: 50008 - DNA, 289 bp, Glycine max
  unsure (1)..(289): unsure at all n locations; Clone ID: 701138004H1
aggaagtggacggttgcttccgctctccttcttctctctctcctctttctctttgcagatcaaggtcgaaagtttcaggcgaatgccgagnggagattccgacgagcttgtagatcctccgaaggtggaggacnagatcggtgctgtgcctcatggcctttccaccgattcagatgtcgtcaagagggagtcggagtcgatctcgaagagatctctccggagcaatgcggagaagtttgagttccaagcggaagtgtcacggcttatggatattatcatcaattctctc

SEQ ID NO: 50009 - DNA, 287 bp, Glycine max
  unsure (1)..(287): unsure at all n locations; Clone ID: 701138006H1
ctcgcannttctctcggtcgcaagtcgcttataacaatagaggnnacaactccaataatgaaaggcangactctggttatgggggcagatggngttctaataatacaaaggnctcggatgntggtttaagcaattttccaggggccaaggttcanaattctcctggaanggnngctnttcctggnggntggngtggtggtggtngaatcngtcgagnnagtagncattngcgacanngaantgttgggnccantaacagngagnatagtncgctgnggtancaatcg

SEQ ID NO: 50010 - DNA, 278 bp, Glycine max
  unsure (1)..(278): unsure at all n locations; Clone ID: 701138007H1
cgtgaggagaatatgaagttgtttgttttctttgttgctgcagtagttttggtagcatggccatgccatggcgcaggctaccaaaggttccctctccgaatgaaaactggctatggtgagcgttcttcggaggtaaaatgcgcaagttttaggcttgctgtggaagcacacaacatccgagccnttannancattcctgaagagtgcgttgaaccaacaaaggactacattaatggcgaacaatttagatcagactctaaaacagttanccancaagc

SEQ ID NO: 50011 - DNA, 182 bp, Glycine max
  unsure (1)..(182): unsure at all n locations; Clone ID: 701138008H1
gntgtccctcttaggcactttcttgttttctctctcaccctcatatccatcatccttccacactnatgganncgtgctctgagcaatcaataatcaagttacnnacagaccaaccaagggtagaganactgacccngntganttntttntacnngngnatttgagaggnaantnnntaaagg

SEQ ID NO: 50012 - DNA, 282 bp, Glycine max
  Clone ID: 701138009H1
ggaaatggactcaaaccagaataagtcaatcatggatcaagggtttgaaatttattctagtgctgaaggtaatacggccaattgtaaacttccgttcacacaaaatggagatgtctttgagaaaacacatcctggagttctttgggatgtttttcgccggcaggatgttccaatattgactaaatatttgaaaaaggtccatttttgagattggaaacacagacccattggcacagttgaggaatccctgaaaccagaatcatatttggacaatggggttta

SEQ ID NO: 50013 - DNA, 282 bp, Glycine max
  unsure (1)..(282): unsure at all n locations; Clone ID: 701138010H1
acttcgtatgcaactcctgggtttacaattcaaaaaactacaagaannntcgcattttctttgccaacaatacatatcttccaagcgaganaccannnnnanttttgaagtacagngnagaagaattgaagaatgtaagaggggatggaactggagagcgcaaggaatgggataggatctatgattatgatgtctacaatgacttgggcaacccggatagcggtgataaatatgcacgccccgttcttggtggttcagccttaccttaccctcgcagagaag

SEQ ID NO: 50014 - DNA, 280 bp, Glycine max
  unsure (1)..(280): unsure at all n locations; Clone ID: 701138011H1
tacctctcccttcaagatgcagatcttcgtcaagaccctcaccggcaagaccatcacccttgaggtggaaagctctgacaccatcgacaacgtcaaggccaagatccaggacaaggaaggaatccccccggaccagcaacgtctcattttcgccggaaagcaatcgcnggacggccgtacccttgctgactacaacattcagaaggagagtactcttcacctcgtcctccgtctccgtggtggcatgcagatcttcgttaagacactcaccggcaagacc

SEQ ID NO: 50015 - DNA, 277 bp, Glycine max
  Clone ID: 701138012H1
gctcccaagggtttaacctttctggctgtgttaatatgcgtttcagcactgtcactgagtccttctgttgcgggggaagggcaaaataatggccttgttatgaacttctacaaggaatcatgccctcaggctgaagacatcatcacagaacaagtcaagcttctctacaagcgccacaagaacactgctttctcctggctcaggaacatcttccatgactgtgctgttcagagttgtgatgcttcactgttgctggactccacaagaaggagcttgt

SEQ ID NO: 50016 - DNA, 279 bp, Glycine max
  unsure (1)..(279): unsure at all n locations; Clone ID: 701138013H1
tgcgcatncccatcatancatcnnctcacacgcatacataacataattaacaccatgatcaggacccttgaattttcctccccttgtctatgatcgaggaagaaaatctgtaatatattatgcaaaaaataattaaggtcttttcctttaaatgggctggttcaatgaaccgagaccactgcaggttcatggggatgggaggattaagaggctatgttttttaatcttccgatgttactgttgtttttttttaatttcaataaggatattatatatgta

SEQ ID NO: 50017 - DNA, 282 bp, Glycine max
  unsure (1)..(282): unsure at all n locations; Clone ID: 701138015H1
cncaaacgaagaaaaaagactgagagcaattgcatcaacaacaaattgaaaggatgtcgatcttcgagtacaacggaagcgccgtggtggctatggtcggcaagaactgcttcgccattgccagcgaccgaaggctcggcgttcagctccaaaccatagccacggatttccaacgcatttccaagattcacgacaagctcttcatcgctctctctgggcctcgccaccgatgctcaaacattgtatcagcgtcttgttttccggcacaaactgtatcagctt

SEQ ID NO: 50018 - DNA, 287 bp, Glycine max
  unsure (1)..(287): unsure at all n locations; Clone ID: 701138017H1
gaatttccaagacgcatcaaaatgcatgagaattgaagtgtactagttaatcatactcaactagaggagaggctttgatctactgttttcccatcctcagttgccttggtcaccttatatgaatcaaacatttacacaatgagtaacaacttcagcaagtatgaaactagagaagaggctttcattaggaagagcatgaaaaaaataantgagtatagtgtgttagnggtatnttngaacangggggtttttnaaatgntatnnncnnnggnnaangngggtttctc

SEQ ID NO: 50019 - DNA, 290 bp, Glycine max
  unsure (1)..(290): unsure at all n locations; Clone ID: 701138018H1
cnctngtgggcttcaagagctgcctcttacctgaggatctctgtgtttcacagaggcttttctaatgttgttaaagatttgaagtatgctgattctcatgagtgggtgaaagttgatgaaaattctncaaccgtcggcctaactgatcctgcccaagatcatttaggtgatgttgtatatgttgaattgccagaagtgggagcagctgtaacacaaggaggtagttttggtgcagttgaaagtgtgaaggcaactagtgacattaactctcctgtttcaggaaaagttgt

SEQ ID NO: 50020 - DNA, 275 bp, Glycine max
  unsure (1)..(275): unsure at all n locations; Clone ID: 701138020H1
aacccttctctctgtgattaagagaatggcttcagatcggaaacttcacacttttgangaggtggcaaagcacaaccagaccaaggcttgctggcncatcatttctggcaaggtgtatgatgncaccccnttcatngccatgganncggnacntnanccggttttgttatctgcaacagggaaagatgcaaccantgactttggngatgtcgggcacagngatccnccaggtnccagcacaggaagnctcccctatgccattatgancacngcat

SEQ ID NO: 50021 - DNA, 282 bp, Glycine max
  Clone ID: 701138021H1
ctcctccttcgtcctcgtcgtgtttctctctgttctgattcgagatccgccatgtccatgctccttcagattctctctcctcctccctctcttcctctctacggcctttgcttccgagtcagatcataggtatcaacaagatgacccagttatcctttgggtgaacaaagttggtccttacaacaatccacaagaaacgtacaattattacagcctaccattttgccgttcacctggtaatcctgcacacaaatggggtggtcttggtgaggtcctgggtgg

SEQ ID NO: 50022 - DNA, 275 bp, Glycine max
  unsure (1)..(275): unsure at all n locations; Clone ID: 701138023H1
ttgcgggcaaatcaaaaccctattcgaattctccattcactccgtttaagctttttannnnnntggctacaccattggtggcagggattgcagtggcggctgcnncttatgctggtagatatggtatccaggcttggcaagcattcaaggctaggccaccgagtatgcgaaaattttatgaaggtggtttcccggctaccatgactaggagggaagcagctctatactgggtgntagggaacgcantccancagataagattanagaagcanata

SEQ ID NO: 50023 - DNA, 285 bp, Glycine max
  unsure (1)..(285): unsure at all n locations; Clone ID: 701138024H1
cgggttcattattgttggcgatgatgactcataaatcacaatcatgatgagtagttgaaatcgataagnganaaaaagttcggtagtngannnnggngnngaagcgctataccagcagcagcattttcttttccatttccaacatcaacagcgagnganaggatcatcgatcatcatgtcgttttcgtttttcaaggctttgaggcctaaaacgccgcaagaggtggccaagtcccatcaaggagagtctcatggccctcgataccaaaaccgttgttgnagtta

SEQ ID NO: 50024 - DNA, 112 bp, Glycine max
  unsure (1)..(112): unsure at all n locations; Clone ID: 701138025H1
agatggcttcacgcagggctccgtatcttcctctgattcgatcctcccttcgtagatctccaatncgaagccctcaatttcccancacaacanancgntntttcnagnacnc

SEQ ID NO: 50025 - DNA, 279 bp, Glycine max
  unsure (1)..(279): unsure at all n locations; Clone ID: 701138026H1
cnacccctttagtgctcttcctcctcttcaccatagccaaagggcttcacaaccccaaatgtgatgctacccatcaacatgaccatgatggctcaaccctccaagtgttccatntgttcagcgcatgttccccatttaggcnctnaaagccaatgtcatgggaagagngtgtcgtaaagctanaagctanggaccaanccaggatgcaggactntctagcttggtggctatgaagtnnattgtcccaattgcctcagggagcaagtcacanaangtcnt

SEQ ID NO: 50026 - DNA, 282 bp, Glycine max
  unsure (1)..(282): unsure at all n locations; Clone ID: 701138027H1
ctcaatttcaatctcatccacatctcaaaatctcnaatcaaaaatccgaatattcgaatttcaccgcttcgaaaccctttctttatcgccaganaattttcaaaccctaaaatccgaatttcgctgatgatctttcctaatcgtcatcataccaaacaatttttcttcatatctgtctccgggagagtcgctttgacgggaaacaagggttttcgctgcaattctaatcggtcaaattggaatcgtcggatcaatttgtcatgaagttcctggagtgttctg

SEQ ID NO: 50027 - DNA, 278 bp, Glycine max
  Clone ID: 701138030H1
gctcgaagaccggtggtcccttcggaaccataaagcacccctccgaactcgctcacggcgctaaacaacggtcttgacatcgtgttaggcttttggagccactcaaagcggagtttcctattttgagctacgccgatttctaccagttggctggcgttgttgccgttgaggtcaccggtggacctgaagttcccttccatcctggaagagaggacaaacctgagccaccaccagagggtcgcttgcccgatgccactaaggttctgaccatttgagag

SEQ ID NO: 50028 - DNA, 253 bp, Glycine max
  unsure (1)..(253): unsure at all n locations; Clone ID: 701138033H1
tggatatgaaggtcaaggttaaagacaatccaaacctggatgaatgtgttttccacatcgttncttgatggttataatgcccctgtaactgctggaaattttgttgatttggtagaaaggcacttctatgatggcatggaaatccaaagagcggatggntttgttgncaaaanggtnctnccngaagncccggnggggtttttntncccccnnnnnanaaaaaacncggncannnntttnnnnngggggggng

SEQ ID NO: 50029 - DNA, 290 bp, Glycine max
  unsure (1)..(290): unsure at all n locations; Clone ID: 701138034H1
acctctcacacttcaccttcttcttctttattccttgctcttcaatggcttccgatccttgagcttaaggccaaagaggctttcgaagatgataactatgatctcgcctacgacctcttaactcaggccattggtnncagccccaacaacgcagacctatatgctgaccgtgcgcaagtcaacatcaaagtcaacaacctcaccgaggctgtttctgatgcaaacaaggcgattgagttgaatccttctcactcaaaagcatatttgcgaaaaggtaccgcatgcatcaa

SEQ ID NO: 50030 - DNA, 103 bp, Glycine max
  unsure (1)..(103): unsure at all n locations; Clone ID: 701138035H1
tgagcataggtggaactactactttactctcaanagctgtaccannagccanngntaaagttttttcanncaacntctgcatcgcagnagttcttganngaga

SEQ ID NO: 50031 - DNA, 287 bp, Glycine max
  unsure (1)..(287): unsure at all n locations; Clone ID: 701138036H1
ctggcacttcgttgcttggtgatgtccctttctgttctcttcactcttggtcttgcgagagaaagccatgccagagacgaagatttttggcatgctgtttggccaaacactcccattccaagttcattgcgagatcttctaaagcctggccctganagtgtngaaatcgatgatcaccctatgcaaattgaagaaacacagtacccgaaaaccttcttctataaagaagaccttcatccaggcaaaacaatgaaagtacattcagcaagcctccctttcaacaacca

SEQ ID NO: 50032 - DNA, 286 bp, Glycine max
  unsure (1)..(286): unsure at all n locations; Clone ID: 701138037H1
gncgaacgctgacgagtgtgtgttggtcctgttggatggatgttcattttccaacttgataccgcgttcgctcactctcaactcaacttcaattaatcaaatcccacactttctctctctttccttcaaatctcaattctattttgcaaaatctgaatcaaacacagttaaagacgcacaagaaaacatctcgctcaacaccaccaacacttcggatctacgtttccactctccgaacatcaaaaaaggaaagaaaaaccgatttacagcgacaacaagaacgaag

SEQ ID NO: 50033 - DNA, 283 bp, Glycine max
  unsure (1)..(283): unsure at all n locations; Clone ID: 701138038H1
cttcactttctctcgtttcaatcgaaaccaaaacaaaaacatgggcagaaaattcttcgtcggtggcaactggaaatgcaatgggaccactgaggaggtaaagaagattgntactactttgaatgaggctaaagtccctggagaagatgtcgtagaagttgttgtgagccctccttttgtgttccttcctgttgtaaaaagtttgctgcgccctgatttccatgtttcggcacaaaactgttgggttcgcaaaggtggtgctataccggtgaggttagtgctg

SEQ ID NO: 50034 - DNA, 287 bp, Glycine max
  unsure (1)..(287): unsure at all n locations; Clone ID: 701138039H1
agcgatctcatacatctcattcgttcattctctccgacncattaaattaaacctgttttttttgttttgttgtgttctcttcgaaagcggaatcaatcaatccctcatctcattgctgagatctgcaagctggctatggactacgaaccctacgacagtagcggaactgatgatgaccttccaccaacccatcaaacncagaatttccaggggaggaggaggacgtctcgctgggaatgggagatctgctgttggttcaattccttacccaaggatgtatggtgaaa

SEQ ID NO: 50035 - DNA, 280 bp, Glycine max
  unsure (1)..(280): unsure at all n locations; Clone ID: 701138040H1
tgaattgctgctaactttcattcttgtattctttttggtttttagtttcaggatgctggnagttcatgctcacactgagttcctgcagggctgctcgattcatcaacggtggacgtgcgatcttgacaggttctccggattgcttaatactggctacagatgggcaagaacatcacggtggtgaaaatcatcgagccatcagcgagcgaggttcgtgaagcaactgggtttggaaccactttcatgatggacaatgttttgaccgagggtccagagctga

SEQ ID NO: 50036 - DNA, 216 bp, Glycine max
  unsure (1)..(216): unsure at all n locations; Clone ID: 701138041H1
tcaggttgggaattagtggcnttnnctggtcaccatgttccttcttagaaggcaaacccagaatcaccatgagaatgattcctcatatcaagatacanaggtggctgaactcaagacagctcttgggcccctctctggtcgtcaattaaagtattgcacagatgcatgtctaaggagatatttagaagcaaggaactgntgtgttgataaaaccca

SEQ ID NO: 50037 - DNA, 279 bp, Glycine max
  unsure (1)..(279): unsure at all n locations; Clone ID: 701138042H1
aacatttccagcagcagaagccatttgtccatgccagcactcntacatccaccacccagtcagccacaggtccagtgccagtttcatcatannacccagtttatgccccaccacaacctcaacaacttcaccctccaattggtcaacaacagtacccagtttatgtaatgccagttggacctacacaagtaacacaaccctacaacatggcattgcagcccaatatagctgatcctaatgtggtagcttcaagcaggtcattaatgccacaaagtattg

SEQ ID NO: 50038 - DNA, 275 bp, Glycine max
  unsure (1)..(275): unsure at all n locations; Clone ID: 701138046H1
aacagttgattgtnngtagccatggctgcagcagccaccgcgaaaccgcttctgtcactgtggtttatgcttctgctaccgtcgtttcttcggatcgccgtcgcttaccgacccggcgacatcgttcccatgagctgcatgggtcaataccactcctcgcgaaccgtgtggcaggacctcattggccgccantgccccatcttcgccgtgaatcgcgaggtgttgatgcccatacccaagcccacgggttacactggtgctgatgcttatnaaat

SEQ ID NO: 50039 - DNA, 284 bp, Glycine max
  Clone ID: 701138048H1
catgaatgtcaagggtttgactctgtttcatttgaagagtcatcttcagaaatacaggcttggtaagcaatctgggaaggatgtgggtgaaggatgcaaagatggttcatatcttttagaaagccctggcgctgataactcatctccaaagttgccaacttcagatacaaatgagggttatgaaatcaaggaggcattgagagcacagatggaagtgcaaagtaaattacatttggcaagtggaggcagagaagcacttgcagattcgccaggatgcagaaagg

SEQ ID NO: 50040 - DNA, 284 bp, Glycine max
  unsure (1)..(284): unsure at all n locations; Clone ID: 701138050H1
acatcatatcataaaaggggagattttagatccattatggaggggtcagatgggtttatcagtagatgaacagaagaaaaagcaagaacagcggcttctgctgaatgacttaagaaacttagaagacaacactcaagattttgttagctgctgccaatcaagtggagttggctgctgccaatctaacggaggagactcttttttccgtncagaatcatgtgttattggacaggagaatggaccccgatgttattgagtcagaggcaagctctcagcagatatag

SEQ ID NO: 50041 - DNA, 284 bp, Glycine max
  unsure (1)..(284): unsure at all n locations; Clone ID: 701138051H1
gaagttcatgaattctctcttttccccaaccaatttgttttgttgctgaataaattagttctgtcctggcaaaggttgttgagtctctctagtgctggaaaattttgtggtgattcatgattttctttttanctgaggaccttcaattttnnttttgtgcattgatggntgtctcacaatcacaaatctagtctccaaaattggtgatttcacaggggtgtgctgttaactttcctgtttgtttcatcttcaagctcaattctggttctgggtttatctttact

SEQ ID NO: 50042 - DNA, 284 bp, Glycine max
  unsure (1)..(284): unsure at all n locations; Clone ID: 701138052H1
ttgattccagcaatcccagctcatcctcttctcacagatgacgattatccacaaatacgtggcgcttttaccaatttgcaatgtgtgggtcactccatacaataggactgagaagtgggctggtggactctacgttgatcacanncatggagatgatactttagccgtttggaccaaaaagaatagagacattaacaacaaggacattgtgctgtggcacgttgtgggaatcatcatgttccagcacaggtagacttccccatntgccantattgagcatgnat

SEQ ID NO: 50043 - DNA, 283 bp, Glycine max
  unsure (1)..(283): unsure at all n locations; Clone ID: 701138053H1
cgtgaggagaatatgaagttgtttgttttctttgttgctgcagtagttttggtagcatggccatgccatggcgcaggctaccaaaggttccctctccgaatgaaaactggctatggtgagcgttcttcggaggtaaaatgcgcaagttttaggcttgctgtggaagcacacaacatccgagctnntaaaaccattcctgaagagtgcgttgaaccaacaaaggactacataatggcgaacaatttagatcagactctaaaacagttaaccaacaagcttcttt

SEQ ID NO: 50044 - DNA, 284 bp, Glycine max
  unsure (1)..(284): unsure at all n locations; Clone ID: 701138054H1
cnctcaaatcactgaaccagccatggctaccttctccaaggaacgcgattactttgtatacgttgccaagttagctgaacaagctgaacgctatgatgaaatggtggaggccatgaagaaggtggcgaactggacgttcngttgagtgtggaagagaggaacctgttctctgttgggtacaagaatgtgctggggtcacggagagcttcatggagaatcttgtcatcgatagagcagaaagaggattccaaagggaatgagttgcatgttaagcatatcaggga

SEQ ID NO: 50045 - DNA, 280 bp, Glycine max
  unsure (1)..(280): unsure at all n locations; Clone ID: 701138056H1
ctctcccttctctttctctctgcgacaccagatgatggagacgacggcgaacgaanacgctgtcgttgcgccaatcgcggcgttgttgttggtggtgctactcgcggcgagtgtggtggtggaggctcaggagaactcggacgtgaagacgctggtgaagcacatgcacgggaagaagtactgcgacaaaggatgggaatgtaagggctggtcaatttactgttgtaacctcactattactgattatttccagacctaccagttcgagaatctcttctcc

SEQ ID NO: 50046 - DNA, 277 bp, Glycine max
  unsure (1)..(277): unsure at all n locations; Clone ID: 701138057H1
cnccganccgnnttcggcnnantgttggcggtgttcataactcgtaannnaacaaanctcatcgantcgaagtccttcattnnaattctcncncttnncactgatcgtcatgtacagagttgcagcatcatcattcagaaggcatctcaagggccatggaggtaacagggatccactaggttttcaacttcagccgcggtagtgcaaggacttcatcaggtggtttgtttagctggctactggagagcgttctagtgctcttcctcctcggacagcc

SEQ ID NO: 50047 - DNA, 279 bp, Glycine max
  Clone ID: 701138058H1
gaatttgaaggacgatgagttccacagaggtcgcagccacaacgaagaagggtggaagagggaaacccaagaccacaaagtccgtttcccgttcctccaaagccggccttcagttccccgtcggccgcgtcgctcgctacctcaaggccggtcgctatgcccagcgcgttggttccggttcccctgtttacctatctgcggttctcgaataccttgccgctgaggttttggagcttgccggcaagctgcgagggacaacaaagaagacgaggatcgttc

SEQ ID NO: 50048 - DNA, 277 bp, Glycine max
  Clone ID: 701138059H1
cttgtctcaaagattaagccatgcatgtgtaagtatgaactaattcagactgtgaaactggcgaatggctcattaaatcagttatagtttgtttgatggtatcttctactcggataaccgtagtaattctagagctaatacgtgcaacaaaccccgacttctggaagggatgcatttattagataaaaggtcaacacaggctctgccgttggctttgatgattcatgataactcgtcggatcgcacggcctttgtgccggcgacgcatcattcaaat

SEQ ID NO: 50049 - DNA, 275 bp, Glycine max
  unsure (1)..(275): unsure at all n locations; Clone ID: 701138060H1
gaggcatcaccattgccacaatggttaaaggtcgccaaggagaacgtgtaagactctacgtcaggggttcaattcttggatacaagaggtccaagtcaaatcaatacccaagcacctccctaatccagattgagaatgtaaactctaaggaagaagttgcgtggtactgtgggaagcgcatggcttacatctacaaagcgaaggtaaagangaacggaagccactatcgctgcatttggggtaagtcaccaggcctcatggtaacagtggtatag

SEQ ID NO: 50050 - DNA, 275 bp, Glycine max
  Clone ID: 701138061H1
gagggagccgtagcagcggaagctctagcttgggtagcgaatcacaatggcgagaggattaaagaagcatctgaagaggcttaatgccccaaagcattggatgcttgacaaactgggtggtgcatttgctcctaagccctcatctggaccacacaaatcgagggaatgcctgccactcatactcattttgcgaaaccggctgaagtatgctctaacataccgtgaagtcattgctattctgatgcagcgacatgtccttgttgatggcaaagtca

SEQ ID NO: 50051 - DNA, 280 bp, Glycine max
  unsure (1)..(280): unsure at all n locations; Clone ID: 701138063H1
cnagctcagcacgcagaggagcagaagcctaagccttcaacatggcgagagggttgaagaaacacttgaagaggctcaatgctccaaaacactggatgcttgacaagcttggtggggcctttgcaccgaagccatcatctggaccccacaagtccagggagtgtcttcctttgatcctcatcctacggaacaggctaaagtatgctctaacatatagagaagttattgccatcttgatgcagcgccatgttcttgttgatggcaaggttaggacagacaa

SEQ ID NO: 50052 - DNA, 262 bp, Glycine max
  unsure (1)..(262): unsure at all n locations; Clone ID: 701138067H1
gnaggcctgctcttgctttgcttccacttctatttgctttcacgttagctgccactacagacncaagaaaagatacangggaatattggaaaatgatcatgaaagatcagganatgccaganggacttcaaggtcttgtntcatttcaatctgaaaataanccnaagactcaagancagcttggtaaaggttccataaaccatgtgaagngtctcnagttacnaatananganttaatagtgacttcgaaccnntaccaagt

SEQ ID NO: 50053 - DNA, 282 bp, Glycine max
  unsure (1)..(282): unsure at all n locations; Clone ID: 701138068H1
anaacccttctcnctgtgattaagagaatggcttcagatcggaaacttcacacttttgaggaggtggcaaagcacaaccagaccaaggattgctggctcatcatttctggcaaggtgtatgatgtcacccctttcatggaggatcatcccggaggtgatgaggttttgttatctgcaacagggaaagatgcaaccaatgactttgaagatgtggggcacagtgattctgctagagatatgatggaaaaatactacattggtgagattgatgcatcaaccgtc

SEQ ID NO: 50054 - DNA, 285 bp, Glycine max
  unsure (1)..(285): unsure at all n locations; Clone ID: 701138069H1
caatcttcgccttcgcccacaacaactcctncctnaaggatcgctgccaacgttactttccatttttacccttcatcctcgagaaaaaaatggcgaacgcagcatctggtatggccgtccatgatgagtgcaagctaaagtttctggagctcaaggcgaagaggacgtaccggtatatcgtttttaagattgaggagaaatcgaagcaagttattgtggagaagctgggtgaccctgcaaatggctatgatgaattcgctgccagtctcctgctgatgagtgtcg

SEQ ID NO: 50055 - DNA, 283 bp, Glycine max
  unsure (1)..(283): unsure at all n locations; Clone ID: 701138070H1
aactatnactggtgtgagcctttcatgccccagggttttcttcaacgcatcagcctcanngcaaaacgcgcatnctgtaaagttctcanttccacacancananaannntnnnccgggtagtatcaagttgggtcgcgtgatgaggatccganccgttcgcgctgcgnctgancgcatatcggagaaggtggaggagagcataaagaacgcgcaggaggngtgcgccggcgatnagatgagcggcgagtgcgtggcggcgtgggacgangtgganganctgat

SEQ ID NO: 50056 - DNA, 282 bp, Glycine max
  Clone ID: 701138071H1
gatcatagtttcacttcggccttatccagtttagggtttcggttctctaccctatctttcacgtatccgaaaccttaaatttacgatcaggtctgagcaatctggttggtagaacctttggtcttagtgagtcaagttttatgtctgaattagacgatcaaattcctactgccttcgatcctttgctgatgcaaatgctgatgactcgggtgctgggtcaaaggagtatgtgcatattcgtgtacagcagcgaaatggtaggaaaagcctgacaaccgttca

SEQ ID NO: 50057 - DNA, 274 bp, Glycine max
  unsure (1)..(274): unsure at all n locations; Clone ID: 701138072H1
ggcttggactgcctggaaacggaggcactgaagaagtgctcatcaggaagaggggtttctctgagactgaaactggtcatgaagatgagtctgccaccactgtggatttgatgcttaatctttcttctaaggagnnnnnnnnnnnnnnnnnnnnnnnnnnnnnnnnnnnngataagcacaagactttgcctaaggagaagacccttctgccagcagatcctgctaagcctccagccaagacgcaggtggtgggttggccacctgtgcggtcctc

SEQ ID NO: 50058 - DNA, 207 bp, Glycine max
  unsure (1)..(207): unsure at all n locations; Clone ID: 701138074H1
agcttgtttaagcttttcttccattaacatattatcnnaatgtgtggtattcttgctgttcttggttgttctgatgactctcgagccaaaagggtccgcgtgcttgagctctctcgcagattgaagcaccgtggccctgactggagtgggctccatcaacatggtgactngctttttggcacatcaacggttagccatagttgatcc

SEQ ID NO: 50059 - DNA, 135 bp, Glycine max
  unsure (1)..(135): unsure at all n locations; Clone ID: 701138076H1
ctcgagnggnnntgctaccttctaggggaaaaatggttannttcaggttttcancagtnacaaggtggntgggagggctgttcccacggaagcagatcagcaccnnnaagatntacngaatgaagctctgggnna

SEQ ID NO: 50060 - DNA, 270 bp, Glycine max
  unsure (1)..(270): unsure at all n locations; Clone ID: 701138077H1
ctgatggatatacggttcttgatgtgcgggacaaaaatcagtttgagccgagctcacatgcanatcttgttctcatgtgnctctttttgttgaaaacaaagacaatgatcccggtactattataaaaaggcagctgnanaataatttttctgggttgttctatgggttaccattcactaagcctaataaatccattgtagtctttcttgattttgtnctcgtgactcattatggcnttatgcatgtagcataattaaggaagtgtgatta

SEQ ID NO: 50061 - DNA, 128 bp, Glycine max
  unsure (1)..(128): unsure at all n locations; Clone ID: 701138078H1
gtgacttgtatccaaggttagattaggccgtgattaattaaagaaganaaaaggtgctcaagtttttattttatctgttgtcggagtgaatagctgttaataaaactcacatggtagagtttctcgtg

SEQ ID NO: 50062 - DNA, 271 bp, Glycine max
  Clone ID: 701138079H1
aagctcttggtcattcatttgctagctccaataatgggttctagcagattgtcattcattttagcacttgtgcttgtaacattttcattcatcatgatcattgactcaagggttgcagaggcacgtaccctgccaaaatcagccttattgccttccaaagtttatatacctactgttcctcttcctactctgccattactgccaaaggaagagttgccgttccagtccctccagtaactgtgcctgacctaccaattcctgaagtacctaa

SEQ ID NO: 50063 - DNA, 171 bp, Glycine max
  unsure (1)..(171): unsure at all n locations; Clone ID: 701138081H1
cacttcatggtaatctaggatctagcccctgcatatctgttgagataaagccnaatgtggatttattcctctncaaggtgatcgactcgtgatatgtgaggacaaagagcgtgtggantctcaggtctgnnagagatgacangcatccnagtnatantantgngtaganta

SEQ ID NO: 50064 - DNA, 285 bp, Glycine max
  unsure (1)..(285): unsure at all n locations; Clone ID: 701138082H1
cgatcatcacttcacttcactaatacatcatggcagacgagnccccagaacaagtatgagagctctgaggttgaggtccaggatcgtggtgtttttgactttctcggtaagaaaaaggatgaagaagacaagcctcatcctcaggaggnggtcatcgccaccgagtttcaaaaagtcactgtctcagaccaaggagagaacaagcacagcctcttagaaaagcttcaccgatctgacagcagctctagctcttcaagtgaggagggaggngaagatggagagaaa

SEQ ID NO: 50065 - DNA, 70 bp, Glycine max
  unsure (1)..(70): unsure at all n locations; Clone ID: 701138083H1
gtgcatggcaactgaacngaatgagngnacacaaaggaanacnnttgtngttagaaaggnatgttttggg

SEQ ID NO: 50066 - DNA, 277 bp, Glycine max
  unsure (1)..(277): unsure at all n locations; Clone ID: 701138084H1
cgaacctcaaacctcagacagaaccaaaaacacacttcttctcttcttccatncctctaacgctatcagcatcaacacagtgtcacatccattaacgtgctatggtgtttagttaggaaacaccggtggtaaaattgtacgaagcagaaagaacatggctccgtctagcaaggctgagaaaaaggctgccgtggatgcagctgcatggatgttcaatgttgttacatctgttggaatcatcattgtaaacaaagcttgatggcctcttatggcttca

SEQ ID NO: 50067 - DNA, 278 bp, Glycine max
  unsure (1)..(278): unsure at all n locations; Clone ID: 701138085H1
acacttgaagaaggtgaaacagccagaagctagattcatcaagattcaagctgcttatgaattgcttatagatggagagaggcgaagacagtatgatatggataactgggtcaaccccatgaaggcatctcaggcatggatggagtggcttataaaaaagcgaaaagctttcgatcagcggcgtgatatggcaattgctgcttgggctgagcagcaacagcgcgagtaaatctcgcgtgcgtcaatttctcgttcaagnttgntccagtgnannannc

SEQ ID NO: 50068 - DNA, 282 bp, Glycine max
  unsure (1)..(282): unsure at all n locations; Clone ID: 701138086H1
gagancanntgttantcacgcnangccatnggnncaatgaatggtttntgagcannngcagttaaaagagaaaagggattcagcgaagatgacatcggttggtgtggcaccaacttcgggtttgagagaagccagtgggcatggagcagcagctgcggatagattgccagaggagatgaacgatatgncaattagggatgatagaganatggaagccacagttgttgatggcaacggaacggagacnggacatatcatgtgactaccatgngggtagaaatg

SEQ ID NO: 50069 - DNA, 282 bp, Glycine max
  unsure (1)..(282): unsure at all n locations; Clone ID: 701138087H1
tcgatcatcacttcacttcactaatacatcatggcagacgagacccagaacaagtatgnngagcncctgaggttgaggtccaggatcgtggtgtttttgactttctcggtaagaaaaaggatgaagaagacaagcctcatcctcaggaggnggtcatcgccaccgagtttcaaaaagtcactgtctcagaccaaggagagaacaagcacagcctcttagaaaagcttcaccgatctgacagcagctctagctcttcaagtgaggaggnaggagaagatggag

SEQ ID NO: 50070 - DNA, 274 bp, Glycine max
  unsure (1)..(274): unsure at all n locations; Clone ID: 701138088H1
atggtgaacgttccgaagacaaagaagacctactgcaagagcaaggngtgcangaagcanacgctcccacaaggtccacccaatacaagaagggcaaggacagcatcgccgntcatggaaaangccgttatgnccgcaaacagtccgnttangtggncatactaagcctgttttccnnacgaaggccaaaaccatatgaanattgtgntgaggctccagtgtcanggatgntncnatgtctctngcacgctatcatnngtgcatncttntgaga

SEQ ID NO: 50071 - DNA, 273 bp, Glycine max
  unsure (1)..(273): unsure at all n locations; Clone ID: 701138089H1
gcatcacaaatcttttttgtctctctctacttttntgcnttctttcttcttctgtttatcgcatcgcgtattggttggtcgaaaaacnncgagtgtgtgttgtgtggtttggtttggtttttcacttttcttcatctttttgcgagaagacacacacacagagagagatggctacgacgaggattgaggcagagaagaagccgaagacgaagatcgtgtgcactctgggccccgcatcacggtcggtcccaatgatcgagaagctctgcgagc

SEQ ID NO: 50072 - DNA, 278 bp, Glycine max
  unsure (1)..(278): unsure at all n locations; Clone ID: 701138090H1
gtgcnnngatgatgagntncatagaggtnncagtcatnaangaagaagggtngaagaggganagnnangacnangangancgttanccgttncctgccaaagccggccttcagttccccgtcggccgcgtcgntcgntacctcaaggcnggtcgctatgnacagagcgttggttccggttccnntgtntacntatctgnggntctcgaataccttgncgctgaggttttggagcttgccggcaagctgcgagggacaacaagaagacgaggatcgttc

SEQ ID NO: 50073 - DNA, 272 bp, Glycine max
  unsure (1)..(272): unsure at all n locations; Clone ID: 701138091H1
tttcgaagagcttaacatggacctattcaggaagtgcatggagcccgtggagaagtgtttgcnggatgctaagatggacaagagcaccgtccatgatgttgttcttgtcggtggttctactaggattcccaaggttcaacagttgttgcaggacttcttcaacggaaaggagctttgcaagagcattaacccagatgaagctgttgcctatggtgcagcagtgcaggctgccattctcagtggcgagggtaatgagaaagtgcaggatcttc

SEQ ID NO: 50074 - DNA, 210 bp, Glycine max
  unsure (1)..(210): unsure at all n locations; Clone ID: 701138092H1
aacctttctggctgtgttaatatgcgtttcagcactgtcactgagtccttctgttgcgggggaagggcaaaataatggcctgttatgaacttctacaagaatcatgccctcaggctgaagactcatcaagacatcagttttaaaggcnagaangttctctgctagacactcaganggtgtaatggagtangtgtgncnagagactgcnaa

SEQ ID NO: 50075 - DNA, 253 bp, Glycine max
  unsure (1)..(253): unsure at all n locations; Clone ID: 701138093H1
cgtgggtggtggcgagactcacanacgtgcttcgtttacggacantctgttagccgatgaggttgtccataccctattgaagcgcgtccctccaaccgcacccgccatccttcacgactatcacaggtttaagatcaaaggtcgcgtttatcccgctattctccccgtccaaaacaacaaagttaatggcagggtgcttcttggtatctccggagtagaactagatatcttagatgagttcgaggatgttgaa

SEQ ID NO: 50076 - DNA, 269 bp, Glycine max
  Clone ID: 701138094H1
ttttaactcctttcgcctttctattcccatctctttcaaacttcagatctatttcttcatcggttgttccaagtaaatggcctcgtcaccactgctgaagtgtgtgatgcgaacccccagttaattttgagtggggagcttcgtgcccttcagccagtttttcagatttacggtcgtcgacaggtcttctctggacctatagttaccttgaaggtgtttgaagacaatgttttggttcgtgagttcctgaagagaaaggcaatggaaga

SEQ ID NO: 50077 - DNA, 278 bp, Glycine max
  unsure (1)..(278): unsure at all n locations; Clone ID: 701138095H1
tcgatctttattctccgtttccgtttccttcccggaattcgatttttcatctctgaaaatgagagagtgcatctcgatccacattggtcaggccgntatccaggtcggaaatgcttgctgggagctctactgtcttgagcacggcatcgggcccgatgggcaaatgccaagtgacaaaacagttggcggaggtgatgatgcttcaacactttcttcagtgagactggtgctggaaagcagtgccacgtgccgtcttgtagatnttgagcccactgtta

SEQ ID NO: 50078 - DNA, 282 bp, Glycine max
  unsure (1)..(282): unsure at all n locations; Clone ID: 701138096H1
gngcatagggaaagttgaagttgaagtgaaaaatatgcagagtgataaggatagagaagaggacatggacaggctaagtgacttgcctgactttgttttgcttcatataatgaaatttatgagcatgaaacatgctgttcagactgcgttttgtctaaaagatggaaggagctgtggaaacgtctcacgaatttggcgttgcattcctcagactttgccgaccttgcacatttcagcaaatttttatcatgggttctgtcgaatcgagacagctccatttcc

SEQ ID NO: 50079 - DNA, 277 bp, Glycine max
  unsure (1)..(277): unsure at all n locations; Clone ID: 701138101H1
ctttaacgaaaaaggacacattttcccttacaatggcacgaaccaaacaaactgcgcgcaagttccaccggaggcaaggcacctcggaagcagctcgccacaaaagccgccaganagtcagctccggcgaccggcggagtgaagaagccgcatcggttccgccctggcacggtggcgctgagggagatccggaagtaccagaagagcacggagctcctgatccggaagctccccttccagcgcctggngcgcgagatcgcgcaggatttcaagaccg

SEQ ID NO: 50080 - DNA, 275 bp, Glycine max
  unsure (1)..(275): unsure at all n locations; Clone ID: 701138102H1
gtccgatcttgaaatccacaacaacaatggtgagaggattgctcaacaagctacgtctctcgctccctctncggtcgccggaaaatggcagcacaatcaactccgccgcctcaacatccacgagtaccagggtgctgaattgatgancaaacncggagtcaacgttccgagaggcgtggctgtttcctctgttgaagaggccagaaaggtcatcaaggaccttttccctaatgaaaatgagttggtggttaagngtcaaattttagccggcggac

SEQ ID NO: 50081 - DNA, 271 bp, Glycine max
  unsure (1)..(271): unsure at all n locations; Clone ID: 701138103H1
cttcgcaaagatgaatcgggaaaagtnaatgaagatggcnggttcggttagaactggagganagggtactgtgagaagaaagaagaaggctgtccacaagacaacaaccanagatgacaaaaggcttcagagcaccctgaagagaataggggtgaatgccatccctgctattgaagaggtcaatatctttaaggatgacgtagttatccagtttctaaatcccaaagttcaagcatccattgctgctaatactgggttgtcagtggnncac

SEQ ID NO: 50082 - DNA, 280 bp, Glycine max
  unsure (1)..(280): unsure at all n locations; Clone ID: 701138104H1
tnccantttacnaactnctanccaatntctactctgtttccttgctatcagcggcatcaatggncgncggatcggngnnncgcctncggnatgtgcnaccctntcctgcnacatcnctgccgtcgtcgacgacgctttcttnnaaaaatacggtatcaagttgaacgatgcgantctcgctgaggataagcacaaanctatgtatgaagaattggctaanaatcctaatgtggagtacattgctggaggtggtacncagaattcaatcagggttgcncat

SEQ ID NO: 50083 - DNA, 271 bp, Glycine max
  unsure (1)..(271): unsure at all n locations; Clone ID: 701138105H1
aagctngtgaggttgttgcgagaaatgcgaatgaagaagctgantttaatactcatagnagcatttaccgtcntntctntggntagatntgcntctgatcatttcttcgaanacgatggcgtttcactggcagttgctgcaacgcccggacctccacctctcatggtccccctcactcttattcagggagctgcttccaaaggagccgtctgtttggatggaacatggcctggttancactttcatccggatttggatctggggcaaatag

SEQ ID NO: 50084 - DNA, 272 bp, Glycine max
  Clone ID: 701138106H1
gctctttatgtcacgttcatcattcttgccttcggtatctgaatcatttgctgcaaagttgttagctgctgcagaaaagtatggtttgccaagacttaaactgatgtgcgagtctgtactttgcaaagacatctccatagattctgttgcctatattctggctcttgctgatcgttatcgtgctacagaattgaagtctgtctgtctacaattttctgctgaaaaccttgtcgctgtgatgcaatctgatggttttgagtatcttaaggaaa

SEQ ID NO: 50085 - DNA, 274 bp, Glycine max
  unsure (1)..(274): unsure at all n locations; Clone ID: 701138107H1
aggcagtgcatctttacctattgtggtcactgtggtttcactactgtgccttttggttcttttggaacgtncctgatggcagcaacttacaccgttggaggacctgggggatggaccttcaanactaatgcttggcccaaaggnaaaagattcagagctggtgatatcctaagtaagtaaatttaattagtactccactccttgtatgtcacttcaaaaattaatgttagtaanacattttttttataagtctatctttttatactttttactc

SEQ ID NO: 50086 - DNA, 266 bp, Glycine max
  unsure (1)..(266): unsure at all n locations; Clone ID: 701138108H1
acaagggtcacnagatancangggaacttggtgattatncgnnagantgtgttngatatcaacancattaccagtnttaagggngtcatcggnnccggcantaacatcattgnaggagtcgtcgacaccgttacngctttggcgtcccacattctccatccagctcattagtgccancanggctgatggacatggganaggannagttggaaaggctacaaatttnagangacaagtgtcgttancaaccttnggagctggcgaat

SEQ ID NO: 50087 - DNA, 245 bp, Glycine max
  unsure (1)..(245): unsure at all n locations; Clone ID: 701138109H1
agatactgagacagtncnaggattcagtatctaccccaaggtgattctttcacacntgaggancagngaacagaaaaggcttcaaaagatcctaaaagtaaggttaaagtgaatccttcaganagcaaccgtggatcaaaggagagatctgataganaaactaataaattgcaatcgaaggtatcgaatagcaatcaaaagacaccncatganctcaaataaagggccctccaaagttacaaaca

SEQ ID NO: 50088 - DNA, 271 bp, Glycine max
  Clone ID: 701138110H1
ggaccctacactgaacgagaaatacgcaacacagctaaagtcaatgtgcccaaggaatgtggatccaaggattgcaatcgatatggacccaagcactccacggtcattcgacaatgtttatttcaagaatcttcagcaagggaagggcctcttctcttcagaccaagttctcttcacggactcaagatccaaggccactgtaaatgcatttgctagtagcagcaaaatcttccatgccaacttcgccgctgctatgaccaaattgggccga

SEQ ID NO: 50089 - DNA, 269 bp, Glycine max
  unsure (1)..(269): unsure at all n locations; Clone ID: 701138111H1
agaaaatcctcacccattttcttcgtagccaaacactctgaaattctcagttatgtcgtggcaagcgtatgtggatgatcanctactgtcntgaaatcgaaggtaaccacctcactcacgccgctatcatcggccaagacggaagcgtttgggctcagagcaccaacttccctcagttcaaacctgaggaaataactggcatcaataatgactttaatgagcctggatcacttgctccaactggattgtatatcggtggcancaaatac

SEQ ID NO: 50090 - DNA, 271 bp, Glycine max
  unsure (1)..(271): unsure at all n locations; Clone ID: 701138112H1
gcgantgttctcatgtatctcactgangtagcnaaaggcggtgaaactgtcttcccttctgcagaggaacctccaggttcgcagaggtgctgnaacaagnagtgatctttctgaatgtgccaagaaaggaatagcagtgaaaccangtagaggggangnacttcttttcttcagncttcacanaaatgntaccccagacactagcagtctccatgctggatgccctgttatcgaaggtgagaaatggtccgcaanaaagtgggattcatgt

SEQ ID NO: 50091 - DNA, 269 bp, Glycine max
  unsure (1)..(269): unsure at all n locations; Clone ID: 701138113H1
gagatattgcacgtgcaaggtgggcaatggcgggaaccaaatcggttccaagtttctgggaantgntatgngacgaanacggtatcgacncnancggaangtacaccggcgangaggtctccgatctcnaactggagaggatcaacgtctactacantgaggcntccggcggaaggtacgttccccgggtcgtcctcatggatctggagcccggcaccatggncagcatcagatccggngcatacggcaagatcntcaggcncgacaat

SEQ ID NO: 50092 - DNA, 267 bp, Glycine max
  unsure (1)..(267): unsure at all n locations; Clone ID: 701138114H1
tgactgaatgccaagccttggttttagcaccaactagggagcttgctcagcaaattgaaaaggttatgcgagcacttggagattatcttggtgtgaaggtgcacgcatgtntgggaggtaccagtgttcgtgaagaccaacgcattctatcgagtggtgttcatgttgttgttggtactcctggtcgtgtatttgatatgctgcgcagacagtcacttcggccagactacatcaagatgtttgtattggatgaggctgatgaaatgc

SEQ ID NO: 50093 - DNA, 272 bp, Glycine max
  unsure (1)..(272): unsure at all n locations; Clone ID: 701138115H1
gcaatggcttcaagtcaggaggaggtgacccttttgggagctactggaagcccatttgtgtgcagggttcatattnccctcaagttgaagggagttcaatacaaatatgtcgaagaaaatttgaggaacaagagtgaactgcttctcaaatccaacccagttcacaagaaggttccagtgtttattcacaatgagaagcccatagcagagtctcttgtgattgttgaatacattgatgagacatggaagaacaaccccatcttgccttctga

SEQ ID NO: 50094 - DNA, 276 bp, Glycine max
  Clone ID: 701138116H1
ctttccagttcatacttcatcctattattactttccctctttgcattccaaatgggccactgttgaggttgcacagcaaacaccaacaactgtgacagagaatgaaacaacgactgaggtaaccaagattgaggaaactaccccagaacagccagccaccgaggttactgccccagaaacagtcaacgaagaagcaaaagaggaagcagcagttgagactaatgaggcaacagaagttacagaggaagggaaggctgagaaaacagaagaagaaga

SEQ ID NO: 50095 - DNA, 272 bp, Glycine max
  unsure (1)..(272): unsure at all n locations; Clone ID: 701138118H1
ggcacttcgttgcttggtgatgtccctttctgttctcttcactcttggtcttgcgagagaaagccatgccagagacgaanatttttggcatgctgtttggccaaacactcccattccaagttcattgcgagatcttctaaagcctggccctgcaagtgttgaaatcgatgatcaccctatgcaaattgaagaaacacagtacccgaaaaccttcttctataaagaagaccttcatccaggcaaaacaatgaaagtacaattcagcaagcctc

SEQ ID NO: 50096 - DNA, 269 bp, Glycine max
  Clone ID: 701138119H1
tgggaagactcaatatgtcaaatgggcatgggcaagaaggggttggcttaagctcatctaacgattctttcttcttgatccatcaatccgtagttatttcaagaattatgtcaagacaattttgacaaggaagaatactataactggaattgaatatagaaatgaccccaccatttttggttgggaattgattaacgaacctcggtgcctaactgatccttctggtgatactctccaagattggatagaggaaatgtcagctttgtcaa

SEQ ID NO: 50097 - DNA, 253 bp, Glycine max
  unsure (1)..(253): unsure at all n locations; Clone ID: 701138122H1
ctggtctccatgagcacgccaccgactgtcggtgtcgctctaccagtgtacgaggttgtttacgcgcgtctggtttcacgcgcctctgcaagggtctctctctggtcctcatttctcttcanattctccttcacctcttcccttccgctatcanctgcctcgccctcattcccgccaggactattccctttgcctggaacctcattacagctggttatgttgaacaatctgtctatggggtagtggtcagcac

SEQ ID NO: 50098 - DNA, 274 bp, Glycine max
  Clone ID: 701138123H1
aatggccttgccagtggtcgtcgacgcagagtacctcaaagaggtcgacaaggctcgccgcgatctccgcgcactcatcgctaacaggaactgcgctcctctcatgcttcgattggcctggcacgatgccggaacttacgatgctaagaccaagactggtggacctaacggttcgatccgtaacgaggaagagtattctcacggcgccaacaatggcttgaagaaggctattgatttctgtgaggaagtgaaggaaaaacatcctaaaattacc

SEQ ID NO: 50099 - DNA, 240 bp, Glycine max
  unsure (1)..(240): unsure at all n locations; Clone ID: 701138125H1
tgaagccatcgatgctcagatctctccactccggccgccacccgcgacgcctctcatctcntccgccgtgggtacgcctccgagccggtgccggagcgcaaggtagccgttctcggcgccgccggcgggatcgggcagcctctctcccttctcatgaagctcaatcccctcgtttcgagcctctccctttacgatatcgccggaactcccggcgtcgccgccgatatcagccacataaac

SEQ ID NO: 50100 - DNA, 114 bp, Glycine max
  unsure (1)..(114): unsure at all n locations; Clone ID: 701138126H1
tttttttcttaattttttttggtatcgtttctttccaccagacacgatctcnntttctctgaagaagcaaagagtgcgatcctaaccgtgtcgtccgttccacncaacatacgg

SEQ ID NO: 50101 - DNA, 234 bp, Glycine max
  unsure (1)..(234): unsure at all n locations; Clone ID: 701138127H1
cccaancctcttcccttgttcgacaactagccacnatgcaaaaccgaaacaaacgattacaaanacaagagaagaagaaacnataatcattcattgctcggtgagaagagagagaggaacggcccgatgaccgggaaggcgaagccaagaagnacacggcgaaggaaatcgccgcgaaggtggacgcngccaccactaaccgcggcggcgggaaggccggcctgaaggaccgat

SEQ ID NO: 50102 - DNA, 271 bp, Glycine max
  unsure (1)..(271): unsure at all n locations; Clone ID: 701138128H1
ctttcgggcaaccacagaccatgacattcaagcgcangaatggagnntcgcaacaacacacgngccgcggncatgtcaaattcatccgatgctccaactgcggaaaatgctgccccaaggacaaggccatcaagaggtttttggntaggaacattgttgaacaggctgcagtcagagatgtgcaggaagcttgtgtctatgaacaatatanacttccaaaactctatgtgaagatgcagtactgtgtttcctgtgctatccactctcatgt

SEQ ID NO: 50103 - DNA, 265 bp, Glycine max
  unsure (1)..(265): unsure at all n locations; Clone ID: 701138129H1
gtcgggacaggcattgtttgatctggaaaataccaacaatgagctgaaaagtgatctgaaagatttatacataaacttcagctgtgtaagaacgtgcctaatggttgtntgtgtgaagataatgagatttttgcttgtctctgactatcagttttcatgatctacagccaaattgatgtttctgggaaccgcaaggctgtggttatccatgtcccctacagattaaggaaaggattccggaagatcatgtcaggcttgtgagaga

SEQ ID NO: 50104 - DNA, 269 bp, Glycine max
  unsure (1)..(269): unsure at all n locations; Clone ID: 701138130H1
gcgcttctggggtaccttgtggtaatctaccaagacatatatatactcagctaaaaagctagttcatgagncatcatttggaagttgaaactanagcggtggctgcaaattgccaaatttcaatgcctcactattagttgcaatgcctgttctgcgccggaattattatataattgcgaatattatgagtgccgtggagtgctcataaatcatgattatcataaaagaaatacacatgctttgacttaatcaaccacaatattacttag

SEQ ID NO: 50105 - DNA, 274 bp, Glycine max
  unsure (1)..(274): unsure at all n locations; Clone ID: 701138131H1
tctatanataaccatcgagatttactatcaaaccaaaaattcttcaaaatctcttnacctctgtgatgaccatggatcaacagaaccttagaactcaacatcntatncgcaaagganatcaagaacgttaacctcttctccaaganggacgtatacgccgtcgttacgctnctccggcgannctctcnaccctcagggcgccancacccacgtnnacaaagacgccggcagcaaccccagtggaataccccgtgaaattctccgtcaagaatcg

SEQ ID NO: 50106 - DNA, 273 bp, Glycine max
  unsure (1)..(273): unsure at all n locations; Clone ID: 701138132H1
ctattctccaactcttttgcttcttcttccaaagtggcatcaaaaactagaagaaaatggggtgtggcaatttgttcttcacagtcctcataaccttctcagtggctctcataacatacaacatcataatctctgccaatgcccctctcaagcaggacttcccaggcccctcacgccnctcnatcaaggtggatcncctcatcaagatgccactccacagatcatcatcctcggagaaatcaaaaaagaggttgtttcacactgctgtcatgc

SEQ ID NO: 50107 - DNA, 264 bp, Glycine max
  Clone ID: 701138133H1
agccatgcatgtgtaagtatgaactaattcagactgtgaaactggcgaatggctcattaaatcagttatagtttgtttgatggtatctactactcggataaccgtagtaattctagagctaatacgtgcaacaaaccccgacttctggaagggatgcatttattagataaaaggtcaacacaggctctgcctgttgctttgatgattcatgataactcgtcggatcgcacggcctttgtgccggcgacgcatcattcaaatttc

SEQ ID NO: 50108 - DNA, 267 bp, Glycine max
  Clone ID: 701138134H1
ggaacaatgtaggcaagggaagtcggcaaaatggatccgtaacctcgggaaaaggattggctctgagggctgggcacgggggtcccagtcccgaacccgtcggctgtcggtggactgctcgagctgcttccgcggcgagagcgggtcgtcgcgtgccggtcgggggacggattgggaacgggcccttcggggcctcttccccgggcgtcgaacagtcaactcagaactggtacggagaaaggggaatccaactatctggtgggcaga

SEQ ID NO: 50109 - DNA, 268 bp, Glycine max
  Clone ID: 701138135H1
actctcctctgagaaagcctccagcctctcctccaaagtcccctgcggttcgttcggttattcttcgaaccgttgtctgaagtttacaactcaaaacttcaccgaacgcatttcattcaccaattcgtccaagtctcgtatcaatcaatcagcctatccgtcttgcggttggagagatcggaggggagagcagccatggcgcatcgagtagaccacgagtatgactatctgttcaagatcgttttgatcggagactcaggtgtaggca

SEQ ID NO: 50110 - DNA, 265 bp, Glycine max
  unsure (1)..(265): unsure at all n locations; Clone ID: 701138136H1
ggtcaatgtatgttggcacgttactagttggacttggttatggagctcattgggcaatgttccagctacagcctcagagttgtttggtttgagaaactttggtgcttgtacaatttcattactatagcaaaccctgcagganccctcacaacaagcttcagtatttggaacttccttggccgtgtcggaggaggttacatatctgagcttgttgtgagggatcatgcatatccaaggccagttgcattggctgtattcaactcat

SEQ ID NO: 50111 - DNA, 269 bp, Glycine max; identical to SEQ ID NO: 25267
  Clone ID: 701138138H1

SEQ ID NO: 50112 - DNA, 271 bp, Glycine max
  Clone ID: 701138140H1
aagaaaggtgtgaaaggttccgttgtagcagcgaagaagaaggttcaggagaaggtgacgaatcctttgttcgagaagcgtccgaagcagttcgggatcggaggcgcgctgccgccgaagcgggacctgacgcggttcgtgaagtggccgaagaacgtccaaatccaacgcaagaagcgcatcctcaagcagaggctcaaggtccctcctgcactcaaccagttcaccaaaaccctagacaagaatctcgccacgaatctatttaagatgt

SEQ ID NO: 50113 - DNA, 271 bp, Glycine max
  unsure (1)..(271): unsure at all n locations; Clone ID: 701138141H1
gcttcaccaacttgagcatagcttttgctcaaagttcatatgaatggatttggagagcagccactggncaagattgccattcacaagaccgttttgggcgctacacagttctgcttccattatagcagtcccttttgtgctaggaactaagggtgaggatacccaatgggtgactgtagagctagagtccccaatancatctgttgatgactgggtcggagttttttctccagcaaacttcaattcagcaacatgncctgacactgacggc

SEQ ID NO: 50114 - DNA, 259 bp, Glycine max
  unsure (1)..(259): unsure at all n locations; Clone ID: 701138142H1
tgagttcatacgcacagaaaganccgaatcgaactctccaaatgatgagcccccaaaggatgacagaatggcagttgtagggacatgttctacacattcccttttgatgagtgaggatanagtagataatgttgagaatgtagacttgccagggccatcagaactaaaggagataaagtcacttaaggtgacccaacaacagaagaaaagagtaaggtttttggtaccagagagtccaaagattgacacaagagtnatg

SEQ ID NO: 50115 - DNA, 264 bp, Glycine max
  unsure (1)..(264): unsure at all n locations; Clone ID: 701138145H1
agggtttgtagtgtagcaggaagaagcagcaatggcgccgaagataacacgtaaggttagcagaaaccctgaattgataaggggaatcggaaagtactcgaggtcgcagatgtaccacaagaggggcatttgggctatcaaggccaaaaacngtggcgttttacctcgccacgaccctaaacccaagcctgaagctcctgctgaaaaaccacccaaattttaccctgctgatgatatcaagaagccccttgtcaacaagcacaa

SEQ ID NO: 50116 - DNA, 267 bp, Glycine max
  unsure (1)..(267): unsure at all n locations; Clone ID: 701138146H1
ctgcatcaaccatgaaatccatgtacaagcctccattgcccagatctccaattncgccttcgaccctctnatgctgttcattcatcaaactctatcgctcttcaaaccccaccaggttccttgaccaaatctcagaaacctgttatctctccnaacatgcgacccgaataccgcaccatttcgtgcgaattacgggctctgaccaagatggttcgtgatgaattcagcanagccaattcagagaaagcggcgagcgcaaattcgagt

SEQ ID NO: 50117 - DNA, 269 bp, Glycine max
  Clone ID: 701138147H1
gaatttgaatcgaagaaaccacccacgcacacgttcgttgattcatgttctgttccttttctaaacccaacaccacatcgtgtccttttcttctcttcgatccactacgtgcctgatcctctgcttcaggcacatactcccgcaggttaaatggcgaggatcaaacctcaggctctgctacagcaaagcaaaaggaagaagggtccttctcggataagtgccgtgactgttatattttactttttgattcttgccttggttgggttttt

SEQ ID NO: 50118 - DNA, 261 bp, Glycine max
  unsure (1)..(261): unsure at all n locations; Clone ID: 701138149H1
aatccctttcttcctctctgcacgctcttgcctcctccgatctcagagactcannaaattgcttcgcctttggctctaacgtgactagcaaatcatgtttcctcattctcgccgagagtgcgttctctctctctgttcagacttcggagtacgcttcctctctcacagttggtttcattatgccataccactgaagaacgaagtttatctctctcttgtgacttgtgnncnnntcaaattgcggagaacagaacctacgca

SEQ ID NO: 50119 - DNA, 269 bp, Glycine max
  unsure (1)..(269): unsure at all n locations; Clone ID: 701138151H1
ggggagtgtcaagcagattcatggaagaatatgtcacgagacgagaggagagaagagaagagagatgtgagatgtgatggggaaattgatatgacatgtgaaatattattatgtcatgtgtgggtggcatggtacactcattctcatatttatttatgaganacactcactgtatatnaagagaancaatgcaccccaattctcattccccctcacttttgggttcaaagtgattgctgactccntatttcctagttccgtctttcctt

SEQ ID NO: 50120 - DNA, 248 bp, Glycine max
  unsure (1)..(248): unsure at all n locations; Clone ID: 701138152H1
agggccacttcacttttagaaaccacagttttgcatctgggantttgcctgttgaagtgccacttttgaagataataataaanacaattatgacttggaaaagcagaggagaattgccttctagaagcgtcatctcgcagagangggtactgtttctctgcttaggaagtttctgtgctggaatgctcttcactaccaggatatggaccatacctgaaaacaacaaaggactagcacgaccaacagcc

SEQ ID NO: 50121 - DNA, 273 bp, Glycine max
  unsure (1)..(273): unsure at all n locations; Clone ID: 701138153H1
cttaacccctaagaaaagtatcgaaaaaagactcatagtccatcaaccagcaagaaaaaagaaaatncgaagaggaagagcaaggacacaacacaaagaagcaaaagaagacatggcgttgcagtggctgattctcacttacgtggtcgcagctgaggctgccgtggccattctgctaacccttcccacgcccaaactcctaagggaccgtttcgcctctctcgtttccctcattcttcaacccgcgcttttcattgtcccctttgcggggtt

SEQ ID NO: 50122 - DNA, 222 bp, Glycine max
  Clone ID: 701138154H1
tgattgaagaagatgccgatcagaaacatcgccatcggaaggcctgaagaggctactcaccccgacacgttgaaggcggggttggctgagttcatctccaccttgatcttcgtgttcgccggttcaggttccggcatcgcctacaacaagctcaccgacaacggcgccgccactcccgccggcctcatctccgcttccatcgcccatgctttcgccctcttc

SEQ ID NO: 50123 - DNA, 271 bp, Glycine max
  unsure (1)..(271): unsure at all n locations; Clone ID: 701138155H1
gagagatagaggagaagatgaacggtggtgaatcttacggtgctattgagacacaatacataaggaggcatcacaaacatgaaccaagggaaaaccagtgcacctctgcacttgttaaacacataagagctcctgttcaccttgtgtggtcactggtgagaagatttgatcaacctcagaaatataaaccatttgttagcaggtgtatcatgcaaggggatcttggcatcggaagtgttcgagaagtgaatgttaaatctggcctncctgc

SEQ ID NO: 50124 - DNA, 271 bp, Glycine max
  unsure (1)..(271): unsure at all n locations; Clone ID: 701138157H1
caacagttgagaagacagaagaggaaactttgaagcaagaagctcctgaggaaacanaagaanaatgatgatcctantgaggttaagacaccagaagctgcagaagcagtgacagaaacacagaaagaaactgaggctgaagctaaggaagaggctaacacagaagccccggcagagaaaagcgaggaggagaaagaagggccagctgaaaagacagatgaggaagtgattgcagaagcagaagcagaagctgagaagagcgaggaggtcc

SEQ ID NO: 50125 - DNA, 266 bp, Glycine max
  unsure (1)..(266): unsure at all n locations; Clone ID: 701138158H1
agtccctccttcctctgccttataattcttgtgacccttttngctggtagcattgaaagtgcaccagcaaacgtgaagccaagccnttatgctgcacccttcaataggagnctttttccttctggttttctatttggaataggctctgcagcttaccagatagaaggagcagcagctatagatggcagaggaccaagtatatgggacacctatactaaacagcaaccagggaagatttgggatcatagtgatggaagtctagcaat

SEQ ID NO: 50126 - DNA, 266 bp, Glycine max
  unsure (1)..(266): unsure at all n locations; Clone ID: 701138159H1
agtcattgcaaaatgaaaaggagtgagtgagtaggcctggtttnngttatatatttgnnnnnnnnnnnnnnnnnnnnnnctaaaaatggaaggaggatcaggtggcgagaggaacagtagtgtatancgagagtgcttgagaaatcatgcagccagcctangaagctacgccacggacgggtgcggcgagtacacggtggacggcgcggggggactacaatgcgccgcgtgcgggtgccaccgcaacttccaccggaaagtgaagt

SEQ ID NO: 50127 - DNA, 266 bp, Glycine max
  Clone ID: 701138160H1
ctcatgatgaattatgcctttggtggtaacttggaagaccaaagcatattccactgatgccttctattttagaacacaagccaaggttgaagagttgctaaaggaatatgaaaatgtttgcaccctaagaatccaattgccagtgtcatctgatctcagcaacccacataacttgatcactatgataacaaggtctgataaagtggccaacattccaaacagcatcactgttttggatgaactcgtaccaatttcaattgagatgg

SEQ ID NO: 50128 - DNA, 237 bp, Glycine max
  unsure (1)..(237): unsure at all n locations; Clone ID: 701138161H1
gagaaagaaaagaatggcanagttaataaaattctntgagttgaacacaggggccaagattccttctgttgggttaggcacttggcaagctgagcctggtgttgtagccaaagctgtcaccacagccattctggttggatacaggcatattgattgtgctcaagcgtataacaatcaagcagagattggttctgctcttaagaagcttttgatgatggtgtggtgaagcgtgaggac

SEQ ID NO: 50129 - DNA, 266 bp, Glycine max
  unsure (1)..(266): unsure at all n locations; Clone ID: 701138162H1
aaaaataaaaatcaaagagcataatgtcagggatcattcacaagattggggagacccttcatgtgggagggcacaagaaggaggaggagcataagggtgagcaccatgctggagaatacaaaggggagcaccatggtgaacacagtagtgagtacaaaggagagcatcatggtgaacacaaagctggagagtaccanggtgagcacaagccagagcacaaagaggggttcctagacaaagtcaaggacaagatccatggtgagggc

SEQ ID NO: 50130 - DNA, 267 bp, Glycine max
  Clone ID: 701138170H1
aaattatgagttccaaaggtgttggtgaggattgcctgggatgggcagcaagagatgcatccggagttctatcaccttacaaattcagtcgcaggactcttgggaatgaagatgttcatattaaaattacgcactgtggtgtttgcttcgctgatgtagtttggacaaggaataaacatggtgactcaaagtatcctgtcgtgcctggtcatgagattgctgggattgtgacaaaggttggcgccaatgtccaccattttaaggttg

SEQ ID NO: 50131 - DNA, 270 bp, Glycine max
  unsure (1)..(270): unsure at all n locations; Clone ID: 701138171H1
caaaaccctaatccttcgtcttccaaggagatggctgattctcccctcgcaaggaactcaaggtcaccttccccatggaaagctcagtncgagatcgagatctaggtcaaggtcgagatctaggtcgaggtctaggcctagacaaaggccaagatcgcgttctagaagtcgtggcaggtcaaggtcaccaattcgtggaaggtcaaggtcaccaattcatggaaggtctgaacctacaaatcctggtgacacatttatgtaactggtcta

SEQ ID NO: 50132 - DNA, 266 bp, Glycine max
  Clone ID: 701138173H1
gttgcagagcagcgaggtgtttagtgtgcaattgttgacaaattaatggcggaaattgtagggcctacgcttgtactgctgttgtaattgtagaaaccaagtctcccttcacgatgatataattgctaaaacctttcagggaagatatggccgaggttttctgttctcccatgcaatgaatattgtggtagggccaaaagaagacaggcacctcatgactggcctccacaccgttgctgatgtttattgtggtgactgccgtgaag

SEQ ID NO: 50133 - DNA, 265 bp, Glycine max
  unsure (1)..(265): unsure at all n locations; Clone ID: 701138174H1
cgctggtctttccaggacttcaaattgtgttatgatgctaagtttggtagaaagaaagtcgcggagaacggagatgatgctgccggtaaagcggtcagcaatggaaattcnaattcagtgacagtngccattgtgtccaatggcaacaaaagggcatcggaaatggctgtttatgagcagtttcgaagcgaggggcagaattcagattcacanaaatggctttgtgccgacccttacagatganaggccgcagaagtctttgctt

SEQ ID NO: 50134 - DNA, 255 bp, Glycine max
  unsure (1)..(255): unsure at all n locations; Clone ID: 701138175H1
cttcttgatccttcttttnctccttgaactncaaacatggcagatgaggtggttctgctagatttctggccaagtccatttgggatgagggtcaggattgcacttgctgaaaagggtatcaaatatgagtacaaagaagaggacttgaggaacaagagtcctcttctcctccaaatgaacccggttcacaagaagattccggttctcatccacaatggcaaacccatttgtgaatccctcattgctgttcagtac

SEQ ID NO: 50135 - DNA, 265 bp, Glycine max
  unsure (1)..(265): unsure at all n locations; Clone ID: 701138178H1
atctctttattataatgatttaattagtttttaaaaatataaatatatacaaatttttagttagttggncntttataaaaaaatactataatgtntattttaagacggaagtaggtattcccgtaatttaaaaacacactcttgtaactcgctgangcgcaccactctctctttgttctttctcggttcagtgtctctctttgacggtggtgctntcagcattgacctcagcttgagcagtaaaacatcatcagcactactacgg

SEQ ID NO: 50136 - DNA, 269 bp, Glycine max
  unsure (1)..(269): unsure at all n locations; Clone ID: 701138181H1
ggaaaaagtgaagtttagagatggaagaagaanaagcagcggcgtacnacgacgagctggcncgtaagggnagggagctgcgangttcaagcaaggtctaggcttttcctcttcagcagcanacgangacgttccaaaaccctcctcctccttcctctccaaattcgtcaaagcctcctccgagtcggagaagcaagcgcagtncaatccatccacgacaagcttaagaaaaatccctcttccgagtctagggtttcgagcagcganag

SEQ ID NO: 50137 - DNA, 268 bp, Glycine max
  Clone ID: 701138182H1
aatttatcagcatggcctccgttcagtgccacaaaacctgcaaagtgagctgccaacaggaaaaccagcacgcctcgtttgggcagaaagtttctgacttgttcaaagggcatcaacataatgaccacagctccaattatgccacccaaaccaaagtgctttcccagtcagggtcagggttaggccccttcaccaccaaaactcaaacacaatgcggttgcccccaaacacatctcagtaccactcatggctccaacacaaaaggcca

SEQ ID NO: 50138 - DNA, 265 bp, Glycine max
  unsure (1)..(265): unsure at all n locations; Clone ID: 701138183H1
gccaagtactacgaagctggtgcacgttttgccaaatggcgtgcagtgctgaagattggtcccaacgagccatctgagctgtctatccatgagaacgcctatggcttggctanatacgctgtcatntgccaggagaatggcctggttcccattgttgagcctgagatccttgttgatggacctcatgacattcacaagtgtgccgccgtcaccgagcgtgtccttgcagcatgctacaaggctttgaatgatcaccatgtccttc

SEQ ID NO: 50139 - DNA, 266 bp, Glycine max
  Clone ID: 701138184H1
agtgcttacagttgctgcgtcgcaaggtaccggcggcgacggagaactatcttctcaattttcgatcactgcattggttctgttgacaagggttttgttcttcctgacttgcatacttgatggcttcaaagttgcagaagttgcaggccacagcatctcaagcgtctcaatttgtatccagtcgtggaactaactactacaagcaattgctggaacagaacaagcaacacattcaggagcctcctacagtagagaaatgcaacctg

SEQ ID NO: 50140 - DNA, 269 bp, Glycine max
  Clone ID: 701138185H1
ctcaaccccaaagtagcaataaatagatgtctccaatttttttcttcttgatcaaaagtcgtagaactagaaggttaggttgagggcgatatgaaggtaaccaaagggaaggaaactaaaattgttctgacaaaacccttccaattggaaggtgaatcagatttagaaccgtcttatagagctcccaatctcctacatcgcttgttaagtttactcaagaacgtgcggccaggatcagatctcacacacttccaactgccagctgtgtt

SEQ ID NO: 50141 - DNA, 269 bp, Glycine max
  Clone ID: 701138186H1
ctccttggagaatcctaagagtgttctacttctatattaaaatcctacccatcaatggcagattatcagaaatcaggcctttacaaatgggctggtgatgcagagaattttgacaaagagggtccttatattgagcttgttacttctcccaataaccctgatggacatagaagggaagctatggtcaaccgaagccaaggactattgattcatgaccttgcctattattggcctcaatacactccaatatcatccccttcagatcatga

SEQ ID NO: 50142 - DNA, 268 bp, Glycine max
  unsure (1)..(268): unsure at all n locations; Clone ID: 701138187H1
catggctgctaacctcctggcacatgcaccacatcttttctgttgtggaattgctcgttctggtgcttacaacagaacacttactccttttggttttcagaatgaagacagaactctttgggaggccactaatacttatgtagagatgagtccttttatgtcggctaataaagttaagangcccatcttgcttattcatggggaagaggataacaatccaggaacattaaccatgcagtcaggcaggtttttcaacgctctaaagggt

SEQ ID NO: 50143 - DNA, 268 bp, Glycine max
  unsure (1)..(268): unsure at all n locations; Clone ID: 701138188H1
tctcactccgggatcgatattttcaagaacagatcgaaaagccgttcatcgatttgttggatctgtgagtgagaagatggttactncgacagaggagactcaattgaacaggctcgaaaaccaggtcgataacggcggcggcggcgcgtgggagtacctctgcctcgtgcggaagctcaaagttcggcggtcggagaaagttctgaagcacggtctctccatcttgaacgacctcaaacaacgatcctctctcggctccgatgaatgg

SEQ ID NO: 50144 - DNA, 269 bp, Glycine max
  unsure (1)..(269): unsure at all n locations; Clone ID: 701138190H1
cgcaccttccctctcctccgctctcaactccctctcctctctatcccttcttccaccttcctcccgcttctctctcctccctaaaattnanactcctctcnaaanctctncccctnctcttcgcaaccannaccctgaaatccaaaccctncgacganattgacacatcgttcttcgacaacatcaanccgcaagacganatcanattcaaccctccggagcncccggagggcttcgtggcgcctccgtccttcgacgacggccccctg

SEQ ID NO: 50145 - DNA, 265 bp, Glycine max
  unsure (1)..(265): unsure at all n locations; Clone ID: 701138191H1
acctcacctattagaagtaancaaagaccctnnctnctnaaanngntaaacaagtataaaanaganggcacttgccctcaaacaganactaacnctctatctctctcttttcaagccttaaatgagtaananagagtgaagaaaggaaagnnaggagcaccnttttggtttgaganacataattagcaagagagttcaaaatggggaagagcgagtttaatggggtggtgttgatgntgctgtgtttgtgggtttgtggtgtcac

SEQ ID NO: 50146 - DNA, 269 bp, Glycine max
  unsure (1)..(269): unsure at all n locations; Clone ID: 701138192H1
ctccaanatgccaaacgacagcgttctgagtcttttcttcttcgttnancctcttcacatggccttntctctgctaattccccacgatgacnatattttcctancgagtcaactccatgacgatgactcantgagttgcactgctaccgacccaaaccttaactacaagnccggtgatcggaatcctgacccacnccggcgacggtgcctctngncggcttcagcaaacgccaccggggtttcttacatcgccggcttcctacgttaaa

SEQ ID NO: 50147 - DNA, 266 bp, Glycine max
  Clone ID: 701138194H1
gatgacaacacgcttcaagaagaacaggaagaagaggggccacgtcagcgctggccacggtcgaatcggaaagcacaggaagcaccctggaggacgcggtaacgccggaggatggcaccaccacaggatcctcttcgacaaataccaccctgggttcttcggcaaggtaggaatgcgctattttcacaagcttcgcaacaaattctactctccgatcctcaacatcgacaagctgtggtccctggtcccgcaagaagtgaaggaca

SEQ ID NO: 50148 - DNA, 271 bp, Glycine max
  unsure (1)..(271): unsure at all n locations; Clone ID: 701138195H1
gccgccggcaatcctaggtttccggtgacgatgctcccctacgcttccatcccggaggccgttnncggcgtgggccgcaacctcagcttcgcggagagcctctggttcaactantccgnagnnaagtccgattacttcntctantgcncacaacattcngtncctcttcctcgtgctnctccctcgtcccnctanncntngtcttcctcgaattcaagcgctnctccttcgtctcttccnacaagatcnaagcaaaagtcngcttgtccng

SEQ ID NO: 50149 - DNA, 191 bp, Glycine max
  unsure (1)..(191): unsure at all n locations; Clone ID: 701138196H1
gttattcgtccgacacatnttttctccgatcccctattcctctccagncttccgntnnggcccgattttcagttantgaaaaggganatnganttggnanntagacanatagattcgnntctatgggttaangtganatccnaatccgaatctgaatctgaatctgatccaatcatntncntgtnagggcg

SEQ ID NO: 50150 - DNA, 269 bp, Glycine max
  unsure (1)..(269): unsure at all n locations; Clone ID: 701138201H1
agcaactccaatccaaaaccggttactccgaattgaaatttatanaaaagtatcnaataccccgtgtctgttagttaatcagancagagtagtgncgccaaaagtgcgaagttaaacttggttgcatgcgaagagcnaaganatatgagaccaaacatctttctgaggccgggtttcctactaggatnagccatggtgggaaagcattcggttctcacttctgcatggtggntgtctgtggagtcatttacttgnnntggtcttttggt

SEQ ID NO: 50151 - DNA, 243 bp, Glycine max
  Clone ID: 701138202H1
cactcactcagttgcgaacggtggagttgatttgaactgcgacgaacattcaatcaaaaccataaccttctctaattaacttaatcactttttgttttctttcgttgctttttgactgcgttttgctacttgaagcgaaagcaaaaactagctctcttaggtcgatagtatttttttccttcaatatattttgctttttatatatacaatactctttcatgttcagcttatagccaagagtgt

SEQ ID NO: 50152 - DNA, 283 bp, Glycine max
  Clone ID: 701138203H1
gttggtgcaccgtttgtacccagagattgatccagctctgaaccctgaccacgtccctcacattctgaagaagtgccctgatgccattccagaccctaaggcggtgcagtacgtgagaaacgaccgtggcactcccatgattctagacaacaactactacagaaacatattagacagcaagggtctcttgatagtggatcaccaactagccaatgacaagaggaccaagccttatgtgaagaaaatggccagagccaagactatttcttcaaggagttctcta

SEQ ID NO: 50153 - DNA, 285 bp, Glycine max
  unsure (1)..(285): unsure at all n locations; Clone ID: 701138204H1
gggatcagataggtagctacttctactacccttcccttgcattccacaaggcagcaggannctatggtggattcaaaattgagagccgccccgggattccggtgccttttcctcctccagcaggagatttcacgatattggcaggagactggtacaagagaaatcacacagatttgagggctattttggatggtggaagtgaccttcccttcccagatgggattatcatcaatggacgtggttccaatgcctacacatttacagttgatcaaggcaagacgtaca

SEQ ID NO: 50154 - DNA, 284 bp, Glycine max
  Clone ID: 701138205H1
tggaaatattctctctaaatccaattaatgctgccattcacatttaacacctctggcagcatctagcattcattaattcattgagcttgtgactaagttcattaatcctttcactcctttcatatattaaaacccctcccattccattttatttccctctggttttcatcttctgatatatcaacttcaccagatcgtgcacttagaagttcatcactttatcatcaagaatgatgcaagactcaattgggatccctgcttgcttttcttcttcagcagagaag

SEQ ID NO: 50155 - DNA, 282 bp, Glycine max
  Clone ID: 701138206H1
gggacctgcaaatttctctgctgatctcattgcagctcaagcagtttcatcactgcagattgctgaggaggcagatgaagataggattctcttttaagtttttgattaagggcatgctgaggtgatagaagaataactgtttgtggtggtgactggatgaagtcttttgctatttttattgaagatttatatgcgtgtatatatattataattataattatgagtcttgtccatgtcaaacactttctgctccagttgtgattgaacgtgtaacatagtgtg

SEQ ID NO: 50156 - DNA, 281 bp, Glycine max
  Clone ID: 701138207H1
gggctccaacgctcggagcagctatttcgttgggtttgggaggccaatagggccaacccagttggagaaaatgccatttttcacttggcatgatgggaaccttgtgttggcagatgctgatggcagaattgcatggcaaactaacactgccaacaagggtgttgtggccttcaggcttctttcaaatggtaacatggtccttcttgatgcacaaggcgggttcgtttggcagagttttgatcaccccacagatacccttttggttggtcaatatcttagag

SEQ ID NO: 50157 - DNA, 264 bp, Glycine max
  unsure (1)..(264): unsure at all n locations; Clone ID: 701138208H1
tgccactcttccatctttcccttgtcccagattccctccacttcattgcaatttcttcgatccgctttctaaatnccacacccntccgttccnctgcttcgncgcgacaagtttacnagaatggcttcgaagaatgctcaacaagacacgcgcttanccagantcgcctctgcgatccgagtcatccccgactttcctaagccaggaattttgtttcaggacataaccacgctgcttctngatacaaaggctttcaaagacacg

SEQ ID NO: 50158 - DNA, 286 bp, Glycine max
  Clone ID: 701138209H1
gtggagaggggcagggatataaactctgttcttgaacagtatgcaaaatttgttaagcctgcatttgatgattttgttctaccatcaaaaaagtatgctgatgtgatcattcctcgtggaggtgataatcatgttgccattgatttgattgtgcaacatatccgtacaaagctcggccaacatgctctatgcaaaatatatccaaatgtctatgttattcagtctacattccaggtatctttaaacatagttcgccaattttattttatttttaattttccatttt

SEQ ID NO: 50159 - DNA, 282 bp, Glycine max
  unsure (1)..(282): unsure at all n locations; Clone ID: 701138214H1
ggncagcccgaaacgcagcatttcccgtgttgtgacgctgcccgaactgcccgattcttggctgngaaattacgagcattcggtctgcagtacctgtgtgttttccttctgtctctctctgacctctgatatttctatattttggttctctgtgtctctacgatcaggatccaacggtccaaaatgttcggggcttgtgctgtttgttttcccaggttttagagctccaaaccttcagatccacctcattcgtctccagatcttccttcctggataacgttt

SEQ ID NO: 50160 - DNA, 282 bp, Glycine max
  unsure (1)..(282): unsure at all n locations; Clone ID: 701138215H1
gaaggcctccgatcccaaatctctcggtggtctcggccttcagctacccctcattgtccgcttcccggacgttcttcaagaaccggttggactccctccaatcggctttcgattacgcaatccaatctggagggtacgagtctcattaccaaggagtttaccccgtgaaatgcaaccaggaccggttcgtggtggaggatattnttaaattcggttcgtccttccggttcggtctggaggccggctccaagccggagctccttctggccatgagctgtcttt

SEQ ID NO: 50161 - DNA, 281 bp, Glycine max
  unsure (1)..(281): unsure at all n locations; Clone ID: 701138217H1
ggggtacctttgtagacactacatactatccataatatggtcgaaaacaatccagcaagggtttttggttcttctatgtttctatgtttgcttgtgttgatcacttggaacaacattgttgttgttgttccacaagctgaggctcgagcattctttgtttttggtgattcgctagttgacaatggcaacaataactacctattcaccattgctcgtgccgantcatatccttatggatngactatcccantcacagggccactggcgtttcccaaatggcc

SEQ ID NO: 50162 - DNA, 282 bp, Glycine max
  Clone ID: 701138218H1
gccatatcctttgccttcgcttctgaccctgacacacttcaagacctttgtgtggcacttccctcttcaggtgtgaaggtgaatggatttgcctgcaaggcagagtcaaatgtgacagaagctgatttcttctttgctggtttagccaagcctggagttatcaacaacacagtgggatctgtggttactggagctaatgtggaaaaaatcccaggacttaacacattgggggtgtcattctcaagaatagactacaaagctgagggattaacccacctcaca

SEQ ID NO: 50163 - DNA, 282 bp, Glycine max
  Clone ID: 701138219H1
cttgctccctcagaagcgaagaagaagccacagagaaccagtctcctactctctctcacccacaagaaaaatggcatctcacatcgttggatacccccgcatgggtcccaagagagagctcaagttcgctctcgagtcttctgggatggcaagagcagcgccgaggatttgcagaaggtggctgctgatctcaggtcatccatctggaagcagatggctggtgctgggatcaagtacatccccagcaacactttctcgttctatgaccagctgctcgacgcc

SEQ ID NO: 50164 - DNA, 283 bp, Glycine max
  Clone ID: 701138220H1
ggaatttcgatgctcagtcatctcttttaccattctcttctctcttgctcttgcaggagagagccatgtccatgcatcgctacctgaggaagattattgggaagctgtttggccaaacactcccattcccactgcactgcgagagcttctaaagcctctccctgcaggtgttgaaatcgatgaactccctaagcaaattgatgatacacagtacccaaaaacattcttctataaagaagaccttcatccaggcaaaacaatgaaagtacaattcaccaagcgt

SEQ ID NO: 50165 - DNA, 282 bp, Glycine max
  Clone ID: 701138221H1
tttttctcctcaatctttttgtctttgttttccttcatgtgatatcttaataaatttcataagcacaatatactttctttttttctctctagtacaaccctaagaaacaccaattacattgtcccacacacaaaatacaatgtaagcatcccagattcccagcgctaattatagaacctgagtaataagaatgaccctgcgatcatagtcagacaaaagtcaaaccttatctctgaagtttaacagtattcattccaaaacaaaacaaaaagcaccatcaaa

SEQ ID NO: 50166 - DNA, 239 bp, Glycine max
  Clone ID: 701138222H1
taaatttattttttatgtttagttccatcttcagggtcaaacttctcttctctttagctagctagctgcagagattaacaacatggagatagaatcatcagcagcggccaccgataacaacaattggggtggtcgtggtgttgagagagagatgccatacagtggctttgacagaggaaccttcttggcttggcaagatctgagagtggtgattcctaactttggaaagggaccaacca

SEQ ID NO: 50167 - DNA, 283 bp, Glycine max
  unsure (1)..(283): unsure at all n locations; Clone ID: 701138223H1
ggnactcacccagatattggggctgctttctttcatgaagcattccactctcactgtccttnctgtcttggtttctccaaaccaccccattgtgaatgtggaacacaccacctcagagaggttcagccctctcttgttcactgactcaatgaatggaccgtatttcagtggcagctctatggcaacgacttgttcatcaacggaaagggtagggaagccattcccggagtgaatattgtcggagacaatgcgccttgcctttagatcaattaagatctcgtgg

SEQ ID NO: 50168 - DNA, 285 bp, Glycine max
  unsure (1)..(285): unsure at all n locations; Clone ID: 701138224H1
acggatcatacgcacaaattaagatcaacctaattaatacttttattttaaactttaaggntttaatatactgcacaagctcaagcttccatgccaattatccaaggacaccaaacactaatatgttctgagtagcctttgtttattattaacagaaaacacacataaccgttcccatgttgcttccacatgctgagagccgnanactcaaactgtggctatggcccccacatcaaccacgcttgcattggccttcatagcttcaaaccttggctctttagcctg

SEQ ID NO: 50169 - DNA, 282 bp, Glycine max
  Clone ID: 701138225H1
caagacgctcaagatctgcgccaatcatctcattttgcctactatgagtgtgcaagagcacgctgggaacgagaaatcttgcgtttggcacgctagggattttgctgatggtgaactcaaggacgagcttttctgcatccgttttccttctattgaaaattgcaaaagcttcatggaaacattccaagaagttgctgaatcccagaaggcagaggatgagaaggaatcagctgatgcagctggtcttattgagaaattaagtgttgaagaaaaggctgatgc

SEQ ID NO: 50170 - DNA, 281 bp, Glycine max
  unsure (1)..(281): unsure at all n locations; Clone ID: 701138226H1
aaaaaagaaaaaagaaacatattcttgcaatttcgttgtacaaacaaaattcccctattttcggcacgcctttgttgaatttccaannnnnnnnnnnnnnnnnnnnnnnnnnnncgtaataattccaaaaagcctaacgcgagagattcatcagtttttcaattattcctcgaattttgaaggaatcatacaaacgcttganatattcgtcatcaacaacaacctcacgctgctatagattttttttttctcttcttacagatccaaacatggccgaagaa

SEQ ID NO: 50171 - DNA, 273 bp, Glycine max
  Clone ID: 701138227H1
attctctcccttctctttctctctgcgacaccagatgatggagacgacggcgacacgaaaacgctgttcgttgcgccaatcgcggcgttgttgttggtggtgctactcgcggcgagtgtggtggtggaggctcaggagaactcggacgtgaagacgctggtgaagcacatgcacgggaagaagtactgcgacaaaggatgggaatgtaagggctggtcaatttactgttgtaacctcactattactgattatttccagacctaccagttcgag

SEQ ID NO: 50172 - DNA, 278 bp, Glycine max
  Clone ID: 701138228H1
caaactcaaagaagaaagaagaaaatccagcgaaagtaaaaccagcatccgaaaaagatgagcagcatcggaacaggttacgatctctccgtcaccactttctcccccgatggccgtgttttccagatcgagtatgctgccaaagccgtcgataacagcgggactgttattgggatcaagtgcaaagatggggttgtgttgggcgttgagaagcttattccgtcgaaaatgatgcttccgggttccaatagaagaatacatccgttcatcgtcatctg

SEQ ID NO: 50173 - DNA, 211 bp, Glycine max
  unsure (1)..(211): unsure at all n locations; Clone ID: 701138229H1
atgaagttatttttcattatctcaaccttacaatttaatacaaattatgattnacgattcaaaaattggnttnccaantcatnatnngaatctcaattncnngntnatntancacganatggtatanagaatgtcaggtngntgtcaactggttgagaannancaatncaatcntggagaagcagcacantcanccgtgctaggttgtctc

SEQ ID NO: 50174 - DNA, 259 bp, Glycine max
  unsure (1)..(259): unsure at all n locations; Clone ID: 701138230H1
tccagtgcatgtatcctttgtccctactggaactgacatcaantttcacatggcaaaagaaatcacagaagatgaaaactgaccaggtggcagattttcaccacctaacgtcccaatttatagcaaaatttgttgtgctcataggaggctttaacacccaagttcttctgttggtgtttggtcctcttcaaccacgtgccaatagagagtagaagaatctatatacatatttttaattcctagctaaactgttctgttg

SEQ ID NO: 50175 - DNA, 279 bp, Glycine max
  unsure (1)..(279): unsure at all n locations; Clone ID: 701138231H1
acctcctcagtccttattccacttcaatcgcaattatttaatctaacaaataattgaaatcgcgattgattgcagtgatcgagatgctggggaagacgaggaaggtttcggcgcgtggcgaagcgtggcggcgaactacgccttcggtccctccgaagatgacgtaatcanccaaacacaggcttctcacgcgcaccaccaccaccaggggtgaccctcccttgaagaagcttcagaagaagttcaccacgttcgtctccgaagtcgacaaagacgaag

SEQ ID NO: 50176 - DNA, 271 bp, Glycine max
  unsure (1)..(271): unsure at all n locations; Clone ID: 701138232H1
ccgaggtaagcaagacccaggaaacaaccccagtcactgagnntcctgcaacagaacaacncgcagctgaggttcctgcaacagaacaaccagccgctgaggctcctgccccagaatcaaccaccgaagcaccaaaggaagaaaccaccgaggcaccaacagaaacagtagaaaaaacaactacagaagtagccccagaggagcctaaagaagttccagttgagaccgaggaggtggtggcaaaggagacagaggaagagaagccagcaga

SEQ ID NO: 50177 - DNA, 280 bp, Glycine max
  Clone ID: 701138233H1
ggtttctgccaacgcataccaacaggaggatgaaagcaattgacaaagaaatacgagaatcacttatggtaatcatcaaccgaagattaaaagcaatcaaagcaggggagcctactaacaatgacttgttaggcatactcttggaatcaaattacaaggaatctgaaaaaagtagtggtggaggaatgagtttaagggaagtagtggaagaagtgaagctattttacttggcagggcaggaagcaatgcagaattgctggtctggacttgttgttattaa

SEQ ID NO: 50178 - DNA, 280 bp, Glycine max
  unsure (1)..(280): unsure at all n locations; Clone ID: 701138236H1
gatcaaatagctcccagtactttaattgatttctgaatatcatcacttaatttgaaggaaagatggtgagcgtantggagatccgccaggcacaaagggcagaaggcccagcaaccatccttgccattggaactgcaaacccaccaaactgtgttgatcagagcacctatcctgactactacttcagaatcaccaacagtgagcacatgaccgagctcaaagagaaattccagcgcatgtgtgacaagtctatgatcaagaggagatatatgtacctaaa

SEQ ID NO: 50179 - DNA, 279 bp, Glycine max
  Clone ID: 701138237H1
gcataatgtcagggatcattcacaagattggggagacccttcatgtgggagggcacaagaaggaggaggagcataagggtgagcaccatgctggagaatacaaaggggagcaccatggtgaacacagtagtgagtacaaaggagagcatcatggtgaacacaaagctggagagtaccatggtgagcacaagccagagcacaaagaggggttcctagacaaagtcaaggacaagatcctggtgagggcggcgccgccgagggcgagaagaagaagaagga

SEQ ID NO: 50180 - DNA, 257 bp, Glycine max
  unsure (1)..(257): unsure at all n locations; Clone ID: 701138238H1
ggccaacgaccaagggaacagaaccacgccgtcttacgtcgncttcactgacaccgagcgtctcatcggtgatgcggccaagaatcaagtcgccatgaaccccatcaacaccgtcttcgatgccaagaggttgattggtcgtagattcagtgattcctctgttcagagtgatatcaaattgtggcctttcaaggtcattcctggtgctgctgacaagccaatgatcgtggttaatacaagggtgaagagaagcattt

SEQ ID NO: 50181 - DNA, 271 bp, Glycine max
  Clone ID: 701138239H1
gcctttctcttctttttttcttctctcattattcaccatctcttccaaaaatgcagttccaagattatgagcctccctctagcccaaaacacatgatcccaaaagtgaccttactagcaatcttggtcatactaatatttgccgtaacccctttatggtaccctttgttgagttactcttcacacttgaacatcaataagaatattccatcatcatcttcatcatatgatcaaaggcaagaagaaaacttgccctcaacatatgtggagaa

SEQ ID NO: 50182 - DNA, 269 bp, Glycine max
  unsure (1)..(269): unsure at all n locations; Clone ID: 701138240H1
agatgatagggtgtattacaaggggatattcatttacacgtgctttattaggaattgctgctgatgaacttcacctttgtggtgatccagctgctgttcccctattcaggagataatgaaaattactggtgacgaaattgaggttcaattttatgagagactgtcacctttagtcccactgaaggttcctcttggatctttctctaatgtaaganatggtgactgcattgtaaccttttcacgtcaggngatatacaaattgaaggtga

SEQ ID NO: 50183 - DNA, 287 bp, Glycine max
  unsure (1)..(287): unsure at all n locations; Clone ID: 701138241H1
aatnggnctgcaaggcggcttctcntgngcctggttcgttacncngntcttnaaaaggggnaagagtngtgtgtctctcaaggactncaccttgttcggtcnttcattttgcagaacctaatcaaanctnaacttcagctcttntgcattgaggtngcaaganggattcgaacaaaagnctctgtgctgtgagggccgnaaacagtggctacagcctcttcccagcagttaccaagtctacaccagnaggggaganaacntnaggaaggcagtgttgttgatactgg

SEQ ID NO: 50184 - DNA, 272 bp, Glycine max
  unsure (1)..(272): unsure at all n locations; Clone ID: 701138242H1
ttatgtnangttatatatatataccatgatgccacnagncaacgtactancngcaatacacacccaccattggatccaccaatctccaacctnccttctccattgttccgtttctctctccaacggaattctgagggccccagaagctgatttgatctgggtttttctttgttttgtgttgaagggaagaacttttttttttgtgtgtgtttttggtggtgagtttgtnagaagcaatggcacgcaagaagntcagngagtatgactccaag

SEQ ID NO: 50185 - DNA, 278 bp, Glycine max
  unsure (1)..(278): unsure at all n locations; Clone ID: 701138243H1
cgagagagcgaaggggcaaacacaattttttttatcttcttttttattttttgtnnnnnnnnnnnnnnnnnnnatgttggggatcttcagcagttcagtggtgtcgccgccggaggagctggtggccgctggcagcagaacgccgtcgccgaagacgacggcggggaagctgctgaaccggttcgtggagagcaaggcgtcggcggtgtcgctgcaggtgggggaacacgtgcagttggcttacacacaccacaacgaatcaccgtggcatcccagat

SEQ ID NO: 50186 - DNA, 275 bp, Glycine max
  Clone ID: 701138244H1
gggcgtaaaggctctattacacaaattccaattctaaccatgcccaatgatgatattacgcacccaactcctgatctaacaggatatatcactgaggggcagatatacatcgacaggcagctgtataatagacagatatacccaccaatcaatgtcctcccgtcactatctcggttgatgaagagtgctattggtgagggatgactagaaaggatcattctgatgtgtccaaccagctctacgcaaattatgctatcggaaaggatgtgcaggca

SEQ ID NO: 50187 - DNA, 275 bp, Glycine max
  Clone ID: 701138247H1
gccgtatccttgttccttaaattacttcctcaactctctctatccgattcttcaataatatcacgcgtttcttgtacggtatccatcttcgggattctattcatcattcttttgcttccttaatcagcacgcggattcatgtttctgcagcatccaatttgattacaaccccaattattctccaattactgccactaaatatttggaacatctgattttctagtgcattgatggctaccccaagtaaatcaacaccaataatagcgtcagacact

SEQ ID NO: 50188 - DNA, 256 bp, Glycine max
  unsure (1)..(256): unsure at all n locations; Clone ID: 701138248H1
aatgcaactctattctgttcggtgacacaacatacatcactctgaagaacatagcacgcgtggcnnnnnnnnnnnnnnnnnnnnnnnntcaacaactctgctctcagaacagatacagtttccactgagtaaatcgcaatgcaggtaactgagacgaggactgttcaagttaagcagctttcagatctagctggtgtaagagagattcacgagttcttctccttttctggagaaatcgagcatgttgagatcctga

SEQ ID NO: 50189 - DNA, 273 bp, Glycine max
  unsure (1)..(273): unsure at all n locations; Clone ID: 701138249H1
gagggtagtgagggtaccggctataagcttgaagatggctgatattccaccagatgattattcttggagaaagtatggacagaaaccaattaaaggatcacctcatccaaggggttactacaagtgcagtagtgtgagagggtgtccagcgcgaaaacatgtggaacganctttggatgatccagctatgctggtggtaactacgagggagagcacatcacantctntctgctgctgatgctactaatctcattctagaatcgtcttgaagtc

SEQ ID NO: 50190 - DNA, 277 bp, Glycine max
  unsure (1)..(277): unsure at all n locations; Clone ID: 701138250H1
acaccctctcattgtgccattacaccattacttgtcctctttctttgttgttgacatacccttttgataatcaaacacatatcataacaaggtatatatatataccaaaatgtgtagctctaagaccaaagtgactgttggtttagaagnnnttgtcgctgctgcgaagccctcagtggctagaatcaatggaaggccagtcctccaaccaacttgtaacgtggttccaaaccttgagaggaggantccatcnaggaagntgnnaccacnaagtccc

SEQ ID NO: 50191 - DNA, 276 bp, Glycine max
  unsure (1)..(276): unsure at all n locations; Clone ID: 701138251H1
tgcagatgtagcttttgcataaggnatatactcttcacacattaaagtctggttacttggtgcttcaaaaatcacacaagttgtgtttcatgtactgccattttagatgcttgagttagatgcatgtgtatggtacactgatcgatgaatganatttacaagtcatctgagattactgttaggcgtatgacttctctgagcacgtatatacaagacgatgccaactttcataaatttccagttgtatcatttttctgggcacaagactaaggtaaa

SEQ ID NO: 50192 - DNA, 265 bp, Glycine max
  unsure (1)..(265): unsure at all n locations; Clone ID: 701138252H1
tgaaccattgtttttgttgttgacaagacaggnatttgggcctgatggacagcacagtgcattgcaggttttggttaatatcttagaacatccacagtgccgcgctgaccattcattgacttctcgccaagttattgaaccacttatccatttgcttgattctccaatttcagcagtacaacagttggctgctgagcttctttcacatctacttgtagangagcgccttcagaaggatccagtgacacagcaagcaattggccct

SEQ ID NO: 50193 - DNA, 274 bp, Glycine max
  Clone ID: 701138253H1
gggtttaacctttctggctgtgttaatatgcgtttcagcactgtcactgagtccttctgttgcgggggaagggcaaaataatggccttgttatgaacttctacaaggaatcatgccctcaggctgaagacatcatcacagaacaagtcaagcttctctacaagcgccacaagaacactgctttctcctggctcaggaacatcttccatgactgtgctgttcagagttgtgatgcttcactgttgctggactccacaagaaggagttgtctgaga

SEQ ID NO: 50194 - DNA, 273 bp, Glycine max
  unsure (1)..(273): unsure at all n locations; Clone ID: 701138254H1
ctggattcaagtgtggtatcaactaccagccaccttctgttgttcctggtggtgaccttgctaaggttcagcgtgctgtatgcatgatcagcaacaacaccgcagttgctgaggtgttctctcgcattgaccacaagtttgatctgatgtatgccaagagggcttttgttcactggtatgttggtgagggtatggaagaaggggagttttctgaggctcgtgaggaccttgctgctcttgagaaggatatgaggaggttggagcngaaggagc

SEQ ID NO: 50195 - DNA, 275 bp, Glycine max
  Clone ID: 701138255H1
gtgggaccaacacagtacataataagcgatccaattggccaaaacctttgtcactgcgctcaaaatctgttcttgctgttgctggggctgaccctttggaaatggcagaggattggaaccgcacagcccttcttgtgatcgacatgcagaaagattttatagaagatgggggtcccatgctagtaaaaggagggaaagacattgtcccaaatgttattaaggctgtcgatgttgctaggcagcgtggaattctcatagtttgggtagtacgggaa

SEQ ID NO: 50196 - DNA, 279 bp, Glycine max
  unsure (1)..(279): unsure at all n locations; Clone ID: 701138256H1
gggatacaatacaataccaagaagctacctagctacaagagactccactcatcaccacctcaagcaactaattaactagcatagggtgttttggattatagattgtacttggaagangatggaaaacactactgtgacatatcaaactgatctcaacctcaaggcaacagagcttagactggggcttccaggaacagcagaaagtgaggagaaaacactgtcagcaggtgctagaattaacaacaaaagacctttaactgaaacctctgatgagtgtgc

SEQ ID NO: 50197 - DNA, 275 bp, Glycine max
  unsure (1)..(275): unsure at all n locations; Clone ID: 701138257H1
ggccagccaaagtcaaagattacccacttgatcttctgcaccaccagtggtgttgacatgcctggtgctgattaccaactgaccaaacaattgggccttcncccctatgtgaagaggtatatgatgtaccaacaaggttgcttgcaggtggcacggttcttcgtttggccaaggatttggctgagaacaacaagggtgcacgtgtgcttgttgtctgttctgagatcactgcagtcacattccgtggaccaagtgacactcaccttgatagtctt

SEQ ID NO: 50198 - DNA, 275 bp, Glycine max
  Clone ID: 701138258H1
gcatggatgtggataatgatgcttttcgccgaatggcccggttgaccgatggtactttgagtgaggtgctgccaagaatatcagatactgatgtacaaatatcccgtcagcgtatttctgcatttctatcttcacacaccgcttatgaattacttcccgagtcaggcaaggttgttgctttggatgttgatctaccagtgaaacaggcatttcatatattgcatgagcagggagttttcatggctcctctttgggacttctgcaaggggcaattt

SEQ ID NO: 50199 - DNA, 266 bp, Glycine max
  unsure (1)..(266): unsure at all n locations; Clone ID: 701138259H1
gtcngtcaatangaancaccaaagtcaccaccaaaaggttatncagnatgtaatanccaananatntnaacnncnnttgcttatcattgtgattagtcagaagntagaaattcgtgttgagtnttgagttgaggcagagatcaagagnctggagggtgtgngccccgagcccctnagatcagaattngantccaaatccnnacatgacanngcntaagaagatgatgacgctttgaaanacagcactgaagccgaagtcaccanaa

SEQ ID NO: 50200 - DNA, 271 bp, Glycine max
  Clone ID: 701138260H1
gcagtatggagcagccgaagcttccaatgcgctcgtgaaaatggagttctagattttattttcatgtaattttggtttaggagagggttggaaagcccactgttggaccttacaatgtgaagggtatgtgaaagaaagcccacaacatgcattgcgatattttataaacctgcaagttctcgtttaggtggttgcactctttatgtatgatggtaggtgcttgtattttacttgtagttcctagttctctgttaggccatcttggtgacat

SEQ ID NO: 50201 - DNA, 112 bp, Glycine max
  unsure (1)..(112): unsure at all n locations; Clone ID: 701138261H1
cnaagaaaacaagatgtcngancagaccgcnttatggcagaggagagctttgatnctnccgcccggaccttattttctgcncttccgcttctcattcctccatcatcttccc

SEQ ID NO: 50202 - DNA, 275 bp, Glycine max
  unsure (1)..(275): unsure at all n locations; Clone ID: 701138262H1
caaaaatctccctttctaaccttattcttctntctcgtcctttcaccatcattgcgcatgcaattgttcctcaaaacgaaaccttcaaatttgagaactcaggtgaacttggaccctacatcgttgagtacggtgcagattacagaatgataagcatcttcaactctccattccaagttggtttctacaacaccaccccaaatgccttcactctagctttgcgtgtagggctccaacgctcggagcagctatttcgttgggtttgggaggccaat

SEQ ID NO: 50203 - DNA, 271 bp, Glycine max
  Clone ID: 701138263H1
cttagcaatgtgaaggattaccaccgtcgccacaaagtttgtgatatgcattctaaggctacccaggcactagttggaaatgttatgcagagattctgtcaacagtgtagcaggtttcatgttcttcaagaatttgatgaagggaagagaagctgtcgtaggcgtctggctggccacaataaaaggaggaggaaaacgcatcctgatgcaactgtagttaatggaggctctctgaatgaagaaaagggcagtagctatttgttaatgagtc

SEQ ID NO: 50204 - DNA, 272 bp, Glycine max
  Clone ID: 701138267H1
gccttcgtttgcgtttttatcacagaggaattaacatatatatagcaagcatggcagtcacactctacgaccttagctcttcctctgggttgaagaaacttgatgagtaccttctcccacgcagttacatcaccgggtaccaagctacaaaggatgatcttactgtttatgcagctttgccaactgctccatcagatgaatatggaaatgtttccaggtggtacaagcacattgatgctttgttgagaatctctggtgttactggcgaggga

SEQ ID NO: 50205 - DNA, 271 bp, Glycine max
  unsure (1)..(271): unsure at all n locations; Clone ID: 701138269H1
atattgagaaataatggagggttgtacttattgtgtgaagttgctatgccttgttgggtttgtggtgcttgtgagtactattgcaggggtggagagtgctggtgaatgtgggaaatctaccaccccagataatgaggcttataagcttgcaccatgtgcctcagcagcacaagatgagaatgctagtgtttctcagagttgctgtgctcaggtgaagaaaattgggcagaacccannctgcttcngtgnagttcctgnnctccannanngc

SEQ ID NO: 50206 - DNA, 273 bp, Glycine max
  unsure (1)..(273): unsure at all n locations; Clone ID: 701138270H1
tctaaatccttcttnttccctttgaagggaaaccttaatcattctttttagtacttcagaagataagcaatgttccctcagagaatgttcaaccctcctcttcctcctactaaatatacttcttctttgtacacacgggttcctgcaggatcaatttttaacacacaacacttttctnataacacaaatcttcacatgcatatttagttcatagctttttttctctgtctgcactatcatatcatcaagtgtgtctctctgcngctncnctcc

SEQ ID NO: 50207 - DNA, 259 bp, Glycine max
  unsure (1)..(259): unsure at all n locations; Clone ID: 701138271H1
cgccggcactctcagccgcgatcaccattccaatccctacttcaccactgaggcgtacccacaacagagccattgaatcttagccatgaggagaactggctttcacaggaggcaaagcggaggaggctcaggattcaaaggaatgattgtgaagttgtcggttgtgtgtggtgtcttgatctgnangnnctcatggtcctcntcttcacnnggactccttcaancntcnattcnatannggntcgannncggttnngag

SEQ ID NO: 50208 - DNA, 268 bp, Glycine max
  Clone ID: 701138272H1
gttctcgtcggggtcgctgcggaggaacctctcgtggcagttcacgcgccaggcctcgctggatcctcgccggaacaaccagcgttcagttcggccgccagtctcgctcgatccgattcgccgcagcccctgctccggcaacgccgagctcaccgtgccggagaacctggactccaccatgcagtctcttcatggcctgccgcggcgacgtcaagggagttgaggatttgctcacgaaggcatcgacgtcaacagcatcgacctcgac

SEQ ID NO: 50209 - DNA, 273 bp, Glycine max
  unsure (1)..(273): unsure at all n locations; Clone ID: 701138273H1
ttttctgctctttgaagaaagaagggtctttgcttgattttggagatgtctctgctctcagatctcatcaaccttaacctctccgataccaccgagaaggtgatcgcagagtacatatggatcggtggatcaggaatggacctgaggagcaaagcaaggactctcccaggaccagttagcgacccttcagagcttcccaagtggaactatgatggttccagcacaggtcaagctcctggtgaagacagtgaagtgnttttatacccacaagcc

SEQ ID NO: 50210 - DNA, 272 bp, Glycine max
  unsure (1)..(272): unsure at all n locations; Clone ID: 701138274H1
cttccccatcatctcttctacctacttcttctccttttgtgcaacttggcctctgctcaataacacagattctatatcctttgtgttgtgttgtgttgctcactctannnnnnnnnnnnnnnnnnnnnnnnnnnngacaacatcccaccatttgtggctgccctctattttagtccctagcctcaatcaatcatgccatcaggtgctaagaagaggaaagctgccaagaaaaagaaggaaaaggaaactgaaattaacaccaacccttcaac

SEQ ID NO: 50211 - DNA, 269 bp, Glycine max
  Clone ID: 701138275H1
ccaattccgctctcgattttcgatttcgaagtttgatagcaacgttggaaggaaaggtgagagcaaaatcgttggaagaatctggtttttgtgtcgtggttgttgttttcgcgatcaaaacgatgtcttcgccggacattgtctcgatattggagaactcgaaggagttcgatcgggtgaggaaagaacaagaggatattctgtcggagatcaacaaacttcacaagaagcttcaagcaatcctgaagtagttgagaagcctggggata

SEQ ID NO: 50212 - DNA, 252 bp, Glycine max
  unsure (1)..(252): unsure at all n locations; Clone ID: 701138276H1
cgcaactctctctatnaccaatccctanntatcccccctccacanngctgaacataattcaccanttcaccatcaatttcccctccaatttcccatttatgatccatttggcatttcatcatatttcaccacttgtcctactccacttggatgatttcctaacgtattgttttcacaaatccttgttcttcatcagctaatagtttgagtccaacgaattcagcaacactatagatatatgctatatcttcc

SEQ ID NO: 50213 - DNA, 268 bp, Glycine max
  Clone ID: 701138277H1
gaaatgggggagctttacgcgttggacttcgatggagtcatatgtgatagctgcggagaaagctctctctctgctctcaaggctgccaaagtgagatggcctggtttgtttgatggggtggattcaaccacagaaaattggattattgaccagatgcacacagtgcgaccagtagtggaaactggatatgaaaacgttttacttgtgagattgttgctcgagagcagaacaccaaccatccggaagtcttcggttgcagaggggctaa

SEQ ID NO: 50214 - DNA, 248 bp, Glycine max
  unsure (1)..(248): unsure at all n locations; Clone ID: 701138278H1
ggctttcaccgagtaacttcactttacccaactccacctgagacaaagatacccataattcgaccgcacgcacgcacgcacttgttctgactcagtgcttgtgttggacgcagaagaaccagaaaagaaaaacaagcacgaggagatgattaanttcgaagannccgagttgcgactcggcctccctggcgggtctgcgagtgatcacaacgagtcaacaaggtcaagggcagtggtggaaagagagg

SEQ ID NO: 50215 - DNA, 268 bp, Glycine max
  unsure (1)..(268): unsure at all n locations; Clone ID: 701138279H1
tctagttctggattccgactcgccgcattgactcggtccgggttggggtcgactcagttcggtttttcantctctcgcgaatctaatctataggaaaagctaagggcacatcacaatgaaggcattgattctggttggggggtttggaacaaggctgaggccactgacactcagttttcctaagcctcttgttgattttgctaacaaacctatgattctgcatcagatagaggcccttaaggccattggagttactgaggtggtgcta

SEQ ID NO: 50216 - DNA, 214 bp, Glycine max
  Clone ID: 701138280H1
aagaaccgataatagttgttccttcactctccgctctctctgccactgagccaagaagatggcctcacaggtttgcaaatctgcttccagagccgcgaggtcccttctatcctctcgttttcactctcaaggacgtgcgcttggggctgctgcggctgtttcattgagcagcaaagtgcctctttttttacggaaagaacggttctggaaatgg

SEQ ID NO: 50217 - DNA, 267 bp, Glycine max
  unsure (1)..(267): unsure at all n locations; Clone ID: 701138281H1
gcatgcagccactgcttgagttcctcaggcttcacagttataagggaaagaccatgatgttgaatgacaaagttcaaagcctggattctctccaacatgttttgagaaaagcagaagagtatctgatttcagttgctcctgaaacaccctaactcggaattcgagaaacagattccgggagattggtctggagagggggtggggtgacatgncgancgtgtcctcgagatgatccagttctctggacttcttgangcactgaccttg

SEQ ID NO: 50218 - DNA, 264 bp, Glycine max
  unsure (1)..(264): unsure at all n locations; Clone ID: 701138282H1
gacccatcagcagcaacaacgttgttgctgaacagcgaatattcgaggctgttcgtcgaggacacggacttgtacaatcgcattgtgttgggaaccctcttgccgcacttcgtgtggggcccatcccgcacttcctccagacgtggcttcgcaattacctcggcgggtcctcctctactcctctcgggcctcctgtggtgctcctaaattataattggagcgncacgnttatggttcccaanatgnantccctccnggagngca

SEQ ID NO: 50219 - DNA, 249 bp, Glycine max
  unsure (1)..(249): unsure at all n locations; Clone ID: 701138283H1
caataccatatattctctttctcttnncttgatttgtgttgtncnacagttaaaagtggtctanatgtctgaggcattggaagaggttgttccttcaatgaaaggagggtgtgaagaagaagggttgaacctggaggctactgagctgaggcttgggttgccagggtgtgagtcaccagagagggagggtgtgtttaagagtgtggtggtgtctggggccaagaggggtttctctgatgccattgatgg

SEQ ID NO: 50220 - DNA, 269 bp, Glycine max
  unsure (1)..(269): unsure at all n locations; Clone ID: 701138284H1
gagcctcatattggatacgacatcaaggcaaaanagattaagaaaaaggaaaagcaagacaagttggattcatttcttgcaagtgttgatgattctaagaattggcggaagatctatgatgagtacaatgatgaggtagttgagttgacaaaagatgaaatcaaacttgtccgtagactgctaaagaatcgggcaccccattctgactttgatccatatccagatggtgttgactggtttaaatgggaanacgccaaacatccattgtc

SEQ ID NO: 50221 - DNA, 226 bp, Glycine max
  unsure (1)..(226): unsure at all n locations; Clone ID: 701138285H1
ggaanctgagctaaggcttganctgcctggaccacgtaggaggcaanggcactgacagaagtgatcatcaggaagagaggtttctctgagactgaaactgaaactgaggaggatgagtctgctaccatgtggatttgatgcttaatcttccttctaaggangctgnggntgttgcnatccanntnataggcccagnnntttgctaaggggaanttctcnggctngc

SEQ ID NO: 50222 - DNA, 270 bp, Glycine max
  unsure (1)..(270): unsure at all n locations; Clone ID: 701138287H1
ttgatctccaaaaattgttcagaaacccaagaatccaaatcaaaattgggtttcatttctctctttctctcccactgtagagctgctagctaggcttggttacttcaaaccctctctgcttttcttcacttttctgttntgtgacttttgtccactgattccaacattaaacaaaaattggtccaagttcatttgtatatgcaatatctggttcaacagtaaaanggcttnaaatttnattaatncnanngnancggngtngccccngag

SEQ ID NO: 50223 - DNA, 271 bp, Glycine max
  unsure (1)..(271): unsure at all n locations; Clone ID: 701138288H1
cgaggccgaacccgatatctggatagtcatggttgccgacaaaagcaatgattcagaacctatatggngagttgatgcattaagaaaagttctcaaggaaattcactcactttttgtcatgtttcatggatctattagagcaatgctggananagaacccggcggaggactaacaagacggcatttgtatacctttatcatggattatctgagggattttcttgcggggaaaaagctccttttaccttcattccgtgattgcttaaaggna

SEQ ID NO: 50224 - DNA, 267 bp, Glycine max
  unsure (1)..(267): unsure at all n locations; Clone ID: 701138289H1
tgttttcttcgttgctacaattttngtagcatggcaatgccatgcgtacgatatgttccctctccgaatgaacactggctatggtgcccgtactccggaggtgaaatgccgcaagttggaggcttgctgtggaagcacacaacatctttggctttgagaccattcctgaagagtgcgttgaagcaacaaaggaatacatccatggcgaacaatatagatcagactccaaaacagttaaccaacaagcttacttttatgccngagact

SEQ ID NO: 50225 - DNA, 266 bp, Glycine max
  unsure (1)..(266): unsure at all n locations; Clone ID: 701138290H1
tgagcgtgttctgtatgtggacattgatatccaccatggtgntggtgtagaggaggccttttacaccactgacagggtcatgactgtttcgtttcataagtttggggattactttcctggaacaggtgatattcgcgatattggatatggtaaagggaaatattattcactaaatgttcccttggatgatggaattgatgatgagagctatcagtccttgtttaagccaataatgggaaaggttatggagatttttaggcctggtg

SEQ ID NO: 50226 - DNA, 266 bp, Glycine max
  unsure (1)..(266): unsure at all n locations; Clone ID: 701138291H1
accaagtccatggaaaaaattggcctggatatgcgcgttgctgctctagttaatgataccattggaacattagctggaggcagattctacaatcaggatgtcgttgctgctgtgattcttggtactgggacaaatgcagcatatgtagaacgtgcacatgctattccaaaatggcatggccttataccnnaatcaggagatatggttataaacatggagtggggtaatttccgatcatcacatcttcctctaacagaatatgatct

SEQ ID NO: 50227 - DNA, 266 bp, Glycine max
  unsure (1)..(266): unsure at all n locations; Clone ID: 701138292H1
caactcaccaacacagttgcattattttctttccagatccaactcaaaattgcaatgggagtagaagatacagatatttgtatcatcaaggagccagatcatgttgtagtctattcagatggcatttcccatgattcaggtcatgaagctggaagtgatcatcacaatattacagagtcttatgaacaaatcaatgagactactgaacatcatagttcagaggagagtgcaaaggaatatgaggtgaaggaatgtacaacagantt

SEQ ID NO: 50228 - DNA, 266 bp, Glycine max
  Clone ID: 701138293H1
gatggccttaaggcccatgctgcaaaacatgtgactgaaaaaatgatgcttaatgctggtaacatttacccccacaacaccccaaaaaccaaggaagcatattactacagaatgatctttgagaggttcttccctcagaactcagctaggctcactgctcctggaggagcaagtgttgcatgtagcacagccaaagctgttgagtgggatgctgcttggtctaacaaccttgatccctctggtagagcagcattggagtgcacatt

SEQ ID NO: 50229 - DNA, 265 bp, Glycine max
  Clone ID: 701138294H1
ccagtagtcatatgcttgtctcaaagattaagccatgcatgtgtaagtatgaactaattcagactgtgaaactgcgaatggctcattaaatcagttatagtttgtttgatggtatctactcggataaccgtagtaattctagagctaatacgtgcaacaaaccccgacttctggaagggatgcatttattagataaaaggttaacacaggctctgcctgttgctttgatgattcatgataactcgtcggatcgcacggcctttgt

SEQ ID NO: 50230 - DNA, 266 bp, Glycine max
  unsure (1)..(266): unsure at all n locations; Clone ID: 701138295H1
agactttgcttttcatttgcattgctacagtgtcgctttaccaaaacgccaaaatacagtgagattggttttaaagcaactccggcgtgaccacaacgccacttgttccagccatgcctcctgnaccagacccaacaacctctgttatcggaggagcaagaagagacagcctacgattcctcggagaaggtggtggtggtcggaatcgacgaccacgacggcgacgtggaggcgccgccgttctcatggcggaagtgtggctcttc

SEQ ID NO: 50231 - DNA, 264 bp, Glycine max
  unsure (1)..(264): unsure at all n locations; Clone ID: 701138296H1
gaaaactctgcaaacatgttggtttatcaggacctcnttacaggtgatgagcttctcctcggactccttccgttacaatgaaattgagaatggaatgctgtgggaagttgaggggaagtgggttgttaagggagcagttgatgttgacattggtgcaaacccttctgctgagggtggagaagatgagggagtcgatgacgcagctgttaaggttgttgacattgttgatacattcagacttcaggagcaacccgcttttgataa

SEQ ID NO: 50232 - DNA, 277 bp, Glycine max
  unsure (1)..(277): unsure at all n locations; Clone ID: 701138301H1
caacgccctcgacctattctcanactttaaataggtaggacggtgcggctgctctgttgagccgcgccatggaatcgagagctccaagtgggccatttttggtaagcagaactggcgatgcgggatgaaccggaagctgggttacggtgcccaactgcgcgctaacctagaccccacaaagggtgttggtcgattaagacagcaggacggtggtcatggaagtcgaaatccgctaaggagtgtgtaacaactcacctgccgaatcaactagccccga

SEQ ID NO: 50233 - DNA, 275 bp, Glycine max
  Clone ID: 701138306H1
tggagtcctcaaagatctatgcttacctcttcctttgcatgctcttcctctcctccgccactcccattctcggttgtggctactgtggcaaaccccccaaaaagcacaagcctggtaaaacaccaaagacacccacagtacccgttgttaagccaccagtcacaatccctcccattgttaagccaccagtcacaatccctcccattgttaatccaccagtcacaatccctcccattgttaatccaccagtcacaatccctcccattgttaatcca

SEQ ID NO: 50234 - DNA, 272 bp, Glycine max
  unsure (1)..(272): unsure at all n locations; Clone ID: 701138307H1
aagatggcctcacaggtttgcaaagctgcttccagagccgcgaggtcccttctctccgcttccagagcctcccatggacgtgcggttggggctgctacggctgtttcattgagctgcaaagtgcctcttttctacggaaagaacggttctggaagtggtnnnnnnnnnnnnnnnnnnnnnnnnnggatttcaggagcacttgctcttcctgccgcagcttacatgttccaagatcaggaggtgcgcgcactgagctggagcgcatttcattg

SEQ ID NO: 50235 - DNA, 272 bp, Glycine max
  Clone ID: 701138308H1
cgaatctgagaaatggcggattcttctcgggaggagaacgtttacatggcgaaattggcggagcaggccgagcgttacgaggagatggttgagttcatggagaaggttgcaaagactgtggaggttgaggagttgacggtggaggagaggaatctcctctctgtggcttacaagaacgtgattggtgcgaggagggcttgtggaggatcatatcctccattgagcagaaggatgagagcaggggcaatgaggaccacgtggccattataaag

SEQ ID NO: 50236 - DNA, 220 bp, Glycine max
  Clone ID: 701138309H1
cttcaagttatccagcaggccactttataatagttttgacataagtacattcacttccgacataatagtagatgaaatgctagctcgtacattacaaagtttctctcgatatatctctataatagttatgtttattgcatttgtaggacacttcacttgtaataacaggcaattcttgccactacgattaagttataaattaaagtttctaactcaccct

SEQ ID NO: 50237 - DNA, 253 bp, Glycine max
  unsure (1)..(253): unsure at all n locations; Clone ID: 701138310H1
cttnaccttctttcttcttatataaccgaacatggctaagtatcattcaagtgggaaaagcncttccatgactgctatagccttcctgtttatccttctaatcacttatacaggcacaacagatgcacaatccggggtatgttatggaagacttggcaacaacttaccaacccctcaagaagttgtggccctctacaatcnngccaacattcgcaggatgcgaatctacggtccaagcccagaagtcctcgaa

SEQ ID NO: 50238 - DNA, 269 bp, Glycine max
  Clone ID: 701138311H1
gcgacctccaccattggatggacgagaactacctccacaactgctttgctcacaccggcgaggttgtgtcggccaaggtcattcgaaataagcaaactggtcagtctgagggatatggattcgtggagttctattcacgagcgacggctgagaaagtcttgcagaactataatggcacgatgatgcccaatacagatcaggcattccgtctgaattgggccacattcagtgcgggggaaaggcgttcttccgatgctacttctgatctc

SEQ ID NO: 50239 - DNA, 270 bp, Glycine max
  Clone ID: 701138312H1
gaaatctgagcgtgatggcaaatggatggagctctagggaaaaatctaggttatcagtcagaagggtgcatcaggtcccgagacaggatgagaactccatggctatcactcctgttgttccaagtgacgaagagattgttgatgttaagcctcttcaagtttctagagatattgtgcatattcctggtccaaagaggtctaatttaagtttggataagctataatggaagcaatcactagcttgaaggagaatggtggttctaataagac

SEQ ID NO: 50240 - DNA, 270 bp, Glycine max
  unsure (1)..(270): unsure at all n locations; Clone ID: 701138313H1
aggggaagtacttagaaacagaaacacagagatggaaccagaaacatctctgaactttactttgatgctgactttcttactttatctgaacttggttatgggagtgctgagcgttgatcattatcgcagagttgacttncctgatgaattcgtttttggttcaggcacctctgcttatcaggtggaaggagcttctaacgaagatgggagaactcctagcatctgggatacctttgcccatgcggtgtatgagcatggagaaaatggaga

SEQ ID NO: 50241 - DNA, 272 bp, Glycine max
  Clone ID: 701138314H1
caaggcttggtgcaatggtaaattgttgccttgtggtttggaggtcatgggctcaaatcctggaaataacctctgcttgtaggggccttgataagggttttgtggatactggttattatctcaaatcaattacaatatatccaataaaatcctgtggaggtttcagtgcaagcagttggcctcttagcaacaatggcttgacacatgatcgcgagtggattctcaaaagcctaactggtgaaatacttacacagaaaaaggttcctgaaatg

SEQ ID NO: 50242 - DNA, 279 bp, Glycine max
  unsure (1)..(279): unsure at all n locations; Clone ID: 701138316H1
cttcgttctggcgaagaatggcggcgccgggctcatccgccggcnncggcggagggacggcgaaggctacggtggcggagcagatctcgcaggcggtgcagtccacctccaacctcctccaccttaaccggcactcttctcctgacccaggctcaactggttaagcttcctaagaatcttttggcaaaggtttccaccatcaagaatacagagcaggttttggagcagttgcctggggtgatatcatctcttgacgcacacatggaaaatgggttgcaa

SEQ ID NO: 50243 - DNA, 278 bp, Glycine max
  unsure (1)..(278): unsure at all n locations; Clone ID: 701138317H1
tccctctcccctccgctcccccaatttcccccaaactttctcccnccgccgcttcgccgccgcccctctcgctcgcnnnnnnnnnnnnnnnnnnnnnnnngacgccatggcccagaaaatcggaaagtccacgcgccgccccggctcgtcctccaaggcccgcgtctacgccgatgtcaacgtcgttcgccccaaggaatattgggactacgagtccctcaacgtccagtggggggagcaagatgattatgaggtggtgaggaaggtgggtaggggga

SEQ ID NO: 50244 - DNA, 276 bp, Glycine max
  unsure (1)..(276): unsure at all n locations; Clone ID: 701138318H1
gctgtgacttgttttgagttcaatcaaatcgcattggtatctgaaatcaggaaagatggttagcgtantgagcatcaggcaggcacaaagggcagaaggcccagcaaccatccttgccattggaactgcaaacccaccaaaccgtgttgatcagagcacctatcctgattactacttcagaatcaccaacagtgaccacatgaccgagctcaaagagaaatttcagcgcatgtgtgacaagtctatgatcaagacgagatatatgtacctaaacga

SEQ ID NO: 50245 - DNA, 277 bp, Glycine max
  unsure (1)..(277): unsure at all n locations; Clone ID: 701138319H1
gatctttttctgctctttgaagaaagaagggtctttgcttgattttggagatgtctctgctctcagatctcatcaaccttaacctctccgatnccaccgagaaggtgatcgcagagtacatatggatcggtggatcaggaatggacctgaggagcaaagcaaggactctcccaggaccagttagcgaccctttcagagcttcccaagtggaactatgatggttccagcacaggtcaagctcctggtgaagacagtgaagtgattttatacccacaag

SEQ ID NO: 50246 - DNA, 278 bp, Glycine max
  unsure (1)..(278): unsure at all n locations; Clone ID: 701138320H1
caacccaccaattataagttgccgtttcccttctcacttngctcgcggncattggaggaacccttcgttcgtgtcttgcggcattgaaccctgaacacatgactcagaagcaaagagacagagtcccagattccatggaaacccagtacgaggagagtgagaaagacgagtcttcttctgtttatagttcctcagaagatgaagaggaggaagagatagagaaggagctggctgatgtaacatttgaggagttgcaganagctcgctcgaatgggaca

SEQ ID NO: 50247 - DNA, 273 bp, Glycine max
  unsure (1)..(273): unsure at all n locations; Clone ID: 701138322H1
gcaagactttaaagtggctcaaatcaaagaaaattgatgtgaaactagaacaatcggtcgatttgagctcctcttctgaagaaaataagacatatcaaacttcaaatggagagactataaaagcagatcttcattttctatgcacagggnaaccacttggttcaacatggattagagaaactcttctaaagaatgacttggatgctgatggaaggatcaaggtcgatgagcacttgagagtgaagggcaagagcaacatttttgcattggagt

SEQ ID NO: 50248 - DNA, 274 bp, Glycine max
  Clone ID: 701138324H1
aaaatactgctaatgttaatatgaagtttggatggtcttattggcagaagatgctaggtggtgttcatcaatattctgaaaggtaaaacgattttggtttttaatgataatataaccatgaatctaacatcagatattgaacgctacacatcaaaaataaatcgagccaatgcatttaattgtaagtgtcttcatattacctgtgttctgtcacatctttttgcataatattggcactaagtcttttttgatagaaattgtgaagatgtactgt

SEQ ID NO: 50249 - DNA, 273 bp, Glycine max
  unsure (1)..(273): unsure at all n locations; Clone ID: 701138325H1
tgcaaagcctctattttttcttgtgaatttgaaggacgatgagttccacagaggtcgcagccacaacgaagaagggtggaagagggaaacccaagaccacaaagtccgtttcccgttcctccaaagccggccttcagttccccgtcggccgcgtcgctcgctacctcaaggccggtcgctatgcccagcgcgttggttccggttcccctgtttacctatctgcggttctcgnataccttgccgctgaggttcgttgcatttaataataatttg

SEQ ID NO: 50250 - DNA, 270 bp, Glycine max
  Clone ID: 701138329H1
gggagaagaagagcaaaatcgctgtgaaaatgagcggaacggtgaagaaagttagcgatgtagcattcaaggtgggaaggaacatcgattgggatggaatggcgaacttctggtctccgatgaggctcgcagggagttctccaatctccgtcgcgctttcgacgaggttaactcccaactccaaaccaagtttagccaggaacctgagcccattgattgggattactatagaaagggaattggcactcgtttggtggatatgtacaagga

SEQ ID NO: 50251 - DNA, 274 bp, Glycine max
  unsure (1)..(274): unsure at all n locations; Clone ID: 701138330H1
ctggtttatagatctttgcgaaggaggttnacagcgctcaaccaaagatgcagaacgaggaaggacagatcactgagctttacattcctaggaagtgctccgccacaaacagattgattaccgctaaggaccatgcttcggttcagatcaacattgggcatgtggatgagaatggcgtctacaatggccatttctccacttttgccctctgcggattcatccgtgctcagggtgatgctgacagtgctctagaccgcttgtggcagaagaagaa

SEQ ID NO: 50252 - DNA, 276 bp, Glycine max
  unsure (1)..(276): unsure at all n locations; Clone ID: 701138331H1
ctaaattctctgtctacttcaccaagcacttttggttgcagctttggttaatttccaatatggtgtttcctctcctatctatctttgctttactcaatcttgcagtggtggcaacccatgcannaaccttgccccctgaagtttactggaagtcgaagcttcccaccactccaatgccgaaagccattacagatatccttcacccagatttggcagaagacaaaagcacctctgtggccgtaggaaaggggggcgtaaacgttaacgcagggaaaa

SEQ ID NO: 50253 - DNA, 279 bp, Glycine max
  unsure (1)..(279): unsure at all n locations; Clone ID: 701138332H1
ggtaaccctccaacaacaacacttccgctgcgaaaaatgtctctggtggcgaacgaggatttccagcacattctgcgtgtgctgaacaccaacgtggatgggaagcagaagataatgttcgcaatgacctccatcaagggtattggaaggagattcgccaacatcgcttgcaagaaggctgatgttgacatgaacaaaagggctggtgagttgactnctgctgagttggatagtgtgatgactgtggtggcgaaccctaggcagttcaagatcccagac

SEQ ID NO: 50254 - DNA, 275 bp, Glycine max
  Clone ID: 701138333H1
gcggaatcagctagaattttctaataatggccaaagacgttgagcaggttacagagcaaggtgaatactccgcgaaggattaccatgacccacctccggcgccgttgatcgacccagatgagctcactaagtggtccttgtacagagccgccatagctgagttcatagcaacactccttttcctttacatcaccgtgttgaccattattggctacaagagacagagtgacaccaaaatccccggtaacaccgagtgcgacggcgttggcattttg

SEQ ID NO: 50255 - DNA, 274 bp, Glycine max
  unsure (1)..(274): unsure at all n locations; Clone ID: 701138336H1
aagttagcatggatggagcaccttaccttcgcaaantggacttncnagatgtacaagagttaccgagagctactctgattctttaggcaaaatgttcagctccttcacctttngcaattgtnaatnccaaggnatganggatttnatgaatganagcnagctgaatgatctcttgaacagctctgattatgtcccaacctatgaggacaagnatggtnactggatgcttgtcggtgatgtcccatgggagatgtttgttgaatcatgcaagcgt

SEQ ID NO: 50256 - DNA, 275 bp, Glycine max
  unsure (1)..(275): unsure at all n locations; Clone ID: 701138337H1
gcagccagcactcagagccagcgagnngccatcgcttcgcngcagtaatcgncggaaacgaatttcgncggnnccctgccgagatntcgcaatnnccgacgactcagatacctcgangaattnncctccggttatggtgntagggtntaaatagtacgtagtnttgcctnatatatggcgtcggagaatgtgangaccggggatgccgccgtcacnaccatcgtcaatctcggcgaggaggccaagctcgccatgaagggcgtcgtgaaaagctc

SEQ ID NO: 50257 - DNA, 271 bp, Glycine max
  unsure (1)..(271): unsure at all n locations; Clone ID: 701138338H1
tcctttatcctccttgcttattagtagtagtactactactcttaagtttttnattctgagggaagatcaagcagttatatatggaaattccaattccaattccactctcatctatgtncctctttctacttcttgtaccttgctgcatttgctcttccccacttcaagatcctgaactagtggtcgaagatgtacaaaagagcattaatgcctcaaggaggaacttagcatttctttcttgtgggacggggaaccccattgatgattgttg

SEQ ID NO: 50258 - DNA, 265 bp, Glycine max
  unsure (1)..(265): unsure at all n locations; Clone ID: 701138339H1
gtacccttgctctccaagaagatcgtgaagaagcgcgtcaagaagtttatacgcccncagagtgatcgcaagatctccgtcaagccaagctggcgcagacccaagggtattgattctcgtgtcaggagaaagttcaaaggatgcactttgatgcccaacattggttatgggctcagacaagaaaacccgccattatctaccaaatggtttcaagaaatttgtcgtgcacaatgtgaaagacctggaattctcatgatgcataaca

SEQ ID NO: 50259 - DNA, 273 bp, Glycine max
  Clone ID: 701138340H1
ccaatatctgggtgaggcctatcagtggactcacaatggtggttgaccttgaactcatgaagatcgttcagtatcacgacggtggcattataccagtaccaactgccgacaacactgaataccgcttttcacatcagaacccaccattcggtccaagacaacatagtctagcaacccatcaaccacagggtccaggcttccaaatcaacggacacagtattagttgggccaactggaagttccatattggatttgatccacgtgccggaattg

SEQ ID NO: 50260 - DNA, 231 bp, Glycine max
  unsure (1)..(231): unsure at all n locations; Clone ID: 701138341H1
tgantgaaagagggatggtaggagaaaaatgagaatggcgtgaatgtgaggagagaagagcctgaatattagaatcggatacccttaaagaagcggagataggagtgtgcgcctccaaacccaaggggcttcggaggggctcttcatcggaggcggtgctatattcccctccggattcccccaccatgaagagcctcttcaagcccaagccccgcactccttccgatatcg

SEQ ID NO: 50261 - DNA, 95 bp, Glycine max
  unsure (1)..(95): unsure at all n locations; Clone ID: 701138342H1
gattctttacaactgctacatgtggcaagcgacctacgaagctgcacaggatttggaaactggcttttgtggtgctgtggttgtatnaaattcta

SEQ ID NO: 50262 - DNA, 267 bp, Glycine max
  Clone ID: 701138343H1
gagatctccggcaccgttctccgtcaggtcagctacgtctccggctatgggacccacacgcggtcccgcggcctggctcctcgttttggggtgaggatggggatgggttctggtttctgtgacgaggggcatttgcggtattaccaggacaccaaaaaggttctcaccccaaagaagaagttgaagctgctcaagggtttctccaaattagggcttgcatcggatcccgagaaactcgccatgttctatgatcttcaacaaaacctc

SEQ ID NO: 50263 - DNA, 271 bp, Glycine max
  unsure (1)..(271): unsure at all n locations; Clone ID: 701138345H1
cgacgatgctgcattgctttggtaattgcatttgctggtgagaggtgaccccatctctcttttatctctctcttccaaaaagcaccgatttttgcgcacgccaacgcgaatcgcgaagagggtctcaccgagaacaaaaaatgggtgtttgtgggtcgaggcccaaagtgaacgaagaagacctctcatcannnnnnnnnnnnnnnnnnnnnnnnnntcatcgangaagaagaaggagaatcctcagaagacgcgtatcttctagaaagat

SEQ ID NO: 50264 - DNA, 272 bp, Glycine max
  Clone ID: 701138346H1
ccaccctcacatcacaatagtccaagtactccatcaacaccctcaggtggaaactgtggatcatcacccccacaacatcatgatccaacaccctcaactccatcaacaccatcaaaccctccctcaggtggatactatggaggtagccctccaacacctgtcactgtgagcccaccatctactccagttgaccctggcaccccaagcatcccctcaccaccactcattccttccccatctcctttcactggcacatgcaactactggaggaa

SEQ ID NO: 50265 - DNA, 263 bp, Glycine max
  unsure (1)..(263): unsure at all n locations; Clone ID: 701138347H1
tgtaaatctctccatttaccgcaacaatgacgagctcaggaaacagctgcctaatcacaacttccgaactggaagtgattgtnatgttattgcacacctgtacgangangatggagaagactttgtggacatgctggatggtatcttctcatttgttctactggacacccgtgacaacagttttatagtggctcgggatgctattggggtcacttccttgtacattggatgggggttagatggctctgtttggatttcatcag

SEQ ID NO: 50266 - DNA, 277 bp, Glycine max
  unsure (1)..(277): unsure at all n locations; Clone ID: 701138348H1
gagggtgtgtcttccataatctctcttaatggaacagttgaagccaagtgctgttaactccttctcctctcactccactcaccttcttggaggagagcagccaccgtttacggcgatgtcccttccgttgtttataacgacacaaccttcacgtggtctcagacgcgccgccgatgcctccagctggcctcngncctcgcctccctcggcatcggcngcggcnacgtcgtctccgtcgtggcccccaacatccccgccatgtacgagggccattctc

SEQ ID NO: 50267 - DNA, 264 bp, Glycine max
  unsure (1)..(264): unsure at all n locations; Clone ID: 701138349H1
ggagttcaacccaagtcacacgttgcagctcccacaaaaccatttttgctctantttgtatgtatattttgattatcttgatgaatctcgaattaggttttgggtgcagatgagaaatattacagctctgagatgatcaagtgcaaggntgaatcgaaatccttctccagagaccgtctgaatgacaatttctgtgactgccctgatggcactgatgagcctgggacttcggcttgccccaacggaaaattttattgcagaaac

SEQ ID NO: 50268 - DNA, 274 bp, Glycine max
  Clone ID: 701138350H1
cgagtttcacagcagcaatggtgtacgtcaaggctcagaaatcaaaagcctacttcaagagatatcaagtcaagttcaagagaagaagagagggaaaaaccgattaccgtgccaggattcggttgattaatcaggacaagaacaaatataacactccgaaataccgatttgttgttcgctttagcaacaaggacattgttgcacaaataatatctgctagcattgctggcgatattgttcttgctgcagcatatgcacatgagctgccacgata

SEQ ID NO: 50269 - DNA, 272 bp, Glycine max
  unsure (1)..(272): unsure at all n locations; Clone ID: 701138351H1
gacagtcctgttgggcgtttgggcctcagtgtttgctatgatttgagatttccagagatgtaccaattgctgcgtttccaacatgaagcacaggtactactggtgcctgcagcattcacaacagtaacaggtgaagcacactgggagattcttcttcgtgcccgtgcaattgagactcaatgctatgtcattgctgctgcgcaagtggccaaacataatgataaaagagaaagctacggtgacacattaattatcgntccatgggggacaat

SEQ ID NO: 50270 - DNA, 273 bp, Glycine max
  Clone ID: 701138352H1
cccaaacaaaccatggacgtgggtcagatgcagagacagtggatcgactacaccaaatccctcttcctcgagggcttcctggatggtcagtttctgcaacttcagcagcttcaggatgagaacaaccctgactttgtggtcgaagttgtctctctcttctttgaagattctgaaaggcttctcaaagatctcacctttgccctagatcagaatggcgttgacttcaaaaaagttgatgctcatgtgcaccagttaaagggtagcagttcaagc

SEQ ID NO: 50271 - DNA, 271 bp, Glycine max
  unsure (1)..(271): unsure at all n locations; Clone ID: 701138354H1
aatggcacttcgttgcttggtgatgtccctttctgttctcttcactcttggtcttgcgagagaaagccatgccagagacgaagatttttggcatgctgtttggccaaacactcccattccaagttcattgcgagatcttctaaagcctggccctgcaagtgttgaaatcgatgatcaccctatgcaaattgaagaaacacagtacccgaaaaccttctnctataaagaagaccttcatccaggcaaaacatgaaagtacattcagcaagcc

SEQ ID NO: 50272 - DNA, 262 bp, Glycine max
  Clone ID: 701138355H1
cgaatatcttgttgtttggagcgatccgagaaaaactctgtaaacatgttggtttaccaggacctccttacaggtgatgagcttctctctgactccttccgttacaaggaaattgagaatggaatgctgtgggaagttgaggggaagtgggttgttaaaggagcagttgatgtagacattggtgcaaacccttctgctgagggtggaggagaagatgagggagttgatgatgcagctgttaagttgttgacattgttgacac

SEQ ID NO: 50273 - DNA, 269 bp, Glycine max
  unsure (1)..(269): unsure at all n locations; Clone ID: 701138357H1
aaaaaggaaaacaatgggttccgataatcaccagaacttggagttcttgaaggagatcggtttgggctcttccaacattggctcttacattaatggccagtggaaagccactggttcttctgtcacttctgttaatccttctaacaatcagagtatagctcaagtgaccgaagcaactttgcaagattttgaggaggggttgcgagcttgcagtgaagcagctaagacatggatgactataccggcaccgaagagaggtgagattgtnc

SEQ ID NO: 50274 - DNA, 270 bp, Glycine max
  unsure (1)..(270): unsure at all n locations; Clone ID: 701138358H1
gaacagtgtaagtgtatacagagagtgcttganaaaccatgcagccagcctcggaagctacgccacggacgggtgcggcgagttcacggtggacggcgcggggggactacaatgcgcggcgtgcggctgccaccgcaacttccaccggaaagtgaagtacccggtggcggagcatgaggagtatggaggcaagaagcggttcaggtccaagttcacggcagatcagaaggagaagatgctggggtttgcggagaagcttggttggaantt

SEQ ID NO: 50275 - DNA, 260 bp, Glycine max
  unsure (1)..(260): unsure at all n locations; Clone ID: 701138360H1
tttcttcctcgcctagctagctccagaaaattaggatctgcttcagatctagngtttccctgtcccaaatcacgagtccattgagtttgattttgtggatgaaaagcatagatagggcttttgcaaaactctccaatgtttcttgaaattatatgaccatgcgtcgaattcgtatgctgcactccttctccgtcgtgttcctctactggttctacgttttctcatgaactccctcttaaatccgtgattaattagatcta

SEQ ID NO: 50276 - DNA, 269 bp, Glycine max
  unsure (1)..(269): unsure at all n locations; Clone ID: 701138361H1
ttcaanccctagatttcaatctagggtttctttgcacgctaattccatcttcaaattctgccttcattcgattcaggggggaattaaattgttacctattttttttcgaatttaccacaaattagaaatcgntaaagaaaaatggtgagggtgttgagaaactgcnttcaatcgattttnaagctggtgaacncggtgattgggatggcggggctagccatgattctgtactccgcatggatgattagggttggcagaggaagatgggg

SEQ ID NO: 50277 - DNA, 267 bp, Glycine max
  unsure (1)..(267): unsure at all n locations; Clone ID: 701138362H1
ttcccatgcgccatcttcaggagttccgtcttcaagccatcgatggcttcgaccttaaccagcgccttgtttttgatgaaattttcaaggagggtgatcttgttgatgtctctggcaccaccattggcaagggtttccaaggtggaatcaagcgtcataacttcaaaaggggtccaatgacccatggttccaagagtcacagacaactaggatcattggtgctggaaccacactggtctgtgtacaanggntaangatgcctggccg

SEQ ID NO: 50278 - DNA, 269 bp, Glycine max
  Clone ID: 701138365H1
gaaactttaatttgcagaatcttcttattttgacagcaataaaggctgatccatccagagttatggattatgttaatagattggataattttgatgggcccgcagttggaggaatggctgtagaagctcagttatatgaggaagcatttgccatttttaagaagttcaacttgaatgttcaagcagtcaacgtgttgcttgataagattcatagcattgatagagctgttgagtttgctttccgagttgaagaagatgctgtttggagt

SEQ ID NO: 50279 - DNA, 270 bp, Glycine max
  unsure (1)..(270): unsure at all n locations; Clone ID: 701138366H1
ccaaaccctagcggcactacacactagttctatcgctatctccccaagatgtcgagcgccgatcccgagcacagagaagaggaggaggcacccgccgttggcgncgacgaggacaccggagctcacgtcgctccaatcgtcaagctcgaggaggttgctgtcaccaccggcgaggaggacgaagatgcaatcctggatctcaaatcgaagctttaccggttcgacaaggacgggaaccagtggaaggagcgtggcgccggcactgtgaag

SEQ ID NO: 50280 - DNA, 270 bp, Glycine max
  Clone ID: 701138369H1
cgaaacaacccacccaaccctaattcaactcttccgatctgatcactgtgagtaaaaattctaaatgagccgggcacaggatgcaaaccgatcattcttcccttttggaaatccttttaggatgatatcaccgaaaggcccaaaaatttcttcacagctgttgttaatattacatgcttttgaagcaactttggaagagaggctgaaaaagcttattcccaagagcaaggatgagatcctcagcttgtcttggatgactttggccatgca

SEQ ID NO: 50281 - DNA, 268 bp, Glycine max
  Clone ID: 701138370H1
gaaaaactcgatggaaaaatggtggtttaattctatgttgtttaataggaagttagaatacaggtgtgaattaagtaaatcaatggatagtcttggtcctattgaaaataccagtctaagggaagaccctaaaattttaaccgatatagaaaaaaaaattcacagggatttggattatttagaaatggaaggttttttttctagcgatctgaatactgtttctaagaatgatgatgatcattacatgtatgagactcatttagtttta

SEQ ID NO: 50282 - DNA, 271 bp, Glycine max
  unsure (1)..(271): unsure at all n locations; Clone ID: 701138371H1
cttgcacatgggttagtcgatcctaaggnacgggggaagcccgtctnnatagcgctctgtgcgcgtactccgaaagggaatcgggttaaaattcctganccgggacgtggcggctgacggcaacgttagggagtccggagacgtcggcgggggccccggaaagagttatcttttctgtttaacagcctgcccaccctggaaacggctcagccggaggtagggtccagcggctgggaagagcaccgcacgtcgcgtggtgtccggtgcgccc

SEQ ID NO: 50283 - DNA, 268 bp, Glycine max
  unsure (1)..(268): unsure at all n locations; Clone ID: 701138372H1
gaaanatcatttttcataaaagtgacaggtgaggttagaagagtggctaatcactgagagaactacacctgtaaagtgtgtaacctacgaatattatcgtatgattcatactaaatatatctnnnnnnnnnnnnnnnnnnnnnnntttcagctccaacttccaacgagactgcgtgtggtatccttatagantggctgcaatattacccttttcattttgaagtatcgtttgaaattgaagtacaatggcactttccttcagggaaga

SEQ ID NO: 50284 - DNA, 269 bp, Glycine max
  Clone ID: 701138373H1
ggacaatatagtacggcagcaggagcttgcagcatatttcactcactgcaaccttcagacacctcacttgaggttagctttgcagaatgcaatgactgtctgcttcaaggcaaagaaccttgccactgctgcaaactttgcccggaggctacttgagacaaatcctaccaatgaaaaccaagctagggcagcaaggcaagtggtagcagctgctgaaaaaactatgactgatgctacccagttgaactatgatttccgcaacccatttg

SEQ ID NO: 50285 - DNA, 247 bp, Glycine max
  unsure (1)..(247): unsure at all n locations; Clone ID: 701138374H1
agaacctctcttatcttctttgtaacnactacgacgaagtaacnaacaatggtggcgggaactgcaaccttgaagcttagcctctccgctttttcttctccaatgtcaaatttcagcgcttcctcttcattcccctctcgtctcccaatgcgaaccccttcttcttctaaacctcgatttctcaggatttacgccngaccagcaacgacatcaaggtcggcaccaacctcgaagtcgatggtgctcc

SEQ ID NO: 50286 - DNA, 268 bp, Glycine max
  unsure (1)..(268): unsure at all n locations; Clone ID: 701138375H1
attctntctacgtgcaagtcaaaaccngcattcgcaaaantcacaaacttcaccgaacttccgtataaattctcttcnncttcngtgattattactgnaagangaatagaancantcagcnatggcanagaagagattncatcatcgaggtcgagaaggcganggnggcgagcgaaggaaggncttcgagaggaactgnctatcgtagnctctcgcnaangatggattccctgntcctatccaaggtctcaatantgctgggacgttt

SEQ ID NO: 50287 - DNA, 259 bp, Glycine max
  Clone ID: 701138377H1
cggcattaaaaatgcagatcttcgtgaaaactctgacagggaagactataaccctcgaggtcgagagcagcgacaccatcgacaatgtcaaggccaagattcaagacaaggaagggcattcctccggattcagcagcgtttgattttcgccggaaagcagcttgaagatggaaggaccctggccgattacaacatccagaaggaatcaacccttcatctcgtcctcaggcttcgtggtggcatcattgagccttccctc

SEQ ID NO: 50288 - DNA, 258 bp, Glycine max
  unsure (1)..(258): unsure at all n locations; Clone ID: 701138378H1
cttctacgcggtgttcggcggtttgggagcggttgttgcagtgacggagctgagcangagcaacaaggaccgaatcaacacctcttccgcattcaattccttcaagaacaactacctcatcgtctattccctcatgatggctggagattggctacaaggtccatatgtctactacctttacagtacatatggatatgggaagggagacataggacaactcttcattgctggttttgggtctccatgctctttggaaca

SEQ ID NO: 50289 - DNA, 261 bp, Glycine max
  unsure (1)..(261): unsure at all n locations; Clone ID: 701138379H1
cgcggtggttcggcggggaacaagttccggatgtcgctgggtctgccggtggangcgacggtgaactgcgccgacaatacgggggcgaagaacctctacatcatatccggtgaaagggatcaaagggcgtttgaaccgtctcccctcggcttgcgttggcgacatggtgatggccaccgtgaagaaggggaaacccgatctgaggaagaaggttttgccagctgtcattgttcgccagcgcaaccatggcgccgaaaggac

SEQ ID NO: 50290 - DNA, 265 bp, Glycine max
  unsure (1)..(265): unsure at all n locations; Clone ID: 701138380H1
ttgaagtaatccacccacgggtttcttggagttgtgatcaactacgttacttctctcttggttttcttcatcttccaccntcacctgttggaatggcaaggaactacttcaaacaagaacatgatcttgagaagagaagagctgaggctgctaggattagggagaaatacccagacaggattccggtaattgtggagaaggccgaaagaagtgacatcccaagtattgacaagaagaagtaccttgtccctgctgacttgactgt

SEQ ID NO: 50291 - DNA, 231 bp, Glycine max
  unsure (1)..(231): unsure at all n locations; Clone ID: 701138381H1
tgcaatggctgctattgttttcctccacattgcatcattggcctctctttttgttgcaacaagnccaagaatccctggagtttacaccggtggcccctggcagagtgctcatgccaccttctacggtggcagtgatgcctctggaacaatgggtggtgcttgtgggtacggaaacctgtacagccaaggctacggagtgaacactgcggcgctgagcactgccctgttcaa

SEQ ID NO: 50292 - DNA, 270 bp, Glycine max
  Clone ID: 701138382H1
gccgtttgtgttgttttcgggacgaagaagaagatggtgtcaggttctggaatctgcgcaaagcgggtggtggtggacgcgcgccaccacatgctgggtcgtctagcctccatcgtggcgaaggagcttctgaacggccagaaagtggtggtcgttcgctgtgaagagatttgcatctcgggcgggctggtgaggcagaagatgaaatacttgaggttccttcgcaaacgcatgaacaccaaaccctcccatggccccatccacttccgt

SEQ ID NO: 50293 - DNA, 270 bp, Glycine max
  unsure (1)..(270): unsure at all n locations; Clone ID: 701138383H1
ttactaagtatgatgattttnaactcaagtcaagcgttaccaagaacaatgattttgaaccgagaccaagtgctaccaaatatgatgattttgaactcaggtcaagcgttaccgagaatgatgattttgaaccgagaccaaatattagcaagtatgatgactttgaactcaggtcaagcgttaccgagaatgatgattttgaatcgagaccaagtgttaccaaatatgatgatttagaactcaaatcaagcattaccaaaaacgatgatt

SEQ ID NO: 50294 - DNA, 271 bp, Glycine max
  unsure (1)..(271): unsure at all n locations; Clone ID: 701138384H1
atccagaggttcttggccacactgcnccataactgtctccatactcttgggaaatggaaaccccgttcagtgcttcgacggcggtagccaccaaaaacagcaacacagtttgtgtgaagagctcattatcccctacggttacccctgctccgagcatacgattcaaacgaaggatggtttcttgttaggtcttcaacgtgtcnnnnnnnnnnnnnnncttcggcttcggaacgatggagaacgaggcccnccggttctgcttctgcatggc

SEQ ID NO: 50295 - DNA, 270 bp, Glycine max
  unsure (1)..(270): unsure at all n locations; Clone ID: 701138385H1
accatgtcacttgctgggaaaatcaccactgaaatcggggttcatgcaaccgctacaaagtggttcaacctcttcgcaacacaactccatcatgttcaaaacctaactgatagagtgcatggaaccaagctgcatcaaggtgaagactggcatcacaacgagacagtcaagcactggacttataccatagatggtaaggttacaacatgtctggagagtattgaatccattgatgaacagagcaaancatcacctacaagctcttcagtg

SEQ ID NO: 50296 - DNA, 271 bp, Glycine max
  unsure (1)..(271): unsure at all n locations; Clone ID: 701138386H1
ggaggttgttttggcgtcgtcgtccgtcganggcggnatanggtgctgggaccttcacaccggcgcngagcngctaccgctanaaatcttgcacctccccttctcatggcctcgtctctntcgctgctcgcttcatcgcttcgtcgcagcttcgagaagatcaatcagcccctggctctgttcctcttctggtcctggtccaagcctcaattgangtgnagagttttcctggctgaacaaattaaacctctngctactaatcacccgggaa

SEQ ID NO: 50297 - DNA, 269 bp, Glycine max
  unsure (1)..(269): unsure at all n locations; Clone ID: 701138387H1
ttattgaattgacaatgaggcctgctcttgctttgcttcctcttctatttgctttcttgttagctgccactacagaatcaagaaaagatacaggggaatattggaaaatgatcatgaaagatcaggaaatgccagaaggacttcaaggtcttgtttcatttcaatctganaataaccctaagactcaagagcagcttggtanangttccaaaaaccattgtgaagagtctctagttacaaatacacaagttaatagtgacttcgaaccc

SEQ ID NO: 50298 - DNA, 270 bp, Glycine max
  unsure (1)..(270): unsure at all n locations; Clone ID: 701138388H1
ctgaaaacagtgcataggagaaaaaacaggaacatatgttggaattnattactatgtataataatcatctgactactaaacacacataatcatgagcaactacccaagtttgactggattgtccaattggaacttgattagggtcaggcatcacttcatgtntgtgcgtgagcttcccttctgttttcctttgtttccgcaacagctaaaaagggttgttaattgtaactaactataactggttttgaatttttagtctttgatatatat

SEQ ID NO: 50299 - DNA, 267 bp, Glycine max
  Clone ID: 701138390H1
gccctgtcaagaatacaacccagatctttctttttctgttttggatttgaaaatgccaaactggtgagctaagaggccttgaaaaaggagggacagggagcatgatgagtagcatggaggacaattagtgaaggatagagggaatcaatttaaggtggtggaaatattataaactaggccctcttgtgcattttatgctcaaagttgctctctcctttaccatccttgtctgagctctagcttttttctcgaaagcttcctttttgg

SEQ ID NO: 50300 - DNA, 264 bp, Glycine max
  unsure (1)..(264): unsure at all n locations; Clone ID: 701138391H1
cggcttctgcttcaaggaaggagagcttgttattctctatcaacaagtaaaatgtcaggtgaagagggtgtcattgcagttgagcnnnnnnnnnnnnnnnnnnncatcccaggcgagccaatggatatcatgactgccttacaacttgtgctcagaaaatctctggcttatggtggtttgtcgcgtggccttcatgaaggtgcaaaagtgattgagaagcagctgcacaactctgtgttcttgcagaagactgtgaccagcctg

SEQ ID NO: 50301 - DNA, 269 bp, Glycine max
  Clone ID: 701138392H1
gaagaacccttgctgactataacatccagaaggaatctaccctgcacttggtgttgcggcttcgtggtggcatgcaaatctttgttaagactttgactggaaaaaccataactttggaggttgaaagttctgataccattgataatgtgaaggcaaagataagcctctgttggtctggtgggataccttccttgtcctgaatcttagctttccacattgtctatggtatctgaacttctccaccttccaaggttatggtctttccggtc

SEQ ID NO: 50302 - DNA, 268 bp, Glycine max
  Clone ID: 701138393H1
ggaaatttaagtgaagagagaatgatgatgaagtctgctatgtgtgcattggtgcttgtggcactggttgtggttgaagtggggcccatggctgaggctgcggtgacttgcaacccaacacagttgactccttgtcttccggcaattaattcaggttctgcaccttcgagtgcttgttgccagaagctgaaggagcaaaagccatgcttctgtggctacctcaaaaaccctagcttgaagcagtatgttaactctcctaatgccaaaa

SEQ ID NO: 50303 - DNA, 270 bp, Glycine max
  unsure (1)..(270): unsure at all n locations; Clone ID: 701138394H1
ctcgagccaaaaacctctttttaagttncttgcttctttctctctgaaagaaaattgaagtcctaaccagttggctcttttgttttatcgttctccatggctcagaaaaccgagaaagaagaaaccgacttcaaagttccggaaacgattacgctttgcgtcaacaactgcggcgtcaccggaaaccctgccacgaataacatgtgccagaagtgcttcactgcctctaccgccaccacttccggcgccggaggtgcggaatagcttctc

SEQ ID NO: 50304 - DNA, 274 bp, Glycine max
  unsure (1)..(274): unsure at all n locations; Clone ID: 701138395H1
ggaggcaccccttgaaggatctataccagacatgacttcttctactgagcaatatgtgaatttgcagaatatctatcacgctaaagctgaggctgactttcttgtaatagagcgtctagtgagaagtactttgaagaagattggtagagattcaaatagcatttcgaagtcaataattaaaagcttctgtaaaaatgcaaganaactcaaagtttgcaggtaccgtctaattgaagatgagtttaattctccaaacctacctgagttacagaag

SEQ ID NO: 50305 - DNA, 274 bp, Glycine max
  Clone ID: 701138396H1
gggacactctctatttcacagatctatatctaagtgtcggtgatcccctttctccttccttctctgagagacaatgacaatgacgtgggcgcgattcgattcgtggaagcagcaatactacaccacaagcggcgtggtggtaggttacgcagtatgctccagcctcctggccatcatcaacaaatacgccatcaccaaattcaactacccaggcctcttaaccgcgctccagtacctcacctccgcactcggcgtctagtctttgggaaattag

SEQ ID NO: 50306 - DNA, 269 bp, Glycine max
  unsure (1)..(269): unsure at all n locations; Clone ID: 701138401H1
ggagtgggaactatgctaagatcatggacgcggtgcttgcggcaccggattacagcnngaagcgtttnntgattttggtaaagaagggtgtttatgttgagaacgtggagatcaagaggaagaagtggaatattatgatggttggagaggggatggattccaccattatctccggtaaccggagtgtcgtcgacggttggaccacattccggtcagctacattcgctgtgagtggcagaggattcatagcaagagacatatcctttcag

SEQ ID NO: 50307 - DNA, 266 bp, Glycine max
  unsure (1)..(266): unsure at all n locations; Clone ID: 701138402H1
agatatcactactacaccaccctgacanagtttnttcagctataatactacttgagcttctttacctacttttcaaacctacattgcacacaaaatggcaacctcttggtcatgttatctacttgcattgcttctttttatgtcaactattgtatcagagagtagagtggcaaggaaggacttgggcctggaccttggtgggttgggggttggacttggactgggtttgggcctggggataggaggtggcagtggctctggagctg

SEQ ID NO: 50308 - DNA, 265 bp, Glycine max
  unsure (1)..(265): unsure at all n locations; Clone ID: 701138403H1
agaagatgaagttcaatccacgagtgtcgagcagccgccgcaaganccgaaaggntcancttcacggcgccgtcgagcgtgcggagggtgctgatgagcgcccctctgtcggcggagtccggtcgaagtacaacgtgcggtcgatcccagtccgcaaggaggacgaggtgcaggtggtgcgcggaacatacaagggtcgcgaggggaaggtgacgcaggtgtaccgtcgcaagtgggtcatccacatcgagcgcataacccgcga

SEQ ID NO: 50309 - DNA, 261 bp, Glycine max
  Clone ID: 701138404H1
aaaattctctcttcctttttgggttctcctattccaagcttcaatcttttctctcttctcacagccttcttcactcacaggaggtgaagatgtcgactccggctaggaagagactgatgagggattttaaaagattgcaacaagatcctcctgctggcatcagtggggctccccaagacaataatattatgctttggaatgctgttatctttggcccagatgacaccccttgggatggaggtacgtttaagttgacacttc

SEQ ID NO: 50310 - DNA, 260 bp, Glycine max
  Clone ID: 701138405H1
cttcctccagtagtgcgattttcgattctcttctctggcaactatgacctaaccctaaggtcttcttcgacatgaccatcggcggtcaacctgccggccgcatcgtgatggagctctacgccgacgtgactccgagcaccgccgagaacttccgcgcgctctgcaccggcgagaagggcgccgggcggagggcaagcccctccactacaaaggctcgtccttccaccgcgtgatcccgaacttcatgtgccagggcggcg

SEQ ID NO: 50311 - DNA, 256 bp, Glycine max
  unsure (1)..(256): unsure at all n locations; Clone ID: 701138407H1
gtttctttcttgatcatgtcgcttgttggtaaaattagtactgaaattggggttcatgcaactgctgcaaagtgnttcaacctctttgcaacgcagctccatcatgttcaaaaccttactgatagagtgcatgaaaccaagctgcatcatggtgatgactggcatcacaacgagtcgatcaaacactggacttgtacaatagatggtangattacaacatgtctggagagtattgaatccgttgatgaaccgaaca

SEQ ID NO: 50312 - DNA, 208 bp, Glycine max
  unsure (1)..(208): unsure at all n locations; Clone ID: 701138408H1
ggttaggnccagtaagagttgttgttgtttataatttganaacgtcaaggcagccaacaaactaggggggttgttcttcatctgttttgtatggacatgaagaagggatattcagttnccttgacaaaacaacaacataaganagagccattttttgcagttcatcacacaaganaacaacaccaatgcatccaagcaaatcatgatg

SEQ ID NO: 50313 - DNA, 260 bp, Glycine max
  unsure (1)..(260): unsure at all n locations; Clone ID: 701138409H1
catcatctcccaattgggttccaagcgcanccacatgtttggcagcctttgccgcnctccttctcctcttnnnnnnnnnnnnnnnnnnnnnnnnatacaacctccccccaggcccaaagccctggcccatcataggcaacctaaacttaattgggtcccttccacatcggtcgatccanacgcttagcaaaaaatacgggcccatcatgcacgtatggttcgggtcgagctccgtggtggtgggctcgtccgttgaaatt

SEQ ID NO: 50314 - DNA, 261 bp, Glycine max
  unsure (1)..(261): unsure at all n locations; Clone ID: 701138410H1
gnggnatnataccagtancaactggcgacaacactgaatancgnttntcacatcagnacccaccattnggtcnaagacancatagtnnggcaacccatcaaccacagggtccaggcttccagatcaacggacacnganannagttgggccaacnggaagttccatattggatttnatccacgtgccggaattgtaatatcactggcatgcatctatganntggagaagnacaannntcgnagagngtnatncaaaggctnc

SEQ ID NO: 50315 - DNA, 262 bp, Glycine max
  Clone ID: 701138411H1
ttcaaaggcaatcctctatgataagttccactttccaaggtgctgatacttcagcgggtccaaatgttagtgccatcaataagatcatggttatggaaaactactctgcttgtagtagtgaaggtaagtctttgtttttggttcagaaccaccaagtctgtgataacccgtatggactagatatgaatatgatcaactgttcaacgggtatcacaccaaatacatcgcagtttgattattcttggccattagcccaacaaag

SEQ ID NO: 50316 - DNA, 261 bp, Glycine max
  unsure (1)..(261): unsure at all n locations; Clone ID: 701138412H1
cttgttgacaaggtcctagacaagactggcatgaagggcactggnaagtggactggncagcaagctgctgaattatcaattgctgctcccactattgaagcatcattggatgcaaggttcctgagtgggntgaaggaggaaagagttgaagctgcaaaggtctttaaatcaggtggtattgntgatatcgtgactgatcaacctgtagacaagaaaaaattggttgatgatgttaggaaggctctttatgcagccaaaatc

SEQ ID NO: 50317 - DNA, 264 bp, Glycine max
  unsure (1)..(264): unsure at all n locations; Clone ID: 701138413H1
ttcaagctcattgttccctgaaaanaattttgcatgactaactaacctacctaacgggggncatnnaaattttacaattatttnatctnctgcctctactnttttgccaggccaacatctagttgcatacttgangcattgcatgttgatcctgcttctggtgtgtcaattnataangataaggncactaaagtcttgaaaccatcagtaaggtatgacatcatccaacagtgtatatntgaatggacatttttgtaatnatat

SEQ ID NO: 50318 - DNA, 262 bp, Glycine max
  unsure (1)..(262): unsure at all n locations; Clone ID: 701138414H1
cttcacgaggttttcctgatatgaagatcaagggttcgcctgaatatgtgcgaggnngctgtgaagctagcttgaagcgtcttgatgttgaatacattgatctctattatcagcacagagtggacacatctgtacctatagaggaaacagtgggtgaacttaagaaattggtcgaagagggtaaagtcaaatatattggattatctgaagccagcccagatacaataaggagagcacacgcaattcatcccatcacagctgt

SEQ ID NO: 50319 - DNA, 266 bp, Glycine max
  unsure (1)..(266): unsure at all n locations; Clone ID: 701138415H1
gcagtcgcaaccctaatcagaagaagcgcanttcaagcgagtgacagccaccagggntgggtcgtatgcacagccgcggtaagggtatatcctcttctgctttgccctacaaaaggacacctcctagctggctcaagatctcttcgcaagatgtcgaagaaaatatctgcaagtttgcgaagaaaggtttgaccccgtctcagattggtgtcattctcagagattctcacggtattgctcaggtcaatagcgtcactggcagcaaa

SEQ ID NO: 50320 - DNA, 260 bp, Glycine max
  unsure (1)..(260): unsure at all n locations; Clone ID: 701138418H1
gttactgctgctcttttctcttttcttttctctttagttctctcttcccctnnnnnnnnnnnnnnnnnnnnnnnnngagcttgtttaagcttttcttccattaacatattatcacaatgtgtggtattcttgctgttcttggttgttctgatgactctcgagccaaaagggtccgcgtgcttgagctctctcgcagattgaagcaccgtggccctgactggagtgggctccatcaacatggtgactgctttttggcacat

SEQ ID NO: 50321 - DNA, 261 bp, Glycine max
  Clone ID: 701138419H1
ggaagtgcaagcgcagagagaagaatgaacaactctattatggcttttgttctgctaatattactttcggcgttacgctactcaagcgccgaacaagctttcgatgttcgcaaacatctttccactgtctccagatatggagttgtgaaagacatcgctgacactaacttcgtgccttctaaaatccccgagggatgtgttccgatccatttgaatctcgtggcgaggcatggaactcgatctcctacaaagaaaaggata

SEQ ID NO: 50322 - DNA, 256 bp, Glycine max
  unsure (1)..(256): unsure at all n locations; Clone ID: 701138420H1
gatgatcaggacttgtcacttaggagacttaatgaatatcaaacgcatctccgaacacttcaaaaagaaaagtctgatcgccttcaaaaggtcttgcaatgcgtgaatgaggtgcnctctctttgtagtgtgcttgggttggattttggtcagaccgtgggtgatgttcatccaagtttgcatgggactcaggtggaacagtcaactaatattagcaatagcacattggaaggtctagagcaggccattctcaagt

SEQ ID NO: 50323 - DNA, 254 bp, Glycine max
  Clone ID: 701138421H1
ctgagataacagggagtaggagtgcttgttcttgttgtattgtgtgtacaaaacctgaggttattctattcaagttgtctttggatgtcagtcatgtgcagcaagaaaatatagccaaaaaattcattggtgttggagattctgtagaatttgacaaaggtgtagcctgtccaaggttacctatttaattttgggttggaaatttgaagatacataaaaatgtcaatggctgctccaagttccctattgaaggt

SEQ ID NO: 50324 - DNA, 255 bp, Glycine max
  unsure (1)..(255): unsure at all n locations; Clone ID: 701138422H1
atggggcgcaaagagaagcagaacgcgaaggcaatagatgaggaacacgacgtagtaaattttaacggcgcttcaacgccgtccctcgttttcagcagcgacgacgatgaagccaaccaagatctcagcctcaagatcgtcgaaaaggccatgcgaatgcncgccgccaaacacgccccaaacgacgacgtttcttctccgttttcgcagaaatccgaactcgcagtgcccctaaacgacgtcgtttcggatttg

SEQ ID NO: 50325 - DNA, 245 bp, Glycine max
  unsure (1)..(245): unsure at all n locations; Clone ID: 701138423H1
taaacttgatgccaaaactgcaaaagcgttcaaagagaagattgatgatgagtatcgagtgaacatgtatggcattcagtaattgtcatgtattttcatgccacttttctgctgcaatcttgatatcttataatggacctaccttttacttgcaggatccttgataaccttcctctggttgttcccataaaacngatggatgcagactctactgtttatcaacttggtttccatgttggactcaa

SEQ ID NO: 50326 - DNA, 228 bp, Glycine max
  unsure (1)..(228): unsure at all n locations; Clone ID: 701138424H1
ggtggaacttccacntttcattttgcgaacttcattncaccctctctcgtatttccgctctgnntgtgtctcattcctgtgcttttgaatcatattcttcgatctgttcttcaacatattttctgctttcaaccgttgcgcgtcgtgactcagcttcgaattgttcagtataaggtattttcaattctcattgttttgctgtttgttctctattcgttctggggcttc

SEQ ID NO: 50327 - DNA, 258 bp, Glycine max
  unsure (1)..(258): unsure at all n locations; Clone ID: 701138425H1
ggaggaggaggttctgatcttctttcttttttgtctggttccctttcttccttnaaccaatttcgagatccgaaaccggcatcagatccgatccgaaatgtacggattcgaagctctcaccttcaacatccacggcggcttcctagaggccatcgtccgcggccaccgcgccggcctcctcaccaccgccgattacaacaacctctgccaatgcgaaaccctcgacgacatcaagatgcacctctccgccaccgagta

SEQ ID NO: 50328 - DNA, 259 bp, Glycine max
  unsure (1)..(259): unsure at all n locations; Clone ID: 701138426H1
cccaccattactcagcactgccattcttcaatcacactaatggctgtcaccttnncagatcttcacaccgaagagggcatcaaatccctcgatcaattcctttctgggaaaacctatatctctggggatcaattgacaaaggatgatatcaaagtgtatgcagctgttgtggaaaagccaggagactcttttcctaatgctgctaagtggtacgatgccgtctcttctcaacttgctccaagcttccctgggcacgctc

SEQ ID NO: 50329 - DNA, 260 bp, Glycine max
  unsure (1)..(260): unsure at all n locations; Clone ID: 701138427H1
cgacaatattcactccgggaatggcttccctaccctttccgttgatgaacaagnggttgccatagagctgccactgaaatacggtccattcattgagtcagtgaacaagagagggctgaacctctctgaggtggtgtgttccacattcacaatggggtggtttggagaaaccaaggacagaaggacagtgagagtggaatgcttcatgaaagaaagcagccccaatatctgggtgaggcctatcagtggactcacaatgg

SEQ ID NO: 50330 - DNA, 259 bp, Glycine max
  unsure (1)..(259): unsure at all n locations; Clone ID: 701138428H1
cactcccatacacacacgttgtctcgcacacattccttcattccgcagcagcanncatctttaccttaaacgacaacaatggccgatgccgaggatattcaacccctcgtttgcgataatggaaccggaatggtcaaggctggttttgccggagatgatgcgccgagggcggtgttccccagcattgtggggcgtccacgtcacacgggagtgatggttgggatggggcagaaggatgcgtatgttggggacnannctc

SEQ ID NO: 50331 - DNA, 259 bp, Glycine max
  unsure (1)..(259): unsure at all n locations; Clone ID: 701138429H1
ccgaaattaagtgggagcatcacaaagttcatgataagaagtcaataattacngngtttggngcctctgcaacttatggcactgctgatggaagtacaattattgcctcgtgttcagaagggactgacatcattctttggcatggaaaaactgggaagagtgttgggcatgtcgatacaaatcaattgaaaaataacatggctactatatcacccaacggtcgttttattgcagctgcagcatttactgccgatgtgaa

SEQ ID NO: 50332 - DNA, 260 bp, Glycine max
  unsure (1)..(260): unsure at all n locations; Clone ID: 701138430H1
gcaaagctagtcgaaaggaatgtgcttctttcatggttggtctgccagtttnggtcagatatgagtacctcatggctgaaacaatattctctcagctgctgatgctaccacaaccacctttcaaaccagtatattacacactggttattattgacctttgtaaggctcttcctggagcttttcctgcagntgtagctggagcagttcgtactctctttgagaggattgctgatttggatatggagtgtcggacacgtctg

SEQ ID NO: 50333 - DNA, 263 bp, Glycine max
  unsure (1)..(263): unsure at all n locations; Clone ID: 701138431H1
ggttgctcttggaattgttatctttgaggtaagctaagaagttgtatgattgggnnttnaaagaaagctatattgttttgcagtcatatatgtctttgtgcttgtgcccacagataaatagtctctaggattataattcactaatcaaactatccattttataaaggatttaactagattggaccaataacaaattgagaatgctgaactcttgataaggagaatacactgtttattttattgataatttgatatttgatagg

SEQ ID NO: 50334 - DNA, 267 bp, Glycine max
  unsure (1)..(267): unsure at all n locations; Clone ID: 701138432H1
gctaggtagtccaaccactgaatcttgggcagatggactcaaacttgccagggggatcaactatcagtttccacagcttgcnggngcnaatctctctacactgatcccatccagaagcgatgatgcaatcagccttgtgacgtcactttgttcatgggatccctgcaagagaccaactgcagcagaggttcttcaacatcctttttttcagagttgctttacatccctccatcccttcgcaccagagctgtaaccagaactccacca

SEQ ID NO: 50335 - DNA, 264 bp, Glycine max
  unsure (1)..(264): unsure at all n locations; Clone ID: 701138433H1
gtgggactgaacaagaggttcagcaaaactgtataaattgtggtgtttgtatgggcaagtacttctgtggaacatgcaagctttttgancgatgatatatctaagcagcagtaccattgcagtggctgtggaatttgcagaactggaggaagcgaaaatttcttccattgctacaagtgtggttgttgctactcaactcttctgaaaaacagtcacccttgtgtagaaggagcaatgcatcatgattgcccggtttgttttgag

SEQ ID NO: 50336 - DNA, 252 bp, Glycine max
  unsure (1)..(252): unsure at all n locations; Clone ID: 701138434H1
gaattcttgaatggtaagggtgtggtttacacgcccgtgaaggatgtggacttangcccctatagcaccgagttctacctccaagccaatgtcaangctccccgcatgactggacttttggtcaagattttcactcatttgttggagtgtccaatacttggaaccttgctactgttcatactgaaaggaaacaatcttattcaccggctcatcacaaatgcagagttcaaagaatcgcctctctttgttccc

SEQ ID NO: 50337 - DNA, 259 bp, Glycine max
  Clone ID: 701138435H1
gtttccttccatctccgccgtaccatgtcggaagcaccaccgcctccaactgccgatgcgtcaccgcctccgtactggtgctaccactgcgagaagcgcgtctccgtcgaaacgctcgcgaatctccccgacgtcgtctgcggcgagtgcaagaacggctttgtggaatccatgcccacgccgtcgcgctctcgctccccctccgcctcctccgacgacccctacttcggctcgcagttcctccaggtccttcgcctaa

SEQ ID NO: 50338 - DNA, 255 bp, Glycine max
  unsure (1)..(255): unsure at all n locations; Clone ID: 701138436H1
tttaacagttcccctcgaaacttctgaagatgggtggcattgcattncggacgcttggatgattctttcagtttaacctcaatcaaggcctatattgctgagttccattcaaccttgctctttgtttttgccggtgttggttcagccatagcctatggtaagttgacatcagatgcagcacttgatcctgctgggttactggcagttgctatttgccacggttttgcactctttgttgcagtttctgttggtgcc

SEQ ID NO: 50339 - DNA, 231 bp, Glycine max
  Clone ID: 701138437H1
ctgacttctacctttgtttcaaacccaagttcagacaaacagcagcgaggtttttcataacaaaggagaatgaaggctttttcagttaaagttgaggaaggaagggaaggtaaaaatggtaacctttctgttggtccagtataccgtaacctcctctcagaaaatgaatttcctccaatggatcctgatttcagtaccacttgggatattttctgtgtgtctgtcaaaaat

SEQ ID NO: 50340 - DNA, 227 bp, Glycine max
  unsure (1)..(227): unsure at all n locations; Clone ID: 701138438H1
ctcgagcnacttgcgttgcttgantgatgtncctttctactctcttcactcttggtcttgacngagaaagccatgccagagacgaagatttttggcatgctgtttggccaaacactcccattccaagttcattgcgagatcttctaaagcctggccctgcaagtgttgaaatcgatgatcaccctatgcaaattgaagaaacacagtacccgaaaaccttcttctat

SEQ ID NO: 50341 - DNA, 252 bp, Glycine max
  unsure (1)..(252): unsure at all n locations; Clone ID: 701138439H1
cgaancccaatcctcaccctactacctaaaccctaacaaccctaaactcccggaacacgtgtcctccctcaccggcaaccggctgaacctgcacaaccgaatcctaaccctaatccgcgaaaacgacctcgacgaggcggcgctgtacacgcgccactcgatctactccaactgccgccccaccatcttcacgatcaacgccgtcctcgccgccctcctccgccagtcccgctactccgacttcctctccct

SEQ ID NO: 50342 - DNA, 204 bp, Glycine max
  Clone ID: 701138441H1
gttcgcccagccaacatgagctcaatcgttcagggtttcaccaagtcgctggccatgaccattctctctgagatcggcgacaaaactttttttgcagctgcgatactggctatgcgacacccaagacgcctagtcttatcaggttgcttatcggctttgattgtgatgaccattctctctgttcttgttggctgggctgctcca

SEQ ID NO: 50343 - DNA, 255 bp, Glycine max
  unsure (1)..(255): unsure at all n locations; Clone ID: 701138442H1
atcattctcacactcactttctctgtcccctcttcttcgtcgtctccgtgggcttttatccgtttctatttttccaattttgccctccgctttttccccatttcccaattttgccctcttcttctaccatgacctacttgaagtcgtagctcgagtccgtgtncgcttttncaattcccaattttccaaactccgtagggtttncgtcgaataatggaacctcgagttgggaacaagttccgcctcggtcggaaa

SEQ ID NO: 50344 - DNA, 185 bp, Glycine max
  unsure (1)..(185): unsure at all n locations; Clone ID: 701138444H1
gcaaggttaatnatgatggancagattttgcgactggtaactactantctgggncnttttctttcatttttccacggctctnggtgccagtccaaaatctgcnccatcatcattagccgtgcctagttgacttagtnactnaancaaggttaatcnncagcagacacagaggnacagancagngt

SEQ ID NO: 50345 - DNA, 262 bp, Glycine max
  unsure (1)..(262): unsure at all n locations; Clone ID: 701138445H1
ctatntcctcattntctgtgtatatcngctgannattccgaacgantaannggggtnntttctcncaaagtttaantaatcatgngtaannanaatgttcacatcaacattgtcgtcattngacatatcnactgctgggaagtcanctaccactggtcacttggatctacaagcttggangtattcgacaancgtntnattgagcaggtcganaagnatgctgccgagatnaacaanangtcatncaantatgcctgggttc

SEQ ID NO: 50346 - DNA, 259 bp, Glycine max
  unsure (1)..(259): unsure at all n locations; Clone ID: 701138446H1
cagaggtttacctttgacaatgcttgctgtatggcgtttggatatgatcnggnttgccttccaaacaagttcagtactaagctctcacactttgcttatcagaaagctttaattgtgcttgaggatgtagcattccacaggcacatcacaccaagatgtttgtggaagctgcaggagtggcttcaaattggtaaagaaaagaagtttaaggaggccatagaagcttttgataagttcttgtttgaacgtattgcatcta

SEQ ID NO: 50347 - DNA, 262 bp, Glycine max
  unsure (1)..(262): unsure at all n locations; Clone ID: 701138447H1
ctccgctctctcatcataccgcactctcgggaagttacttcctcttccctggnactctcaatggggtctccatttcctcgcccacgctcaccgcctccaccagatgaagaaaaggccatgtggggtatatgcatccctctccgagagtggagagtattattcccaccgaccgccaactcccctactagacaccgtcaactatcctattcatatgaagaatctctctgccaaggagctgaaacaactcgcggatgaactgcgt

SEQ ID NO: 50348 - DNA, 263 bp, Glycine max
  unsure (1)..(263): unsure at all n locations; Clone ID: 701138448H1
gatgaagatgatccacgttcttttcctctttgctcttgtctcgttcacttggnatgcttctgtcaatgatttctgtgtagcagacctaaaaggtccagatagcccttcaggctatcagtgcaagccacctaacacagtcacagtggatgactttgtgttctctggctttgtagctggaaacaccacaaacactttcaatgctgcattaacctccgcatttgttactgattttccaggtgtgaatggtcttggtgtatctgtgg

SEQ ID NO: 50349 - DNA, 241 bp, Glycine max
  unsure (1)..(241): unsure at all n locations; Clone ID: 701138449H1
gcgtgatccaaanacccgcctaccacaatgggcgttaccttaccccactctttaacttcagacgccaatgagcttaaaggagtgcctccaggcatgctggtgaaactgattccatctcatgcaagaaagcagtgtgccttgtttgcgtcatagtgtagcctcgtgtaaatattatctactctgcctgtagaagtgtatgtagtctgtttcaggttgttaatagttggttccttccacctag

SEQ ID NO: 50350 - DNA, 256 bp, Glycine max
  unsure (1)..(256): unsure at all n locations; Clone ID: 701138450H1
caaccacatgtcacactacacaactgtgatcttccgcaggcacttgaggatgaatatggaggatgggttagtcgtgatatcataaganacttcacaaactatgcagatgtgtgttttagagagtttggtgatagantccagtactggactactgtnaatgancccaatgcctttgccttgggtggctatgatcaaggaacctcccctcctcagcgatgttctcccccattttgcactacaaacagcactaggggca

SEQ ID NO: 50351 - DNA, 254 bp, Glycine max
  unsure (1)..(254): unsure at all n locations; Clone ID: 701138451H1
gtnaactcgttctatggaatccatcaattggtgtatacaaacggttacntttntctgacgnatatgacttaatcaatggatacctatatggttttggctatgacatatcaacagatgactacttgcttattctgatttgtttaggtgcatatgctctatttttctccttcaaaaccaattcctggagcagagtcgatcttcatgctcgntatgtggatcctgacagtgaattccaagctgggactctcttcagt

SEQ ID NO: 50352 - DNA, 108 bp, Glycine max
  unsure (1)..(108): unsure at all n locations; Clone ID: 701138452H1
cagaaacccaacatttttctcgtgaaacgttcttcgttgaccatggagnnctctgtgcccttcagattccgatcacggaacctcctctcaccttccacacaacatacg

SEQ ID NO: 50353 - DNA, 249 bp, Glycine max
  unsure (1)..(249): unsure at all n locations; Clone ID: 701138453H1
ggaaggagaaaatggaaagaagctgaaaatattgtgcctccatggattcagaacaagtgggagttttcttaaaaagcaaatcagcaaatgggatccttctatattcactcaatttgatatggttttcccagatggtaaataccctgcaggagggaagtctgacatagaaggcatcttccctccaccttactttgagtggtttcaattcgaaaaggacttcacagtgtactttaacttggaagaatgnat

SEQ ID NO: 50354 - DNA, 248 bp, Glycine max
  unsure (1)..(248): unsure at all n locations; Clone ID: 701138454H1
ctgacccttctagtgttgcttctttggttgagtttgttaagatcaagtttgggagacttgatatcttngtgaacaatgcaggaataagtggattcaatacagatggcatggtgccatccaaaattaattggaaggagttacctcaaacttatgagatggcagaaaaatgcctaacaacaaactactatggtgctaaggaaacaactgaggcatttattccccttcttcagttatccaatttacccatg

SEQ ID NO: 50355 - DNA, 245 bp, Glycine max
  Clone ID: 701138455H1
tttgaagaagaagcagttcaattgatcaactcagatttcagggacctaagtctagctgctaatagactcgcccatcatgccatcaaacttggtggcattggctttggagcctcttttttcggattgtttgctgccattgctgctatttatctgttgattttggatcgtacaaactggaaaacaaatattctcacagcactactcattccatacatttcttcagcttgccttcataatttcgacgt

SEQ ID NO: 50356 - DNA, 251 bp, Glycine max
  Clone ID: 701138456H1
gacagagcaggggatcctcttctagcccagcaaacttctgaatcagaagctatgaggctggtcaaagctactccttttgattatgggagtggtcatgttgatccaactgctgcattggaccctgggctcatctttgatgcagggtacgaggattatataggcttcttgtgcacaacacctagcattgatgttcatgagataaggaactacactcacaccccatgtaacacctccatgggcaaaccatcaaa

SEQ ID NO: 50357 - DNA, 201 bp, Glycine max
  Clone ID: 701138457H1
tgattgaagaagatgccgatcagaaacatcgccatcggaaggcctgaagaggctactcaccccgacacgttgaaggcggggttggctgagttcatctccaccttgatcttcgtgttcgccggttcaggttccggcatcgcctacaacaagctcaccgacaacggcgccgccactcccgccggcctcatctccgcttccatg

SEQ ID NO: 50358 - DNA, 253 bp, Glycine max
  Clone ID: 701138458H1
tagaagactcattgtggtagctgctgctgcaccaaagaagtcatggctccctggtgtcagaggtggtggcaacctcgtcgacccagaatggcttgatggatcgctaccaggtgactatggctttgacccactaggccttgggaaggacccagcattcctcaaatggtacagagaagctgagctgattcatgggagatgggcaatggctgcagttctaggaatctttgtgggccaggcatggagtggagttcca

SEQ ID NO: 50359 - DNA, 253 bp, Glycine max
  Clone ID: 701138459H1
gctagctaggttgaaaatagtttggttttgtagtaagtgaggtgaggtgccaaaatggtgaagataactcttggtactttcgatgactcttttggtgttgcctctcttaaggcttatttggcagagttccatgcaactctgattttcgtgttcgctggtgttggttcagccatcgcttacaacgagcttacaaaagatgcagccttggatccaacggggctggtggcagtagctgtggcccatgcatttgcac

SEQ ID NO: 50360 - DNA, 254 bp, Glycine max
  unsure (1)..(254): unsure at all n locations; Clone ID: 701138460H1
aaggaggcttccttctccagcctcactgtgaggtcaacaacagagacntccacagtgggaacacggaatgccataccagtcaattttccattcaaagcagggaggacttttccaacagccttggcagctccagtgctgctaggaatgatgttaaatgaagcagctcttccacctctccagtctttggctgatggcccatcaacagtcttctgggtagcagtgatggaatgaacagtggtcatcaaaccctcaac

SEQ ID NO: 50361 - DNA, 255 bp, Glycine max
  Clone ID: 701138461H1
aaaaaaatgcaagtctcttggtgccgtagccatggtccatgcagaaaggggagatgctgtgtatgaagggcaacggaaaatgatagaacttggaataactggtcctgaggggcatgctctttcaaggcctgcagtgttggaaggagaggcaactgctcgtgccattcgcttagcagattttgtgaatactcctttatatgtggttcatgtaatgagcattgacgcaatggaagaaattgcgaaagcccggaaagc

SEQ ID NO: 50362 - DNA, 238 bp, Glycine max
  unsure (1)..(238): unsure at all n locations; Clone ID: 701138462H1
caacatcatcaaactcctcgcatttggnggggtntttccctcanctattcaacagaaaaaaagcttccatttttgctcagatcttcctcttgctcctcccgttcctgttcctgggttttnattactttaatttgacaagcatatctgtttcttatactgaggatacttgccaattgataaacagtgaagaatagctcctccatatagttttatgaacatacagttgcagaagttccaa

SEQ ID NO: 50363 - DNA, 259 bp, Glycine max
  unsure (1)..(259): unsure at all n locations; Clone ID: 701138463H1
cttggatctgcagaagttgaagaagaagagaagaagaagatgcagngggacttccgtcgcttcgctcctcaccgtcctcaccagttctcagggaatactaacaaccctctcgcaaagtaacnagagtacaagtatgattacnccacggtcccatttctngcaaagtaacggagagtacaagtatgattactccacggtcccatttnttgccgaggttttcaagcttgcngtgtcaagtttgttactgtggagggaatgc

SEQ ID NO: 50364 - DNA, 265 bp, Glycine max
  unsure (1)..(265): unsure at all n locations; Clone ID: 701138464H1
tatnacnccccatcacnactcatgtccataaatctacgcacccacgcctnggcgggtaacccgctnccgatcccccaaccgggtncaaccgttttcgcccgnctccgcgctcgagaccctcacgacccgaatcctcgacgccgcgcacgtgtcctcaccgtccgtggattttaaggtcttgccttttagaaatgggagggtgctggcttcttcggagagtggtgacacgtggcgcctcgggtggatcgcgctggaggaagtgaag

SEQ ID NO: 50365 - DNA, 240 bp, Glycine max
  Clone ID: 701138465H1
cgagaagaaaacatcattctcacaggagaaatatagacttaagaagcagaagaaatatgcaccaaaagtacttatgaggcgtcctgttgctcgaagtatatgtgaggcctattttaagaagtatccatctaaaattggattcttgcgggtggacacattgtcccttctactttccatgggtaatgtttcttcaaattctgacattcttgtagttgatatggttggtggccttcttactgg

SEQ ID NO: 50366 - DNA, 254 bp, Glycine max
  unsure (1)..(254): unsure at all n locations; Clone ID: 701138466H1
gtcgtcngttcccaatatcactattttattggtttttcactattgtccctcctttctcaccactctaacaagcccttctcagtactgcacattctgatacaaacccaactcctacatatatattcttcttcttttccttccccatccctctgcaccacatctgttatttttctcacttttttcagttactctttaaatacttgtccatcccttttccctttcccccctcantcactcttatcattttcacttta

SEQ ID NO: 50367 - DNA, 244 bp, Glycine max
  unsure (1)..(244): unsure at all n locations; Clone ID: 701138467H1
ctcttcttctcttgcggcnagggttttagcgcacttnttctagatttaaggaagangggtaangaaaaggttcacatcagtattgtggttattggccatgttgactctgggaagtccactaccactggccacctgatctacaagcttggaggcattgacaagcgtgttattgagagatttgagaaggaanctgctgagatgaacaagaggtcctttcaagtatncctgggtgcttgataagctt

SEQ ID NO: 50368 - DNA, 250 bp, Glycine max
  unsure (1)..(250): unsure at all n locations; Clone ID: 701138468H1
gtacaggcaacaatggcaataacaaggagattttagcttacttgagtgctgcagaaacatatataggagtaaaaccagctccaatcatagcaggattctcatccaggggncccagttccgtgcaaccattgatactaaagccagacataactgctcctggtgtgaacgtaattgctgcttttacacaaggagctggtccgtctaatcttccatcggatagacgccgatctcttttcaatgtgcaacaggg

SEQ ID NO: 50369 - DNA, 247 bp, Glycine max
  unsure (1)..(247): unsure at all n locations; Clone ID: 701138469H1
gtccccgtctcatcgatgatttctcttacgtgctctatttgtctatttaggatcaccccttcaaagaaagtttctggcttttcttcgtagctcctaaaagttattaaagtaaaagcacaatattatatataatcttggtacgcgttaagccttgcccttttttttttctttcttcttttgtttcaatgaatggttttcgtttgaattgaaaacctgcaaagaaagcatcgattttgaatggnggaag

SEQ ID NO: 50370 - DNA, 237 bp, Glycine max
  unsure (1)..(237): unsure at all n locations; Clone ID: 701138470H1
ttaactattgagaacaataattttaggagtaaatgtgatgtcatggagaaggaatacaatgatctaaagttcagtgctgtaaagaaggctgctttggactctaaggttttaagagaaaaagaagaggagcttcatcagctaaaggatcagtttgaacttgccctaggtgaagcaagcaaaagccagatcgtcattgctgatttatcccaaganagagatgatttgaaggaggctcta

SEQ ID NO: 50371 - DNA, 245 bp, Glycine max
  unsure (1)..(245): unsure at all n locations; Clone ID: 701138471H1
cgcacattacaaagcctgtctttatgctggcatcaacatcagtgganttaatggagaagtgatgcccggtcagtgggaattccaagttggaccttcagttggaatctcagctggtgacgaggtgtgggcagctcgttacatcttggagaggatcactganattgctggtgtggtggtttccttgatcccaagccaattcagggtgattggaatggtgctggtgctcacacaaactacagcactaa

SEQ ID NO: 50372 - DNA, 249 bp, Glycine max
  unsure (1)..(249): unsure at all n locations; Clone ID: 701138472H1
gggatgcttcaagcaccaggtgccacaagttacataggttgcataggaaaggacaaatttggagaggagatgaagaagaaatgtacacttgatggtgtaaaggttaactattatgaaatcgacaatacacctactggaacttgtgctgtttgtgtggttggcggtgaaaggtcccttgttgccaacttatcagctgcaaattgctataagtctgagcatttgacgagaccggnaaattgggcattagtt

SEQ ID NO: 50373 - DNA, 250 bp, Glycine max
  Clone ID: 701138473H1
gccagtagtcatatgcttgtctcaaagattaagccatgcatgtgtgggtatgaactaattcagactgtgaaactgcgaatggctcattaaatcagttatagtttgtttgatggtatctactactcggataaccgtagtaattctagagctaatacgtgcaacaaaccccgacttctggaagggatgcatttattagataaaaggtcaacacaggctctgcctgttgctttgatgattcatgataactcgt

SEQ ID NO: 50374 - DNA, 250 bp, Glycine max
  unsure (1)..(250): unsure at all n locations; Clone ID: 701138474H1
cagatccagccgcttccgcttgttcgatcgctacagacgcttgtatnggattattcatgattgattcataagcagcatgtcttcctccggctatagttgttgcagatctcggatgttgtaaaattagtgtatgatgtgaagctatgggctggaaaatgtggatgtaggagatttcgggacgaaaggcctcaaaacgcttcgtcgtttgtggttactgagtcctgagtgatcttgtcatccgacctttgcc

SEQ ID NO: 50375 - DNA, 244 bp, Glycine max
  unsure (1)..(244): unsure at all n locations; Clone ID: 701138475H1
gggagtttttgaagactattactggcaagaaggagacgggcattgaccttacagttatagaaatcttgtcaaggcacgcatctgatgagttctaccttgggcagagagatggtggtgactactggacttctgatgccggtccattagangcatttaagaggtttggaaagaagcttgaagagattgaaaagaagcttatagagaagaacaaagatgagacattgagaaaccgctatgggccagc

SEQ ID NO: 50376 - DNA, 254 bp, Glycine max
  unsure (1)..(254): unsure at all n locations; Clone ID: 701138478H1
aaaaagttaattggaagaaagcgcgtcaccaatgtgcaaagganggnctttactatccccatcctttgatacaagacctaatatgggatagtttatacatattcactgaaccgctacttactcgttggcctttcaacaagttgattagagaaaaggcccttcaagtaactatgaaacatattcattatgaagatgagactagtcgatacataaccattggttgtgtggaaaaggttttatgtatgcttgcttgt

SEQ ID NO: 50377 - DNA, 255 bp, Glycine max
  unsure (1)..(255): unsure at all n locations; Clone ID: 701138479H1
aaagtgcttgttttgtttgttgctacagttttggtagcatatgggngccatggctcagactaccagaagttccctctccaaatgaaaactgggtttggtgggcaatacagcaatgaggtggcatgtgccagttggaggcttggcgtggaagcaaacaacgtagtcaagtggcaaactgttcctgcagcttgcggagagtacatagctgactacgttctaggagaccaatatagatcagattccaaaacagttaac

SEQ ID NO: 50378 - DNA, 258 bp, Glycine max
  unsure (1)..(258): unsure at all n locations; Clone ID: 701138480H1
gcttcttcgtggtcttgagcattgtcacagtcgtggtgttatgcggngtgacatcaagggctcaaatcttctgcttgacagtaatggcaatctgaagattggtgattntgggcttgcagctttgtnnccagccatctcatgggcancctttaactagtcgtgtcgtaaccttgtggtaccgaccacctgaacttttgcttngagctacagattatggagttactgtggatttgtggagtgctggatgtattctggcag

SEQ ID NO: 50379 - DNA, 251 bp, Glycine max
  Clone ID: 701138482H1
agagccttggctcgtttctggtccaaattcattgatgacaagattgtgggtgctgcatggaatgctgttttcacggttgatgagaaagagcgtgagaagaatgttgtagaaacatatgaggctctgcagtttcttgagaatgagatcaaggacaagaaattctttggaggagaagaggttgggttggtagatatagctggtgtctacatagcattttgggtccctttgattcaagaaattgcagggttgga

SEQ ID NO: 50380 - DNA, 248 bp, Glycine max
  Clone ID: 701138483H1
gcagccacttctccctttcttctgcgctccatcagtctcagccacgctccttctcttatgttgcagacggggagaggtttgacagttgcatccaccccactgccgttgttcatcccaatgccgtcattggccagggtgtttcgattggtcctttttgttctgttagctcctctgcaaagctggggaatggttgtcaactacatcctggaagccatgtttttggaagtacagagttaggggacaattgc

SEQ ID NO: 50381 - DNA, 248 bp, Glycine max
  unsure (1)..(248): unsure at all n locations; Clone ID: 701138484H1
cctttttccatctagagttgttgcggctctcttctctgcacantgcagaatgcagtccacactcttcaaccccacccattcccttatccccacttcaccacactctancagatccaattctggtcatgcttctctctccgttcgcgcctccatcgccgtggaaacccccacggagacggtgaagctgaacaagtacagctcccgcatcaccgagcccaaatcgcagggcgcctcccaggccgtgctct

SEQ ID NO: 50382 - DNA, 244 bp, Glycine max
  unsure (1)..(244): unsure at all n locations; Clone ID: 701138485H1
gattggatgtgctcaaattgcaacaatcataattatgcttcaagactacagtgtaacaggtgcaaaactcaaaggatggcccccatgcaacctgttaacgttgtgtagtgatgaattcattagttatattactgtcacgtgcccctagtttggctgagttttgtttttgattctctagcgtgtattttgccagtaaaaaacagttgatattctcgncaggctcattatatttgcgtaagacata

SEQ ID NO: 50383 - DNA, 246 bp, Glycine max
  Clone ID: 701138487H1
ccgaggcgaagagaagagaaaaattaagatggaggggaaggagcaggatgtgtcgctgggagcgaacaagttcccggagagacagccgattgggacggcggcgcagagccaagacgacggcaaggactaccaggagccggcgccggcgccactggttgacccgacggagtttacgtcatggtccttttacagagcagggatagcagagtttgtggccacttttctgtttctatacatcactgtctt

SEQ ID NO: 50384 - DNA, 191 bp, Glycine max
  Clone ID: 701138489H1
ttcactctccgctctctctgccactgagccaagaagatggcctcacaggtttgcaaatctgcttccagagccgcgaggtcccttctatcctctcgttttcactctcaaggacgtgcgcttggggctgctgcggctgtttcattgagcagcaaagtgcctcttttttacggaaagaacggttctggaaatgg

SEQ ID NO: 50385 - DNA, 252 bp, Glycine max
  unsure (1)..(252): unsure at all n locations; Clone ID: 701138490H1
ggcaagccccactcaaccaccacacctctcctcgttcacgctacnnctttctgctcttcttctacctttcaagttttaaaagtataaagatggcagagacattcctatttacctcagagtcggtgaacgagggacaccctgacaagctctgcgaccaaatctccgatgctgtcctcgacgcttgcctcgagcaggacccagacagcaaagttgcctgcgaaacatgccaccaaaaccaacttggtcatggtc

SEQ ID NO: 50386 - DNA, 250 bp, Glycine max
  unsure (1)..(250): unsure at all n locations; Clone ID: 701138491H1
attttcagttactaatcctagttatttgatttatatactttngggatagtaaatacatgagatagaatattcaaaatggaatatttctattattttattcttcatccaatgactatacattcattatatttttgtgtaaatagaggaaaaactcgatggaaaaatggtggtttaattctatgttgtttaataggaagttagaatacaggtgtgaattaagtaaatcaatggatagtcttggtcctattga

SEQ ID NO: 50387 - DNA, 251 bp, Glycine max
  unsure (1)..(251): unsure at all n locations; Clone ID: 701138493H1
cttttccagggagctcattgacaatggctgaaacaaagtgggtgntnaaggacaaaagatggtctctccatggaatgacagctctagtcacaggaggcacccgaggcatagggcatgccattgttgaagagttagctgagtttngagcaactgttcatatatgtgcacgtaatcaagatgatattgataaatgtttagaagagtggaaaaacaagggacttaatgtgactggttcagtatgtgatttacta

SEQ ID NO: 50388 - DNA, 250 bp, Glycine max
  Clone ID: 701138494H1
cttagggtagcaagcttgtagttaattagccaaaatcatcggggcaatttggaggcactgcttctgcatgcttactccctagcacccgaagggaaagagaaccctgatgaggttggaattcactgcaagggttgcatgcttttgatgcctttcctgtatgtatattatgatttcatattgtttattggtttgattcacacttcttttggtttttgcatgatgatcttattcataatcatcaatgggaaga

SEQ ID NO: 50389 - DNA, 254 bp, Glycine max
  unsure (1)..(254): unsure at all n locations; Clone ID: 701138495H1
cagagtgcttattgttgggggaactggctacataggaaaaagggtggtgaaggcaagtttagctcaaggacatgaaacatttgttcttcacaggccagagattgntgttgatattnagaaagttcagcttctattgtcattcaaggagcaaggagctaggcttgtttcaggttcatttaacgaccataagagcctagtgaatgctgtgaaacttgttgatgttgtcatttgtgccatttctggtgttcacatcc

SEQ ID NO: 50390 - DNA, 258 bp, Glycine max
  unsure (1)..(258): unsure at all n locations; Clone ID: 701138496H1
tttccacttgtctccgaattncgttatcttgagaaacattattnncattgctatatattatggctagcatgaaggttacatgggtggttgtgatcatgtgcatggccgtggtgggtgcaccgatgatggcgcaagcatggacatgcaatgatgtgacggtgaacatggcacagtgcctatcctacctgatgcagggaggaacaccttcaacactttgctgcagcggagtcaagaacattcttggctctgctgtcacca

SEQ ID NO: 50391 - DNA, 271 bp, Glycine max
  unsure (1)..(271): unsure at all n locations; Clone ID: 701138503H1
tcgnctcgnggttggttntgttgccaaggnaaatacnatcanangnatgcggttgccgaagaagannaccgcgacagcctcgnccagaaacccaccaatttcaccgcgacanatagcncaanagttgatttcaaagtgaatggggataaggnagatggtncgaaaggtgatcnacttgctctggacgtgaagagtttaaatttgaaagaggaggtntctcaggatagaaaagataatggcaatcgggcacagacattcagttttaatgnnc

SEQ ID NO: 50392 - DNA, 278 bp, Glycine max
  unsure (1)..(278): unsure at all n locations; Clone ID: 701138504H1
gcttcttcacttnctctcgtttcaatcgaaaccaaaacaaaaacatgggcagaaaattcttcgtccggtggcnactggnaatgcaatgggaccactgaggaggtaaagnagattgttactactttgaatgaggctaaagtccctggagaagatgtcgtagaagttgttgtgagccctccntttgtgttccttcctgttgtaaaaagnttgctgcgccctgatttccatgtttcggcacanaactgttgggttcgcaaaggtggtgcttataccggtga

SEQ ID NO: 50393 - DNA, 276 bp, Glycine max
  unsure (1)..(276): unsure at all n locations; Clone ID: 701138505H1
tgcagtacgactagcaaagttagcagttgataaggtcttgaatgcactgtgtgatanatcagttttatatcccanacacggaaatctgcactgttttgcagcagtgacaccttgtgccatgctagacattctcacacctccttacagagaagaggaaggaaggagttgtacttattatcatgattatccttattnagcattcttagctggaaatgcacctatacgtgacggggaagaggaggaatatgtgtggctcgcagagttagaatcacctag

SEQ ID NO: 50394 - DNA, 274 bp, Glycine max
  unsure (1)..(274): unsure at all n locations; Clone ID: 701138506H1
ggggtgaatatagggatgncgggcatgtctggatgtagttgccgttggcagtngncggaggcgaaatccatgggagtgggctgttggttccctncctcaactaccaaaaggagtttccggcctgtgattgtntctgtttctgctatctccganaataactctcactcttacactagcagcggaaganagctagaagaagaaggcatcaaagggtcaggaactaccgccaganatcgcaggttgcttagaattcgccaagagaaacgacancggg

SEQ ID NO: 50395 - DNA, 273 bp, Glycine max
  unsure (1)..(273): unsure at all n locations; Clone ID: 701138507H1
ttggagtacatgcaagcgtgctgtagtgtcaaanataggattgctttgagcatgattgnagatgctgagaaaaaaggccttattacacctggaaagactgttctggttgagtatacaagtggtaacaccggcataggattggcattcatagcagcattgaggggttataaacttcaggtgactatgccgtcttacgtgagtcttgagaggaaaattatactgcgagcctttggagctgaggtatatcttacagaccctgccaaaggaattgat

SEQ ID NO: 50396 - DNA, 273 bp, Glycine max
  unsure (1)..(273): unsure at all n locations; Clone ID: 701138508H1
ctttctctctgttttctggtanttcatcaattgattcaaaatgcanangctcanactgcaactagtgctattcctctcaatctcaacttgtcacactgttttctccttcactnatgggttgttgccaaatnggaacttcgagcagggcccaaagccatcacaattganggggtccgtagtgacaggccannatgccataccgaattggacaatttcggggttcgttgaatacataanatcaggacaaaaacagggtgacatgttactggttgt

SEQ ID NO: 50397 - DNA, 275 bp, Glycine max
  unsure (1)..(275): unsure at all n locations; Clone ID: 701138509H1
acaccaccgttatggacgaggacgagcaactcgaacgattcgactcggagttcgcctccacgagttccatttcctccaccctcagcaccgacgatttccgcaacctcaccagctccggcgacatntcctccatcagcagcggctccggcgagattcctcccgtcgcggtcctcgcgcctccgtttctctaccgcgaggggtccaatgacgtcgagacggcgccggcgcccagggagaagtgcgtgggaaggagtaacaagggagtgagctggggg

SEQ ID NO: 50398 - DNA, 256 bp, Glycine max
  unsure (1)..(256): unsure at all n locations; Clone ID: 701138510H1
cntctccatttccatttcctctcacntcagtttccaagaanccttaagntattggaaagtcttacccaaccgtgagcgctnatnaccagaaggccgttgagaaggcgaagaagaagctcagaggcttcatcgctgagaagagatgcnctcctctaatgctccgtttggcatggcactctgctggaacttacgacgtgagctcgaagaccggtggccccttcggaaccataaagcacccctccgaactcgctcacgg

SEQ ID NO: 50399 - DNA, 276 bp, Glycine max
  unsure (1)..(276): unsure at all n locations; Clone ID: 701138512H1
ggttcttcntcttctatgtggacggtgtgtgtgattttggcatcactggcntgctgcagcactctgtgccaacccacgcaggccagtggatgtacaatttggccganactacgtgcccacatgggcctttnatcacatcanatattncaatggtggttctgacattcagctncatcttgacaagtacactggtactggcttccagtccaaagggtcttacttgtttggtcacttcagcatgtacatnaagatggttcctngagattctgctggcac

SEQ ID NO: 50400 - DNA, 276 bp, Glycine max
  unsure (1)..(276): unsure at all n locations; Clone ID: 701138513H1
gaaaaactcgatggaaaaatggtggtttaattctatgttgtttaataggaagttagaatacaggtgtgaattaagtaaatcaatggatagtcttggtcctattgaaaataccagtctaagggaagaccctaaaattttaaccgatatagaaaaaaaaattcacagggatttggattatttagaaatggaaggttttttttctagcgatctgaatactgtttctaagaatgatgatgatcattacatgtatganactcaatttagttttaacaataa

SEQ ID NO: 50401 - DNA, 277 bp, Glycine max
  Clone ID: 701138515H1
gcaagatccagtcagaggaacagtgactggtggaatgatcaaggaacttcttatatcttttaggagagctacaggacaaaagccacaacgcatcatattttatagggatggtgtgagtgagggacagttttatcaggttctactgtttgagcttgatgctattcgaaaggcatgtgcatccctggaacccaattatcagcctcctgtgacttttgtggtggttcaaaagcgtcaccacacaaggctctttgctagcaaccatcatgataagagttct

SEQ ID NO: 50402 - DNA, 278 bp, Glycine max
  Clone ID: 701138516H1
ccaaatcccaactactactcacactcactgcagatctcaatccatggctaccattgttagcatcaaggcccgccagatctttgacagtcgtggcaatccaaccgtcgaggtggatttgacatgctccgatggtacttttgctagagctgctgttccaagtggtgcatccactgggatttatgaggcccttgaattgagagatggaggatctgactaccttggaaagggtgtatcaaaggctgttgacaatgtgaacaccattattgcccctgctttgg

SEQ ID NO: 50403 - DNA, 273 bp, Glycine max
  unsure (1)..(273): unsure at all n locations; Clone ID: 701138518H1
cagaaactaaaagaagttactgtaatgggaagattgttggagcacnccactttgctcatgctgcaatagctgctgggtcatttaaccctcaattgactttgcttctcctcttgatggagatggacatggaagtcatacagcctctattgcggccggaaataatggaattcctgtgaggangaatggccatgaattcgggagagcgagtgggatggctcctcgtgctaggatgctgtctacaaggcaatttatagactgtttggagggtttgtt

SEQ ID NO: 50404 - DNA, 273 bp, Glycine max
  unsure (1)..(273): unsure at all n locations; Clone ID: 701138520H1
atgaggttcaatgattggttttnctgctgttaataatgcagttacagttgaagaagtggaggcattgcatgtgttgtttaaaaggttaagtagctccctgattgatgatgactcgattcacaaggaggagcttcaattggcactgtttcagaccccatatgggaaaaatcttttcctagatcgagtttttgatgttttcgaccaaaaaagaaacggtgtaatcgagtttgacgaatttgtccacgccctcagtgttttccanccatatgcccc

SEQ ID NO: 50405 - DNA, 270 bp, Glycine max
  unsure (1)..(270): unsure at all n locations; Clone ID: 701138523H1
ctcatctcatcggatcgatcaagcatcagggagctttgagggttnattctctggtgtagtagcaatcagcacaatagaaaatgtnttttgacggatatggatatcatgggacatcatttgagcagatatatcgatgctacccagcttcctttattgaaaagccccaaatcgaaagtggtgacaaaattatcatgcctccatcagcccttgaccgtctagcatctctgcatattgattacccaatgttgtttgaactccgnaatgatgctg

SEQ ID NO: 50406 - DNA, 242 bp, Glycine max
  unsure (1)..(242): unsure at all n locations; Clone ID: 701138526H1
ctctctctcagtttccaagaatcttaagctanggganagtcttacccaaccgtgagcgcncattaccagaaggccgttgagaaggcgaagaagaagctcagaggcttcatcgctgagaaganctgcgctcctctaatgctccgtttggcatggcactctgctggaacttacgacgtgagctcgaagaccggtggtcccttcggaaccataaagcacccctccgaactcgctcacggcgctaa

SEQ ID NO: 50407 - DNA, 273 bp, Glycine max
  unsure (1)..(273): unsure at all n locations; Clone ID: 701138527H1
gcttggactgcctggaaacggaggcactgaagaagtgctcatcaggaagaggggtttctctgagactgaaactggtcatgaagatgagtctgccaccactgtggatttgatgcttaatctttcttctaaggagnnnnnnnnnnnnnnnnnnnnnnnnnnnnnnnnnnnngataagcacaagactttgcctaaggagaagacccttctgccagcagatcctgctaagcctccagccaagacgcaggtggtgggttggccacctgtgcggtcctt

SEQ ID NO: 50408 - DNA, 276 bp, Glycine max
  unsure (1)..(276): unsure at all n locations; Clone ID: 701138528H1
caggacccggcatggcacctcccaccatgggccagcagccgcagcancagtaccagcagcagccttccgccgcagcagcaacaaccctacgtcatgatgccgccgcagcatcaggcgccgcagcctatgtgggccccatccgcccagcctccgctgccgcagcagcctgctagcgccgacgaggtccgaaccctctggatcggggatctgcagtactggatggacgagaactatctctacacctgctttgctcataccggcgaggtttcgtcagtt

SEQ ID NO: 50409 - DNA, 272 bp, Glycine max
  unsure (1)..(272): unsure at all n locations; Clone ID: 701138529H1
gcgaccctggatcactagaatcacgggttttgagcaaaatgggtgttgtggagggtctcttggcattgggtttgattctgaatgtgtgtgttgtgtgcaatggaggcacaagcagccccttcgtcaggaaagttgagaaggctgtagatatgccacttgacagcgatgtctttgctattcctcctggttataatgccccccagcaggttcatataacgcaaggtgacctagtggggaaagcagtgatcgngtcatgggtgactgtggatgag

SEQ ID NO: 50410 - DNA, 273 bp, Glycine max
  Clone ID: 701138530H1
gctcatgctgctgaaaatgcaaaaggacttgatgagactgaatttgtaaaagttctttacaagaaatttgctcgtcgtggtgaggaatatcattcagtgctaggtggtgttcaagaaactcctgcagagcttaacgttccggataatgttttgctagacaaagttcccaaggcttaatttttttttttctctcttatggtatctttatgtgcgattttccagagaatggctgcttttgtttcctgtaagtttggagagctcccattgttatct

SEQ ID NO: 50411 - DNA, 274 bp, Glycine max
  Clone ID: 701138531H1
gctggctttggtaacttgcctggtgatatggtattctgggattacattgataagaaacaacttggagccactaaggctgaatggtctgtgactagtgaatggtctccggatgggtgctatttcatgacagctacaacagctccaaggcttcaagttgacaatgggatcaagatttttcactacaatgggtcattgtacttcaagaagatgtttgacaaattgtaccaggttgattggaaaccagagtcacctggtaagtttggtgatattgccg

SEQ ID NO: 50412 - DNA, 277 bp, Glycine max
  unsure (1)..(277): unsure at all n locations; Clone ID: 701138533H1
gcatgctctagtcacagacaccgacacagatctgtcttccgaagcaggaactaaatatggctgncttgttggaatggtcaaagcaagataagaaacgaatgcttcatgtcgtctancgtgttggtgaccttgatcgcaccatcaaattttacacagaatgtttaggaatgaagcttttgaggcaaagagatatcccagaggagaaatatgctaatgcttttcttggatttggccctgaagaatcccattttgttgttgaattaacatataattatgg

SEQ ID NO: 50413 - DNA, 273 bp, Glycine max
  unsure (1)..(273): unsure at all n locations; Clone ID: 701138535H1
gaaaattgagggaggatgtggctcgagattatcttcggnttgcgtcatttacagtattgttccggcgcttcttctacgacgacgacgttttggacatcgaaggatcggattcttctggctcntttctccgncgcggntaggcttaaaaaactttacggagcaaatgtgtatgtnggnctcggattcccgatgccgatactgcttctcgacagagcattnatatggttcttctcactaaacaagagctatgggtgatatctgtgaaaaacttct

SEQ ID NO: 50414 - DNA, 270 bp, Glycine max
  unsure (1)..(270): unsure at all n locations; Clone ID: 701138536H1
gggacaagtgatcggtgtccacagcgtagaggagtggnaggaacatctcangaagggagaagagtccaagaaattgattgtggnggattttactgcttcttggtgcggtccatgccgtttcattgccccaattcttgcagagtttgctaaaaagttgccgaatgtcaccttcctcaaagtggatgtggatgaattggagactgtttccaaggagtggggaattgaggctatgcnaaccttcctgttcttgaaagaaggcaagctggtgga

SEQ ID NO: 50415 - DNA, 269 bp, Glycine max
  unsure (1)..(269): unsure at all n locations; Clone ID: 701138537H1
gcaatcttcaaggatctcttgaagttaataaagtagcaggaaattttcattttgcaactgggaaaagctttcttcagtctgctanatttctggctgatgtgcttgctttacaggataatcattatnatattagccatcggatcaacaaattaagttttggtcaccatttccctggattggtaaatcctcttgatggggtaaggtgggtgcaaggacctactcatggcatgtaccagtatttcataaaggtggtccctacaatatacaca

SEQ ID NO: 50416 - DNA, 269 bp, Glycine max
  Clone ID: 701138538H1
cctacactcgctcccaatcaaggagcaccaaatcattgacaccctcgtggggcccaccctgaaggacgaggtgatgaagatcatgcccgtccagaagcagacccgcgccggtcagcgaacccgcttcaaggccttcgtggtggtcggcgacaacaacggccacgtcggtctcggagtgaagtgcagcaaggaagtcgccaccgccatacgcggcgccatcattctcgcaaagctctctgttattcctgtgaggagaggctattggggta

SEQ ID NO: 50417 - DNA, 269 bp, Glycine max
  unsure (1)..(269): unsure at all n locations; Clone ID: 701138539H1
gcggccacagaggcgagcagagcagagcagantgggcaacaagcgaagaatggcgncggagatggaagaactcgtctcctttctttcttccccatcgccacagatcagaaaagccgccgttgacatagttcgcggnttaancggctccgtcgagggcttgcagtccctcgccaattactcaaacgccctcttacccgcnttgtctcgcctcttaacgttacccaaggaggtttcggaggctgctgcggaggcgctngtgaacctgtcgc

SEQ ID NO: 50418 - DNA, 270 bp, Glycine max
  unsure (1)..(270): unsure at all n locations; Clone ID: 701138541H1
atggagaacaaccctagttcatccagatttgacagaaaattcattgagaggaatagaaganatcaaatgaaagctctctttcgcaaactaaactcacttgtgcctcatcanagatcaaaggaggccattccactgcnggntcanctagangannccacaaactacatanagnnactacagattaatctggaganaatgaaggacaagaagaacatgctactaggaaatgaaaggccaaatgagagaatgaataatgatggaaggagggtg

SEQ ID NO: 50419 - DNA, 270 bp, Glycine max
  unsure (1)..(270): unsure at all n locations; Clone ID: 701138543H1
gccactcctaaacacatccttcttcgatgtgtgtcggattcacggagatgccgcgaggagcgaatgtaacatgttttgtnctcgactgcaatgagaatgcgttttgcntctattgccgntcctcaaaacacaaggntcaccaagttattcagatacggagatcttcgtatcacgatgtagtgagggtggcggaaattcagacagtgttggncattagtggagttcaaacatatgtgatcaacagtgccagggttttgtttctgaatgaga

SEQ ID NO: 50420 - DNA, 271 bp, Glycine max
  Clone ID: 701138544H1
gctttctttagttgagttaacagcatggagagggaggaagatgttaaggttggagcacagaaattctcagagaggcaagcattggggacaggagctcagggtgacaaggactacaaggaggcaccaccagcacccttgtttgagccaggggagttaaagtcatggtctttttacagagctgggattgcagagtttgtggccacattcttgttcctctacatcactgtcttgactgtcatgggtgtcaacagggcacccaacaagtgctcct

SEQ ID NO: 50421 - DNA, 274 bp, Glycine max
  unsure (1)..(274): unsure at all n locations; Clone ID: 701138547H1
aatcctgccctgtaagtatcatatcatgggcaaccttaacttgacaacatatncctacgatcagtttccaaatggaagcgtnttacacaactctctcctncccctgcgtccacgtctgntctcaattttcagggctctgaattgcctagaagaaatctttgtaagaaatcttcacacantattttngcatcacctacgctgcctaaaccgtttcttcagatttgtggtagacctcagacattgatttatacgtcaacccgactctcttctggag

SEQ ID NO: 50422 - DNA, 273 bp, Glycine max
  Clone ID: 701138548H1
gtgatgattcttcttctcttggctccacttgttatccctataaagatgacactgtgtcccagaaaagcctctagcacagaaattcctgaggaacatgttggatctacagactatttggttcaagatggcaaagacaacgtagagccattgctatcatcttcatcagctagtggtcttggaagttttaatgatgtggtggatggttcagctgaggtggctatgcttcttgctgagggtgagggagcagtgaggaagaagagaaggcccaaaaga

SEQ ID NO: 50423 - DNA, 273 bp, Glycine max
  unsure (1)..(273): unsure at all n locations; Clone ID: 701138549H1
gccgcaanccattttgcatctaacccttttgtcattaataatctctctgaccnctctttccttggtcgatgccgccgatcccacatttggcttcacccctcttggattatctagtagctcaaacttgcaaatccaaaagccttacgacgttgcagtcaacgancgctacagcttttcaaatggagtgcacagattttgggtatactccacggacaagcctcatatgcaaggcagcaatacgaagccacgaactgagattcgtatcgctggata

SEQ ID NO: 50424 - DNA, 271 bp, Glycine max
  unsure (1)..(271): unsure at all n locations; Clone ID: 701138551H1
ctccggtggctacncctcccgcagccactcctcctgcgggtacaccaccggcagccacacctcctgccgtgantccagtgagttcgccgccagcgccagttccggtgagttctccacctgctcctgttccggtgagctctccacctgcactcgcaccgacaactcccgcacccgtggtagcacccagcgctgaggttccggcacccgctcccaagtcaaagangaagacnaagangagtaagaagcacactgcaccagcaccgtcgccgtc

SEQ ID NO: 50425 - DNA, 267 bp, Glycine max
  unsure (1)..(267): unsure at all n locations; Clone ID: 701138552H1
taagcttatagttgaaatctttgagcatagaaaaaagatgccgatttctagaattgccattggaaatccttcagantttggccaagcggatgcgcttaaggctgctcttgctgagttcatctcaatgctaatatttgtctttgcaggagaaggctctggcatggcatataacaaactcacagacaatggttcggcaacaccagctggggtggtggcagcatccctgtctcatgcatttgctctttttgttgcggtctctgttggtgc

SEQ ID NO: 50426 - DNA, 267 bp, Glycine max
  Clone ID: 701138553H1
gcggagagaagcctaagggaccacttgaggctcttcggcctaaattacagccaacgcagcagcaaacacgttaccggaaatctccttatgctccttcaggagaagaagggggaagtgttccagccgaggatgcaccttccaaccagtaagcagcaatcagtcttttgatgatgtgctgactattgttctaatacctgagtgagtaggtatcacttctttgttttcaacaataaaggaagcttgtcatgtattcatattagcacaaga

SEQ ID NO: 50427 - DNA, 265 bp, Glycine max
  unsure (1)..(265): unsure at all n locations; Clone ID: 701138554H1
gnatatcttgttgtttggagcgatccgagaaaaactctgtaaacatgttggtttaccaggacctccttacaggtgatgagcttctctctgactccttccgttacaaggaaattgagaatggaatgctgtgggaagttgaggggaagtgggntgttaaaggagcagttgatgtagacattggtgcaaacccttctgctgagggtggaggagaagatgagggagttgatgatgcagctgttaaggttgttgacattgttgacacatt

SEQ ID NO: 50428 - DNA, 270 bp, Glycine max
  unsure (1)..(270): unsure at all n locations; Clone ID: 701138557H1
atttctttcaanattttctgatgggtataaactggaatcaagttcccatgctcatacattgaatttgctgagcgactggtgctgccgcagtataaanatttacctgacacagaggttaaagagttccatagaagagatggttttgaggtagcaagtgctgacaagatatttgaaagcacatccaaggagcagttgagcagagtaggctcataagaggctcatctcactccataccaagaatgtgtatactttatttcccttggggaaata

SEQ ID NO: 50429 - DNA, 264 bp, Glycine max
  Clone ID: 701138558H1
gttcagttcgcgatgagagccaagtggaagaagaagcgtatgaggaggttgaagaggaagcgccgaaagatgagacagagatccaagtagtgcgttaatccaagtagttgatttccgttgcttttataattatgttgtcaaattgggcacccagttgttagaggcactggtttctccttttgatgttttgatacatttttgtttggtttaattcgtcttatgttattagctgaaaacaatgctgttactgcgtttgcgaatcaa

SEQ ID NO: 50430 - DNA, 269 bp, Glycine max
  unsure (1)..(269): unsure at all n locations; Clone ID: 701138559H1
cctttttcaacgctcacatataaatttctgccaccaaatccttcccactctcctcaattctattcatcncaacttcaacaatctctcagatccgtgaaacaaaaacaaaaacaaaaaattcgaaaaccctagttctatacatatattaaggaaaaaaagctttttgctggttttgaggcattgcattaaattggattttgattattcatggctgaacaagcattggaaggtagccaacctgtggatttaacaaagcacccttctggaat

SEQ ID NO: 50431 - DNA, 261 bp, Glycine max
  unsure (1)..(261): unsure at all n locations; Clone ID: 701138560H1
ctnnnttnntgctttagtctattntgtnaaatacnagntttgnttctcnnctgagagtgcactactngcctgtgttaagccttctccanaggctggtggcattgctaaacaagctctggnttcgatanntcagtgtnttgcngttntanncctgctgctggtgancagaagtggncntctacagtgaaaatgtctcactgacattctcnaggntgacagcatttctaactccgntaagcagcaccttgcncttttatgttt

SEQ ID NO: 50432 - DNA, 268 bp, Glycine max
  unsure (1)..(268): unsure at all n locations; Clone ID: 701138561H1
gtctagaatgnctctattctcctctgtcggtcacacacagcgatagatagataatagagangagaagcattcataggcgccaattgtgagtgagagagaagtttctgtnttttctacttttccatttttttnnnnnnnnnnnnnnnnnnnnnntctgattcttcaccataactgtcattgctttgcttctctcactcagcacaagttgacaagaagggcattgccatttcaatcccatacaaaaagcacacaccccaattcaccacca

SEQ ID NO: 50433 - DNA, 269 bp, Glycine max
  unsure (1)..(269): unsure at all n locations; Clone ID: 701138562H1
tgaattcgaaaaatcgtagcgtantttgggttgcgattgaaacggtacgatgggaagaggaaaattcaagagcaagcccaccggtcgccgccagttctccaccccggaagatatgcttgctggaacctctaaccgtcctcgaacttttagacagaaagaagctgagcatgaagaggagcctgaggaagtatctggggatgaatctggagaagaatcagaagaggaaacttctgttagtattttgtagtaattactantatagatggatt

SEQ ID NO: 50434 - DNA, 277 bp, Glycine max
  unsure (1)..(277): unsure at all n locations; Clone ID: 701138563H1
tatattattgaattgacaatgaaggcctgctcntgcttttgctttccttcttcctaatttgcttcttngttagctggccactacggaatcaagaaaagatccaggggaatattggaaaatgatcatgaaagatncaggaaatgccagaaggacttcaaggtcttgtttcatttcaatctgaaaataaccctaagactcaagagcagcttggtaaaggttccaaaaaccattgtgaagagtctctagttacaaatacacaagttaacagtgacttcgg

SEQ ID NO: 50435 - DNA, 263 bp, Glycine max
  unsure (1)..(263): unsure at all n locations; Clone ID: 701138565H1
aatacccactagttccctatagactcatcacattctccatctcaacncnccttaatnctcatnnnnnnnnnnnnnnnnnnnnnnnaactaattntntaatanttaaaaaancaacanacatgtacactttcttaatttantnaatttctactctctttttatcctacctttctagttacctcttcaattccctcttaaatatnccctctgctttgcttccatactcatactcatancnctctcactctctttttgagataagt

SEQ ID NO: 50436 - DNA, 268 bp, Glycine max
  unsure (1)..(268): unsure at all n locations; Clone ID: 701138566H1
cgtcttcataaacgccgcccaaaacttctcatacccttttattcattccattcgtttctagggttttcttttctttgccganaaaatgagagagtgcatttcgatccacattggccaggccggtatccaggttggaaacgcctgctgggaactctattgccttgaacacggcattcagcccgatggacagatgccgagtgacaagancgttggcggaggagacgacgccttcaacacatttttcagcgagaccggcgccggaaagcac

SEQ ID NO: 50437 - DNA, 267 bp, Glycine max
  unsure (1)..(267): unsure at all n locations; Clone ID: 701138567H1
gtgatgangcacaatctaagaggggtattttgactctcaagtaccccattgaacatggaattgtgagcaattgggatgatatggaaaagatttggcatcataccttctataatgagcttcgtgttgccccagaagagcatccagttctcttaactgaggcccctcttaaccccaaggctaatcgtgagaagatgacccaaatcatgtttgagaccttcaacacccctgctatgtacgtagccatccaagctgttctttcactgtatg

SEQ ID NO: 50438 - DNA, 266 bp, Glycine max
  Clone ID: 701138568H1
cttcttgtcagatgcttgttctttggatccagaatcaactaaaacaaaaggcaacgaaggacagagtattcaactatgtgaatcaactgtgtgagagcctgccaagtccatctggagagtcagtgataagctgtaatagtctttccaagatgccaaacattacgttcacaattggaaataaaccttttgtcctcacaccagagcagtatattctaagaactggagaaggcattacagaagtctgccttagtgggtttattgctttt

SEQ ID NO: 50439 - DNA, 263 bp, Glycine max
  unsure (1)..(263): unsure at all n locations; Clone ID: 701138569H1
ctttgttactctcacacatgtctcgctccgtgcctttggtttcaaccatttttntcttgcttctgcttctggtggccactgagatgatggggccaacaatggtggcagaagcaagaacttgtgagtctcagagccaccgtttcaaggggccatgtttgagtgacaccaactgtggctctgtttgccgaaccgaacgtttcactggaggacactgccgtggcttccgtcgcagatncttctgnaccaaacattgttaattttaa

SEQ ID NO: 50440 - DNA, 262 bp, Glycine max
  Clone ID: 701138571H1
gtttatcgtgaggagaatatgaagttgtttgttttctttgttgctgcagtagttttggtagcatggccatgccatggcgcaggctaccaaaggttccctctccgaatgaaaactggctatggtgagcgttcttcggaggtaaaatgcgcaagttttaggcttgctgtggaagcacacaacatccgagcctttaaaaccattcctgaagagtgcgttgaaccaacaaaggactacattaatggcgaacaatttagatcagact

SEQ ID NO: 50441 - DNA, 262 bp, Glycine max
  unsure (1)..(262): unsure at all n locations; Clone ID: 701138572H1
tagagatccagtcaatagacaaacaatatctttctctctctgtttggtttggcctcttgctgtaagaagccagccacactattacgcttctgtggaaccatcgatcccactcaatgggcctttgcaagttccacatcggttgagcttngtgtcaggtggcttagtgttatccttaattattcttgtggtcagtatttctcttctttctntcttcttttccaatgagctttgatttgtataactgtataagaatttgcgattc

SEQ ID NO: 50442 - DNA, 260 bp, Glycine max
  unsure (1)..(260): unsure at all n locations; Clone ID: 701138573H1
gtgacagtgatggcggggagtgtgggaagaagttgggaattgaagcagtnattgttgctccttctagggagcttggaatgcagatagtgagggagtttgagaaggtgctaggaatggataacaagagggcggttcagcagcttgtagggggtgcaaaccgaaccaggcaggaagatgctctcaagaaaaataaacctgcaattgttgttggcacgcctggtaggatagcggactcagtgcatccgggaaacttcgaactc

SEQ ID NO: 50443 - DNA, 263 bp, Glycine max
  unsure (1)..(263): unsure at all n locations; Clone ID: 701138574H1
ggccgttattgttgttaccatccaaaaaatggccggtcttgttgtttcttcccaatgctttctcaaactcttgcttgtagtttcagtctttcatgtttcctttgctgctaggaggttgaatgagctggttcaggaccagtctcagttgctacattaccacaatggtcctcttctatacggcnnaatcgccgtcaacctcatctggtatggtaacttcaaaccatcccaaaaggctatcatcaccgatttcgttacctcactgt

SEQ ID NO: 50444 - DNA, 264 bp, Glycine max
  unsure (1)..(264): unsure at all n locations; Clone ID: 701138575H1
ccttcgattcattccatttcttccaaaatggccaaagacccagttcgcgttctcgtcactggagccgcagggcaanttggatatgctcttgtccctatgattgcnaggggagtgatgctgggtcctgaccagcccgtgatcctccacatgcttgacattcctccagcagcagagtccttgaatggggttaaaatggaattggtggatgctgcattccctcttcttaaaggtgttgttgctacaaccgatgtggttgaggcatgc

SEQ ID NO: 50445 - DNA, 264 bp, Glycine max
  Clone ID: 701138577H1
gagagatagaggagaagatgaacggtggtgaatcttacggtgctattgagacacaatacataaggaggcatcacaaacatgaaccaagggaaaaccagtgcacctctgcacttgttaaacacataagagctcctgttcaccttgtgtggtcactggtgagaagatttgatcaacctcagaaatataaaccatttgttagcaggtgtatcatgcaaggggatcttggcatcggaagtgttcgagaagtgaatgttaaatctggcc

SEQ ID NO: 50446 - DNA, 267 bp, Glycine max
  Clone ID: 701138578H1
ggatggactactatgggattttggaggttgacaggaatgcctcagatgaagagttgaagagagcctacagaaagcttgcaatgaaatggcaccctgataagaaccgaaccaataagaaagaggctgagattcaattcaaacagatatctgaatcctacgaggttcttagtgatccccagaagagagcaatttttgatcggtatggagaaggtggccttaaaggtggaatgccaacaccggatgaaggtgtggcttcattcttccgaa

SEQ ID NO: 50447 - DNA, 270 bp, Glycine max
  unsure (1)..(270): unsure at all n locations; Clone ID: 701138579H1
cgggtcttgcttagtgtnagtntaatnttatgtttctcacgtntaaggtnagngtgctaattttggataattctganatagtgctgantggnttaacttgaatttggttactaaaattcaatgtcttaacagttatgccttagcctgntggtaatatagtagannctaatcaatttcattantcatangatctntgaatggcatagtatnanttgtnctgcattctaacgttctgggtatgagggcgagncctggtgcagcggtnanagc

SEQ ID NO: 50448 - DNA, 218 bp, Glycine max
  unsure (1)..(218): unsure at all n locations; Clone ID: 701138580H1
ctcgcacacgtcgttnttttctttgtgttgcttcggagccaactcaacaanaacgccgtgcctaatccttaagaataacgaattacaacaaccaaccatgttgcattgtctcaacacttcctgttcggacatcacagtcttggaaagacaacgggaagcaaccatcaagtgccagaaccaccaaccaccctacttaacggactttaacgccgtcttcc

SEQ ID NO: 50449 - DNA, 267 bp, Glycine max
  unsure (1)..(267): unsure at all n locations; Clone ID: 701138581H1
caccgcatcaatggagttggacggcgttctcctcggcatgtgcaaccctctcctcgacatctctgccgtcgtcgacgacgctttcttgcaaaaatacggnatcaagttgaacgatgcgattctcgctgaggataagcacaaacctatgtatgaagaattggctaacaatcctaatgtggagtacattgctggaggtgctactcagaattcaatcagggttgctcagtggatgcttcaagcaccaggtgccacaagttacataggttg

SEQ ID NO: 50450 - DNA, 264 bp, Glycine max
  Clone ID: 701138583H1
cagttgctcctatagccggcgctcaacaacatggcggacaaggcagtcaccatccgaaccagaaagttcatgacgaacaggcttctctccagaaagcaattcatcgttgatgtccttcatccagggagggctaatgtttccaaggctgaactgaaggagaaattgggcagaatgtatgacgtgaaagacactaacactgtatttgtcttcaagtttcgaactcattttggtggtggcaagtccactgggtttggtttgatctat

SEQ ID NO: 50451 - DNA, 205 bp, Glycine max
  unsure (1)..(205): unsure at all n locations; Clone ID: 701138584H1
cttatgaggagaggaaggctaagttggttgcacgcgtggcagccatcaactctgctgctgataatgatgaanatgatgagtgaaagttcattgcggatgctgtctcatagctgcacaagtagaaactatgttatttgcctgtactgtttattttctatgtccaaaatttggatactttttggagttgagagccttatttttggtc

SEQ ID NO: 50452 - DNA, 260 bp, Glycine max
  Clone ID: 701138587H1
agacccttttgaagtaatcgatggagtttcagtctctttccagattctaccttcttctttccttaaccattctcttccttgcaccctttcacgctcaagctaaaattaaagtcacttactgcgataagaaggcagactatcctgtgaaggtgtctggagttgaaatatcaccagactctgtggagagtggcaagcctgctacctttaagatctcggctacttctagtaaagctatttatggtggagaagttgtaattgga

SEQ ID NO: 50453 - DNA, 259 bp, Glycine max
  unsure (1)..(259): unsure at all n locations; Clone ID: 701138588H1
ggggttggaaaggtgaaccanaagcnanaatttgcacaactatatggaatgtcagangcactttccnntggtttgngcantgcanggtntcaggttngcaagnatatgccatttgggccnntagatatggttatgccttaccttttganaagggctgaagaaaatagagggctcttagctgcttcaggttttgatagacaactgatgagaaaggagttgggaaggagactaaaagctgcagtgttctaaattaatcagg

SEQ ID NO: 50454 - DNA, 260 bp, Glycine max
  Clone ID: 701138590H1
gttctcttccatgtaggctagcattgaagcatccattgtacctatggatgtgtttatctctgacctcttcattattgctactggtaacgtcacccattgtgaccaattacccacttgtgatctgttttgcaagtggtataaggtttatataactatcacttgcatcgtaggttcaaactctgataggttaggggcatgacatatgccttagtgaggaggcatacagtggtgtttgtacttacaaatagcttacaattaaa

SEQ ID NO: 50455 - DNA, 262 bp, Glycine max
  Clone ID: 701138591H1
ctgattcttcatctccgttcgagggtcaacacttgaagatcttagctcgtggcaatggccgattctccaccgagaaggaattcaaggtccccttccccatggagggctgagtcaaggtctaggtcaaggtctagatctaggcctaggtctaggtcccggtcaagatcttttgagaaacaaaggccaagatcccggtcgagaagtcgtggaagatcaagatcaagaagtaacgaaaggtctgaggctaaaaatgctggaatac

SEQ ID NO: 50456 - DNA, 263 bp, Glycine max
  Clone ID: 701138592H1
cgagaatggtgagttctccttctttctccgacgagagtgagacctatttgttgtttatgaatgttgaatatgcattttgcaggcagacgttgaggttgatgcggcggcagcggcaggggcagcgcagccgaagaagagaacgttcaagaaattcagcttcaggggcgtggatctggacgcgcttctggacatgtccaccgacgaactggtgaagatgttcagtgcgcgtgcacgtagaaggttccagagaggtctgacgagga

SEQ ID NO: 50457 - DNA, 262 bp, Glycine max
  unsure (1)..(262): unsure at all n locations; Clone ID: 701138593H1
cttgtctcaaagattaagccanncatgtgtanntatgaacnaattcagactgtganactgcgaatggctcantaaatcagttatagnttgtntgatggtatctactactcggataaccgtagtanttctnnanctaatncgtgcaacaaaccccgacttctggaagggatgcatttattagataaaaggncaacacaggctctgcctntccgctttgatgattcatgataactcgtcggancncacggnctntgtgccngcg

SEQ ID NO: 50458 - DNA, 263 bp, Glycine max
  unsure (1)..(263): unsure at all n locations; Clone ID: 701138594H1
tgtgctccatgcatgtgccgcacatgatcatgattgctgtgtacgtgagaaganaaaaatccaacctatgtgttggtgtggtttttgctgcttcaatcatgaataaaaaaaaagggttctgaagggtttgtgtagaacacggttcttctttccttttgaatcaaccaactcaaccatatgtaaatatcaactgcatccaccaagttcgatgtgtgtgaccatctcatactccatccatgtgcttaattagtgtggtatcgaaa

SEQ ID NO: 50459 - DNA, 265 bp, Glycine max
  Clone ID: 701138595H1
cacctattctcttggaatcatagttagttatcttttgcaacgtaaataacaacaataattatagccaatggaggaggagagcgagtttcttttagaaatgaagctaattatcatctcgttatgcactgaaacactttctcttctctctgttcactcttcccaacctctgttttcatgcattgtcactttctgtttcttgattctcctttatttgcctcatctattttggaagatagttttctcacccgtgctgattctgtccggg

SEQ ID NO: 50460 - DNA, 265 bp, Glycine max
  Clone ID: 701138596H1
ctctctctacttagtcagcagcaactggcaagctgccacaggacatgttatactgtaatgtattttcccacttcccacagtacataaatacaacttccactgaaaggccttaacttaactcttatagtctttcttattccttctggaatccttccctttagtttcatgcgcaaggggaagaagcaattcatttgactcttactttattatttgatttgccggcaccctcttcttcacgggagctgaaaaaaaatgggagaaagtg

SEQ ID NO: 50461 - DNA, 270 bp, Glycine max
  Clone ID: 701138601H1
gtagaaccgtggtggtgtccgctctgcagtttgcttgcaccgatgatatctcaacaaacgtcgccaccgccgagaggctagttagagctgcacataaacagggtgcgaacatcattctcattcaggaactctttgaaggttattacttctgtcaggcacaaagagaggatttcattcaaagagctaagccacataaggaccatcccacaatcctcaggatgcagaaacttgcaaaagagttaggtgtagtcattccagttagcttctttg

SEQ ID NO: 50462 - DNA, 268 bp, Glycine max
  Clone ID: 701138602H1
gttttggggcaaggttaaagatgcgacgataaaaaatttcccgagtcgtgatgagcggaagaaactgagggagtattacgagaaattcagggaattcatggatcgtgtagaacaaaagacgatccctcccccaccgccaatgtaccgtttacaaccaaagtcccctcccccaccgccaaacgcaccaccgaagcaaatcaatattaaaggcctgtccgtcgtcaaagattacttatctgactacggctacattgaatcctctgggcca

SEQ ID NO: 50463 - DNA, 248 bp, Glycine max
  unsure (1)..(248): unsure at all n locations; Clone ID: 701138603H1
ggnccatttttggtgctcttaatcncnaacccgcaactcttactgtaacgaagttctcaacattgtcgacgatgtgctcgacgaagctttcaatttcttctaccaggacgcatccacgaagctcaacatcgaaggcacccaaaggtcccaggatctgaaaaagggtgttgattgcgttcggctgaatgttcaatctgttttggacaaacaacttgctgcttgggagagttacatcctccgtcactgtt

SEQ ID NO: 50464 - DNA, 265 bp, Glycine max
  unsure (1)..(265): unsure at all n locations; Clone ID: 701138604H1
ctttctttatcgccaganaattttcaaaccctaaaatccgaatttcgctgatgatctttcctaatcgtcatcataccaaacaatttttcttcatatctgtctccgggagagtcgctttgacgggaaacaagggttttcgctgcaattctaatcggtcaaattggaatcgtcggatcaatttgtcatgaagttcctggagtgttctgctttagatcggcttaatgatttcttgggtaatttgaatctgggagaacgtactatcaaa

SEQ ID NO: 50465 - DNA, 265 bp, Glycine max
  unsure (1)..(265): unsure at all n locations; Clone ID: 701138605H1
ggaaacgatgaagtgagcaacacaacacaaccagacccatcgttatcttatctccttctccatggcttccttacccagttttactccttttgtatttctattgcttgtcattggatgcaatgcaaggcctttgtatccacttcccagcaaaggtgatgatggaaataggaagcccctacaaacttttcgcccttataacattgctcatcgcggttcaaacggagagcttcctgaggaaactcatcctgcatacttgagagctntt

SEQ ID NO: 50466 - DNA, 265 bp, Glycine max
  unsure (1)..(265): unsure at all n locations; Clone ID: 701138606H1
ggcaccccccacaaaaatgacaggagagacagtgaacccaaaagcttaccctttggccgatgcgcaactcgcaataacactcttggatcttgtgcaacaagctgccaactacaagcaactaaaaaagggtgctaatgaagcgactaagacactgaacagaggcatttctgagttcgttgtgatggccgcagacactgagcctcttgagattcttctccatcttcctctccttgctgaggntaagaatgttccctatgtattcgtt

SEQ ID NO: 50467 - DNA, 263 bp, Glycine max
  Clone ID: 701138607H1
aggttttcactttggccgaggtctctcagcacaacaatgccaaagactgttggcttgtcattcatggcaaggtttataatgtaacaaagtttttggaagatcaccctggtggggatgaggtcctgttgtcttccacagggaaagatgcaaccaatgattttgaggatattggtcacagcaccagtgccgtagccatgatggatgagttctatgttggagacattgatacatcaaccatccccagcaaggttaagtacactcct

SEQ ID NO: 50468 - DNA, 263 bp, Glycine max
  unsure (1)..(263): unsure at all n locations; Clone ID: 701138608H1
gctttttgatgatggtgtggtgaagcgtgaggacttatggatcacctccaaactctggtgttcagatcatgcttcagaagatgtgcccaaagcattggataaaacattgcaggatttgcaacttgattaccttgacctctatctgatccactggccagtgcgcatganaagcggatcagttggattcaagaaggaatatctcgatcaaccggacattcccagcacatggaaagcaatggaggcactctatgactcaggcaagg

SEQ ID NO: 50469 - DNA, 266 bp, Glycine max
  unsure (1)..(266): unsure at all n locations; Clone ID: 701138609H1
gcaagagcagcttgcaatcaccttcacttggttcccagtttagttcatcctctaaagtcaaccctcttcacaaatcacactctttccaccacacgcacttcgctcnctatggcattcaccgaagttctcttcttcttcatccaaaataagcatgagcctcaaggctggtattgttggccttcccaacgttggcaagtccactctcttcaatgccgttgtggaaaatggaaaggctcaagctgctaattttccattttgtacaatag

SEQ ID NO: 50470 - DNA, 312 bp, Glycine max
  unsure (1)..(312): unsure at all n locations; Clone ID: 701138610H1
accatccatgcagataagggacgttgaagaggaagacaataaccctgnttgggtcagaatcaaggattggttagacacacaagantncgtcatccgtggtttatattgggtttgggagcgagttgaagctgagtacaggaggaaccttcactgagttgngcacatggacattggagnctctttcaaatttgccctttnctatttcggcgncattngaaagaaaccctgganacagaaagagtcntggctctgnancttcggcccaggaaaggngttttcggaaaggnacaggaaaacccaaagggaaaccgt

SEQ ID NO: 50471 - DNA, 263 bp, Glycine max
  unsure (1)..(263): unsure at all n locations; Clone ID: 701138611H1
cagatcttgatgataacgatgaaaagtggattgataaaaaaaggcatggacatgactctgatgctgtgcttagctgccctgcttgcttcaccaccctctgcctagaatgccaaaggcatgaaaaatatttgacccagtatagggcagtatttgtggtaaactgcaanattgggaatgacaaggttttgaaacaaaatacttcaagatcaagaaaaagaaatagagggaaagaaggatttgatggagatgatgcacattcaact

SEQ ID NO: 50472 - DNA, 263 bp, Glycine max
  Clone ID: 701138612H1
ctgctcctgacgccgttcccgcacagggagaacgtggaaatccagaagctgccgacgcggcggggcacggagattgtggcgctgtacatacggcacccgatggcgacgtccaccgtgctctactcccacggcaacgcagctgatctcggccagatgtacgagctcttcatccagctcagcatccacctccgcgttaacctcatggggtatgactattctgggtacggacagtcatcagggaagccaagtgagcagaatacata

SEQ ID NO: 50473 - DNA, 262 bp, Glycine max
  unsure (1)..(262): unsure at all n locations; Clone ID: 701138613H1
tggctcccaagggtttaacctttctggctgtgttaatatgcgtttcagcactgtcactgagtccttctgttgcgggggaagggcaaaataatggccttgttatgaacttctacaaggaatcatgccctcaggctgaagacatcatcacagaacaagtcaagcttctctacangcgccacaagaacactgctttctcctggctcaggaacatcttccatgactgtgctgttcagagttgtgatgcttcactgttgctggactc

SEQ ID NO: 50474 - DNA, 262 bp, Glycine max
  unsure (1)..(262): unsure at all n locations; Clone ID: 701138614H1
caaatttctactatttttcantggcttctgcagatgttgagttccgttgctttgttggtgggcttgcttgggtcaccggcaacgatgccctcgagaaagccttntcaatctacggcgacatcgttgaatcgaaggttatcaacgaccgtgagactggaaggtccagaggattcggatttgtgaccttcgcctcagagcagtcaatgaaagatgcgatcgcaggaatgaacggccaggaccttgacggtcgtaacatcactgt

SEQ ID NO: 50475 - DNA, 265 bp, Glycine max
  unsure (1)..(265): unsure at all n locations; Clone ID: 701138616H1
catagtttcactncggccttatccagtttagggtttcggttctctaccctatctttcacgtatcgaaaccttaaatttcacgatcaggtctgagcaatctggttggtagaaccnttggtcttagtgagtcaagttttatgtctgaattagacgatcaaattcctactgccttcgatccttttgctgatgcaaatgctgatgactcgggtgctgggtcaaaggagtatgtgcatattcgtgtacagcagcgaaatggtaggaanag

SEQ ID NO: 50476 - DNA, 268 bp, Glycine max
  unsure (1)..(268): unsure at all n locations; Clone ID: 701138617H1
caggatttcaatgtggaagctctagagaagtttgttgaggaatctagtacccctgttgttactgtctttaacaatgaaccgagcaatcaccctttcgttgtcaaattcttcaacagtcccaacgcaaaggcaatgttgttcatcaacttcactgccgaaggtgctgaagctatcaaatcaaaatactcngaagctgctgagcaatataaacaacagggtgtcagctttttggtgggagatgttgagtctagtcaaggtgctttccagt

SEQ ID NO: 50477 - DNA, 264 bp, Glycine max
  Clone ID: 701138619H1
ccatccccataattgatattagtccccttttggctaaggcagatgatccaaaaatggctgaggatcctggtgtgcttgaggttgttaaacaattggataaggcttgtacagaggcagggttcttctacgtgaaaggacatggttttcctgagactctccttaaagaagttagagatgtaacgcgcagattctttgaactttcatatgaagaaaaggcgaagatcaaaatgactccagctgctgggttcagaggttatcaaaggc

SEQ ID NO: 50478 - DNA, 263 bp, Glycine max
  unsure (1)..(263): unsure at all n locations; Clone ID: 701138620H1
ttggccatccctgcagtactccttgtaatactcattttgattctatcctctgtcttgttccatcttcnagatgaaagancaantccaccaggtcctaaacccctcccaattattggtnaccttcacatgctggggaaactcccacntcgttcccttcaagcccttgccanannttntggacccataatgttcataaagttgggacaagtcncaaccgttgtagtttcctcncctgaaatgcagagctattcctcaaaacgcat

SEQ ID NO: 50479 - DNA, 264 bp, Glycine max
  unsure (1)..(264): unsure at all n locations; Clone ID: 701138621H1
taaaatctaaagatgatcctaaaagtaccaaagagagtggtccttttgaaaacatggagcaaactgatggtcctgatgaggcaaagaaaataaagggtatgaaggggaatcgtgcatttaaatttgcattggttgagtttgttaaggagcttctaaaaccaacatggaaagatggtcaaatcaccaaagaagattatnaaacaattgtgaagaaagttgttgataaagtaactggttccatgcagggggtcaatattcctcaga

SEQ ID NO: 50480 - DNA, 263 bp, Glycine max
  unsure (1)..(263): unsure at all n locations; Clone ID: 701138622H1
cgacgtntccattgngntntcgacggtggntttcgntccgccaccgtccgatctcctcctgccgtaacngacgncggtgtttcgatatcttacatntctctctagccacaggtgatttgaaacagttcntcctggtctaaaggagtagtggagagatntggaagtcancaattggcntaaggagcttacatangatgagtgggtaccgatcantgtatctggtgcacgtccngctgntcnctannagcatgctacggcagtag

SEQ ID NO: 50481 - DNA, 263 bp, Glycine max
  Clone ID: 701138624H1
acttactcctccgaccacaaccatccctggccaccttctagaaaccacgccaggcccaccaaaaaacctgaaccggttccggacccggtcgaaccggaggagaagttcgcggacgagtccatgataacaaccgcggaagaattggggtggctgggggagatggaagcgacgtcgtccacggttctcgaaagcccgtttatggctacgacgtaccatgctgacgtggcgctgattccgatgagggaggaggacgagtcgctctt

SEQ ID NO: 50482 - DNA, 263 bp, Glycine max
  unsure (1)..(263): unsure at all n locations; Clone ID: 701138627H1
ggaaaaatggtgtcgctgaaactgcagaagcncctctccgcaagcgtgctcaagtgcggcagaggaaaggtttggcttgaccccaatgaagtcaacgaaatctccatggccaattctcggcaaaacatcaggaagttggttaaggatgggtttatcatcaggaagccaaccaagattcactcccgctcacgtgctcgtaggatgaaggaggcaaagaggaagggccgccactccggttatggtaaacgtaagggtacaaggga

SEQ ID NO: 50483 - DNA, 261 bp, Glycine max
  Clone ID: 701138628H1
ctgcttcaaggaaggagagcttgttattctctatcaacaaggaaaatgtcaggtgaagaggttgttgttgcagctgagccagctgctgccatcccaggcgagcctatggatatcatgactgccttgcaacttgtgctcagaaaatctctggcttatggtggtcttgcacgaggccttcacgaaggggcaaaagtgattgagaagcatgctgcacaactctgtgttctagcagaagactgtgaccagcctgactatgttaaa

SEQ ID NO: 50484 - DNA, 261 bp, Glycine max
  unsure (1)..(261): unsure at all n locations; Clone ID: 701138629H1
catccttgttggtggatcaacacgtatcccagctgttcaggagcttgtaaagaagttgactggcaaggacccaaatgtcactgtcaatccagatgaagtggttgcccttgnagctgcagttcaggctggtgtcttggctggagatgtcagtgatattgtgctgttggatgtcactccattatctttgggtctggaaactctaggtggtgtgatgacnaaaattattccaagaaacactactcttcccacctcaaagtccga

SEQ ID NO: 50485 - DNA, 261 bp, Glycine max
  Clone ID: 701138630H1
attaattctctctttcaaatatatgggcagaagatgcttcaattattccaacacacacaaaagcttggtactactctgaacatggtagtccaggtgatgttctacaattagatcctaattggcccttaccccaacaactcaaagatgaccaagtgctcatcaaggtcatcgctgcatccattaatcccgttgattacaagaggatgcacggcgagttcaaggacactgaccctcatctgcctattgtgccgggttagagtg

SEQ ID NO: 50486 - DNA, 263 bp, Glycine max
  unsure (1)..(263): unsure at all n locations; Clone ID: 701138631H1
ggccaatatttctantatttctgatttagttgcctttaaaccttatttccaaattggaggcattgtccaccgttatctaggccgtcaaacccttgttatggaagatgatcaagaaattgcttcatatatgtttcgtaggactgtcccttctatgcacttatcccctgaggatgtacgatggatggttggagcttggagagacaggatcataatatgcacagggacatatggacctactcatgctcntatcnaggcctttctgg

SEQ ID NO: 50487 - DNA, 269 bp, Glycine max
  unsure (1)..(269): unsure at all n locations; Clone ID: 701138632H1
cttcttcatcgttgtatccttctagtcaatctcagaatctcaatgttcctagtggagctttccatccctatccagcattgtgcacaaagaagtgtgttctagttcttgcaagaggatatggtnnnnnnnnnnnnnnnnnnnnnctgcagaaccaaaggagggccatgaggtgagggctcaggtcaccgtgcgaaggaaaaagctagcagttttcgtttctggtggaggatccaacttcagagcaattcatgaggcctccaaaaggggat

SEQ ID NO: 50488 - DNA, 264 bp, Glycine max
  unsure (1)..(264): unsure at all n locations; Clone ID: 701138633H1
gagtaactatgactctcttaaggtagccaaatgcctcgtcatctaattagtgacgcgcatgaatggattaacgagattcccactgtccctgtctactatccagcgaaaccacagccaagggaacgggcttggcggaatcagcggggaaagaagaccctgttgagcttgactctagtccgacttcgtgaaatgacttgagaggtgtaggataagtgggagctgganacagcgaaagtgaaataccactacttttaacgttntttt

SEQ ID NO: 50489 - DNA, 263 bp, Glycine max
  unsure (1)..(263): unsure at all n locations; Clone ID: 701138634H1
gtgggattctattctaagattttncagaatgtctagctgtgggtgtggaagcagctgcaactgtggcagcaactgcggttgcaacaagtactcttttgacttgagttacgttgagaagacaaccacagagactctagttttgggtgttgggcctgtgaaggcccaattggagggtgctgaaatgggtgttgcatctnngaacggtggctgcaactgtggatcaagctgcacctgtgacccatgcaactgcaagtaaggtcaag

SEQ ID NO: 50490 - DNA, 146 bp, Glycine max
  unsure (1)..(146): unsure at all n locations; Clone ID: 701138636H1
gcgccggttgggaacagggtgctggaacagcacaagacttttcaataatccatttgtgttanggtttggtctctctcatctgcatntnnaccaccgngntcagnaganacangnacntgnatagcnattgcgacacgncncancnt

SEQ ID NO: 50491 - DNA, 257 bp, Glycine max
  unsure (1)..(257): unsure at all n locations; Clone ID: 701138637H1
cacgaatatcttgttgtntggagcgatccgngaanaactctgtaaacatgttggtttaccaggacntccttacangngatgagcttctctctgactccttccgttacaaggaaattgagaatggaatgctgtgggaagttgaggggaagtgggttgttaaaggagcagttgatgtagacattggtgcaaacccttctgctganggtggaggagaagatganggagttgatgatgcagctgttaaggttgttgacatt

SEQ ID NO: 50492 - DNA, 93 bp, Glycine max
  unsure (1)..(93): unsure at all n locations; Clone ID: 701138638H1
tatattcttgagagtgagcataattaatggctaccaagcattgcactaatgtcctctccttgccacacaacatacgatcngcgnnngcncnna

SEQ ID NO: 50493 - DNA, 263 bp, Glycine max
  unsure (1)..(263): unsure at all n locations; Clone ID: 701138639H1
cgaccatattgcttccaatttggnccttcttcaccctcttagggtttgcatcagattcccctaattcttgcttgattttgcgctttcgctagattttcttcaaaatgactcaagatctagagatgaaggatcgctcaacgccttccaactccgtttcttcgcctgctccatctactctgcagcatttgaaggagatagcgtctcttatcgagaccggttcgtactcgaaggaagttcgtagaattgctcgcgctgttcgcctt

SEQ ID NO: 50494 - DNA, 260 bp, Glycine max
  unsure (1)..(260): unsure at all n locations; Clone ID: 701138640H1
gccccttctcggtttctgagatctagctgagaaaccctccactctgcgagtccaaactctcctcctacccaaaatggatgcaagggcatcatcttcttcagcttcctcgattcttttccttgcagcaattgtagctgcttatttctattcatcagaagcagctgtgtccaaaggatcttttgaggacaatttcagcataatgtggtctgnggaccattttactacntctaaagatggacagatctggtatctctcactag

SEQ ID NO: 50495 - DNA, 262 bp, Glycine max
  unsure (1)..(262): unsure at all n locations; Clone ID: 701138642H1
tgcccatcagatgtattctgcattggcaaccgaaccaaggaagcgttgtgaacagccaagttcctgaatgaganctcgcagtgcgtcgaaagccttaacggcgtcaaagaaggaagatgcaaagcctccctcactttctacagacccaatttacgagaccaatcggtgaccatcgattttcctcgcgattttctggggatatcgatgctggagcagccgaacaantactacttantcattcgcgggcagaagattgttctcg

SEQ ID NO: 50496 - DNA, 260 bp, Glycine max
  unsure (1)..(260): unsure at all n locations; Clone ID: 701138644H1
ggcactgtaagtccaagagaaaaagaaaaatttgagagaaaaggaaaggcttaacaacgcacaaaatgtcctctaatccagtaatactgcagagtgagaacttgaccaagtatatactggagaccagcgtttacccacgagaagaagagactctcaaagagctaaggaatgccactgcaagccatccttggggctttatgggtgctgctcccgatgcgggtcagctaatgaccttgctcttgaagctgttgantgctaaa

SEQ ID NO: 50497 - DNA, 261 bp, Glycine max
  unsure (1)..(261): unsure at all n locations; Clone ID: 701138646H1
aacactttcttctctctgttttccttcttcctcgcatcaatggagtnggacggcgttctcctcggcatgtgcaaccctactcctcgacatctctgccgtcnccgacgacgctttcttgcaaaaatacggtatcaagttgaacgatgcgattctcgccgaggataaacacaaacctatgtatgaagaattggctaacaatcctaatgtggagtacattgctggaggtgctactcagaattcaatcagggttgctcagtggat

SEQ ID NO: 50498 - DNA, 262 bp, Glycine max
  unsure (1)..(262): unsure at all n locations; Clone ID: 701138647H1
gttcactcaaaagagcagaaagagacaagatcccggaaaggcgtgccggcgtcagagactcatcagttctcactcgtacggcgttgtgctttgctttctcaccttcttcttcatttctttcatcatcnccatcatcacaatataaagttcgctcctttctcagttttcacccatacccagatgggtaacagcaccatctcggatctgtgtccctcctttaagtgaaaaaggttcaatctttggtctctgaggctgttgggtt

SEQ ID NO: 50499 - DNA, 140 bp, Glycine max
  unsure (1)..(140): unsure at all n locations; Clone ID: 701138649H1
agagctggcaattatgantatagagtcactacngctaactttntggtggagactttaaaatgtgctatatcccttgtggccttgggaagnatatggacaaaaggcggtgtcaatgaggacaacaggttgactanaanctt

SEQ ID NO: 50500 - DNA, 262 bp, Glycine max
  Clone ID: 701138650H1
caacacactgcttcaatctcaatcgggcacattgagaaatggttttgagtaatgggaaaactgaggcaccattgccaagtagtaatgggggaggtgctgagattgataacaatgagaagaagcccttcaagatcttcgtagggtatgaccctcgcgaagatcttgcctatgaggtatgtcgccactccatcttgaaaaggtcttcaatccctgttgagatcataccaattaagcagtcagatctgaggaaaagtggtttgta

SEQ ID NO: 50501 - DNA, 261 bp, Glycine max
  unsure (1)..(261): unsure at all n locations; Clone ID: 701138651H1
tgattttgatggtacaattacaaaaggaggatactccagttacatagtagtccatgagaggtactgcttcatgataccaaaaagctatccattggcttccgcagctcctttgctttgtgctggaattactgtttattcaccgatggtccgccacaagatgaatcaacctggtaaatctctaggagtgattggtcttggtggcctcggtcatatggcagtgaaatttggaaaggcatttggtttgagtgtaagnttttcagc

SEQ ID NO: 50502 - DNA, 260 bp, Glycine max
  unsure (1)..(260): unsure at all n locations; Clone ID: 701138652H1
ganaaactctgtaaacatgttggtttaccaggacctccttacaggtgatgagcttctctctgactccttccgttacaaggaaattgagaatggaatgctgtgggaagttgaggggaagtgggttgttaaaggagcagttgatgtagacattggtgcaaacccttctgctgagggtggaggagaagatgagggagttgatgatgcagctgttaaggttgttgacattgttgacacattcagacttcaggagcaacccgcat

SEQ ID NO: 50503 - DNA, 261 bp, Glycine max
  unsure (1)..(261): unsure at all n locations; Clone ID: 701138653H1
actagtagtcagtagcagtagtacttgtacccataacataacaaccatggctaatgtgtcccttctccttttccttttgttcttgtctctctcatcaggagggaatttgatcatggctaatgggcagaaaacttggtgtgtggcaaagccttcatcagatcaagcaacccttttggccaacctcaattatgcctgttctcaagttgattgcaggattcttcagaaaggatgccccngctcttaccctgacaatctcatgaa

SEQ ID NO: 50504 - DNA, 258 bp, Glycine max
  unsure (1)..(258): unsure at all n locations; Clone ID: 701138654H1
gcaacctctgcgctgcgcaaagtnttatccaatttctcctatanattcnttcattccctttatcattaccctgtgcttctctccaacctctcatcatctatctatttgctccaaacatggatgctaaatctcggatctcgcccacacgtctgacagataagangtgtgtgccangcaatctgaaggncttgcgaccaatgagtgaggatgcagcacacactctaatgccacaggttgctgagtggaatttggtaaacg

SEQ ID NO: 50505 - DNA, 238 bp, Glycine max
  unsure (1)..(238): unsure at all n locations; Clone ID: 701138656H1
gagagagtgagtgcaaagccatcnccttcttctcagacaantagtttggtanaanatggcnnatgctgaggatattcaaccccttgtctgtgacaatggaactggaatggtgaaggcaggatttgctggtgatgatgctcctagggctgtgtttcccagtattgttggccgacctcgtcatactggtgttatggttgggatgggtcaaaangatgnctatgtaggtgatgnagcccag

SEQ ID NO: 50506 - DNA, 260 bp, Glycine max
  unsure (1)..(260): unsure at all n locations; Clone ID: 701138657H1
ctttctatctcaccattttgntcaataaaccaaagcttctctctctctctttggtcctttttccatcactaggaggatttccaaattggtcnttgagggtggctcaaaagctctgcttctggtcaaacgggacaaagtggatctcactcatatgaagagactttcaactttggtggatgggtttttggttcttgcattgttcagttgtagcacatggacagtgtggagcagctcatgctgcaatcagataaactcgtacg

SEQ ID NO: 50507 - DNA, 262 bp, Glycine max
  unsure (1)..(262): unsure at all n locations; Clone ID: 701138658H1
caaatacctaatatggagtttcacattcttcccatcattacttttctcatgcttgttgtggcaactaatgcncgatgctgcattacctcctgcattttactggaagtccaagcttcctaccacaccaatgccgaaagccatcactgatttgctacaacctgattggaaggaagagaaagacacctctgtggatgtagggaaaggtggagtaaatgttggtgtagaaaagggaaaccaaggaccaggagatggcactgatgtt

SEQ ID NO: 50508 - DNA, 258 bp, Glycine max
  unsure (1)..(258): unsure at all n locations; Clone ID: 701138659H1
ggtgtggactgtggagtaggatgtttctcaattatgtttttttgggcttgtttgacaggttgggcttggagatacttctggtggtgacagtccgaatgatcactattgctggatgcgtccggaggacatggactatgaccgccctgtgactgaatgccacagttgttccgatctcgcggctganatggctgctgccttggcttctgcttccattgttttcaaggacaacaaggcctattccaagaaactggtgcatgg

SEQ ID NO: 50509 - DNA, 260 bp, Glycine max
  unsure (1)..(260): unsure at all n locations; Clone ID: 701138662H1
gantgaatatcgtaagatcgaagcaataaccttttttcctctgccgccactggtttcgatcccacacccacaaccctccatccttcgaatgctcttgcgttttccttaaactgcctcattccgaagccatacacacataacggtttttctaggtgctagcaatgtcgactcctgctaggaagaggctcatgagagatttcaagaggctgcaacaagaccctcctgcaggaatcagtggcgcccctcaggataacaacatc

SEQ ID NO: 50510 - DNA, 262 bp, Glycine max
  unsure (1)..(262): unsure at all n locations; Clone ID: 701138663H1
ttaatttgcaagtgtgtgagatgggaaaaatggaacctctacctttgctttcactaaaccacgtttcttttgtangtaagagtgtgagtgagtctgtgaaattctaccaggatgtccttggatttgtgctcatcaagaggccatcttctttcaaatttgaaggggcttggttattcaattatggcattggcattcacctgctagagtcagaaaaggttccggtggaaaaaagagagatcaacccgaaaganaatcatatatt

SEQ ID NO: 50511 - DNA, 259 bp, Glycine max
  unsure (1)..(259): unsure at all n locations; Clone ID: 701138665H1
ctgccagtagtcatatgcttgtctcaaagattaagccatgcatgtntaagtatganctaattcagactgtgaaactgcgaatggctcattnaatcagttatngtnngtntgatggtatcttcnnctcggataaccgtagtaattctagagctantacgtgcaacaaaccccgacttctggnngggatgcntttattagataaaaggtcaacacaggctctgcctgttggcttgatgatcatgntaactcgtcggatcgc

SEQ ID NO: 50512 - DNA, 260 bp, Glycine max
  Clone ID: 701138667H1
agtgcctcatcttcacaatctttttcagcagacatctattcaacaggatcttataatgaatctgttgaatagcttgcaaactgccgaggcaattgatacttctcagaatggaaagttaccaccattacctcgcaattcagagaacaatggaagtgttgatacagcagtttcagagagggaacaactactgctgggcagaatttcagaactccaatcccggatgattaatttgaccgaggaactgacttatgagaagttaa

SEQ ID NO: 50513 - DNA, 261 bp, Glycine max
  Clone ID: 701138668H1
cttcgatctctcaaactctatcggcgcagaaccaatcctatatcactatggggaagacacatggaatgggagctgcccgcaagctgaagtctcaccgtaggagacaaaggtgggctgacaagtcatacaaaaagtctcatcttggaaatgaatggaagaagccttttgctggttcatcccatgcaaagggtattgttcttgaaaagataggtattgaggctaagcagcccaactctgccattcgaaaatgtgccagggttc

SEQ ID NO: 50514 - DNA, 257 bp, Glycine max
  Clone ID: 701138669H1
cacgaatatcttgttgtttggagcgatccgagaaaaactctgtaaacatgttggtttaccaggacctccttacaggtgatgagcttctctctgactccttccgttacaaggaaattgagaatggaatgctgtgggaagttgaggggaagtgggttgttaaaggagcagttgatgtagacattggtgcaaacccttctgctgagggtggaggagaagatgagggagttgatgatgcagctgttaaggttgttgacatt

SEQ ID NO: 50515 - DNA, 256 bp, Glycine max
  unsure (1)..(256): unsure at all n locations; Clone ID: 701138670H1
tttttctctcacctgaaaatgtcttgctgcggtggtaactgtggttgcggaaggcctgcaagtgcggcaacacctgcggaggctgcaagatgtacccagacttgagctacaccgagtcaacnaccaccgagaccttggtcatgggagtggcaccanttaaggctcaattcgagagtgctgaaatgggtgttcccgctgagaacgatggctgcaaatgtggagctaactgcacctgcaacccctgcacttgcaagtg

SEQ ID NO: 50516 - DNA, 258 bp, Glycine max
  unsure (1)..(258): unsure at all n locations; Clone ID: 701138672H1
ctgagttaaggcttggactgcctggaaacggangcactgaagaagtgctcatcaggaanaggggnttctctgagactgaaactggtcatgaagatgagtctgccaccactgtggatttgatgcttaatctttcttctaaggagnnnnnnnnnnnnnnnnnnnnnnnnnnnnnnnnnnnngataagcncaagactttgcctaaggagaagacccttctgccagcagatcctgctaagcctccagccaagacgcaggtgg

SEQ ID NO: 50517 - DNA, 250 bp, Glycine max
  unsure (1)..(250): unsure at all n locations; Clone ID: 701138673H1
gcttcactccaccttcttcattcccacccaagtctcaacatacaacaatattaacatgaatatgantattaggaatggatacagagaagataaatcattctgctgtttccaccccaaacaagtacttattggggtgtgccccttgtgcttgaatgagaggctcctcatactggctgcaaaacaaggtcaccatcaccaaaaccgttcttcttcctcgtctaaatcttcacacaggcttcaagttagttcc

SEQ ID NO: 50518 - DNA, 250 bp, Glycine max
  unsure (1)..(250): unsure at all n locations; Clone ID: 701138674H1
gaaaatttgantcactcngtaacgattcctgttgctactgatnatgtggaantactncanncgaatagtaaagcagttncntggatgtttttacatagatgtgaaggagattcgangnattggcttgcatgtttccangcttgaaagtgcagangcttctaaacaaggtncagtnnaatanactttgaaatcntggctcacttctngatatgnnagtattgaaaatcncanntntcctatgggtcatgnc

SEQ ID NO: 50519 - DNA, 255 bp, Glycine max
  unsure (1)..(255): unsure at all n locations; Clone ID: 701138675H1
cttggttttagtaaggattcaccttttcttatatcagttggtgganactataaattgtggctggagttggataggaacggagcagaacagaactatagtatctcatctctcttgatagtagaagtggtgctgactttcttgtgatcagtgatgctggtganatctctctcacttcattctcatgccttctcaagttgcagtttttctgcaagtgaaattggaacaaacccaagttgggttccctaaagtcctaaa

SEQ ID NO: 50520 - DNA, 258 bp, Glycine max
  unsure (1)..(258): unsure at all n locations; Clone ID: 701138676H1
cgcggcacccacacacacagttcgtcggaatgggaagggtgattcgcgctcagcgtaagggtnctgggtcggtgttcaagtctcacactcaccaccgcaagggtccggcgaggttccgcagcctcgacttcggcgagcgcaacggctacctcaagggcgtcgtcaccgacatcatccacgaccccggtcgcggcgcccctctgcgccaaggtggcattccgccaccccttccgctacaagaagcaaacggagctcttc

SEQ ID NO: 50521 - DNA, 258 bp, Glycine max
  unsure (1)..(258): unsure at all n locations; Clone ID: 701138677H1
acttcttcgccgtttcagctgaagagccatccgcaggtnagcaanggttaagcataataatgttatccccaatgggcacttccggaaacactggcaaaactatgtncagacttggtttaatcaaccagcccgaaagaccagaagacggttggctcggcagaagaaggctgtcaagattttccccaggcctactgctggatctctcaggcctattgttcatggccagactctgaaatacaacatgaaagtcagagccgg

SEQ ID NO: 50522 - DNA, 92 bp, Glycine max
  unsure (1)..(92): unsure at all n locations; Clone ID: 701138678H1
gccaaaccacaccagcttcgtcccttcatctgcctcactttgctgcatttgtggnattacttttgtactcttgcctactctgatccttncac

SEQ ID NO: 50523 - DNA, 259 bp, Glycine max
  unsure (1)..(259): unsure at all n locations; Clone ID: 701138680H1
tgggcctttacattttgatctgaatnctggtgcaaagattccatcggttggtcttggaacatggaaagctcctccaggtgttgtgggtgatgctgttattgctgcntcaaggctggttacaggcatatagattgtgctaggatatatgataatgaaaaagaggtaggggaggctctgaaaacactattttctactggggtagtacagcgtagtgagatgttcatcacatcaaagctatggatcagtgactgtgcacctg

SEQ ID NO: 50524 - DNA, 262 bp, Glycine max
  unsure (1)..(262): unsure at all n locations; Clone ID: 701138681H1
gttctgctcctctcccaacccctctgtttctttggagtgagaaagttttatactttagaaccagctagcgagcaagtgagccagtgtcatacatatatataaatagcgtgcgagaaatgcagcagcacctgatgcagatgcagcctatcatggcagcctactaccccaacaacgtcaccactgntcacattcaacagtacctggatgagaacaagtccttgatcctgaagattgttgaaagccagaattctggcaagctgag

SEQ ID NO: 50525 - DNA, 153 bp, Glycine max
  unsure (1)..(153): unsure at all n locations; Clone ID: 701138682H1
gaagaattgagaaaaagaatgtggtctccaaagtcctnncaatacaaatctntagctactncctccntctttnttgtatacccnttatntgaancttctcngntacgntttcgagcagccnctttntccttatnatagcctcgnngtagctna

SEQ ID NO: 50526 - DNA, 262 bp, Glycine max
  unsure (1)..(262): unsure at all n locations; Clone ID: 701138683H1
gngggacccttccttcgcaagcaagagancaganagtnctgctgacaaggcaaagtnccaacaatgtttttnntnaagaatctgtcagantcanccactgatgatgaattgaagantgtttttggtgantttngaactattactagtgctgtcgtaatgagggatggagatgggaaatcaaagtgttttggatttgtgaatnttgagaatgctgntgatgctgctagggctgttgnggctctcaatggcaaanagtttgatg

SEQ ID NO: 50527 - DNA, 258 bp, Glycine max
  unsure (1)..(258): unsure at all n locations; Clone ID: 701138684H1
gtttgtntntcatttctttgctcgtatcantgtctaacaccagcaacaatgtcgctggggtcgacaacacgttcagaagaanatttgatcgagaagagtatctagaacgagcacgggagcgcgagagacaggaggaggagggtcgagcgaaacctaaagccaaaggtcctcccgtgcagaggaagcccttgaaacatagagattatgnagtggaccttgaatcccgcttgggcaagactcaggttgttacgccggttg

SEQ ID NO: 50528 - DNA, 257 bp, Glycine max
  unsure (1)..(257): unsure at all n locations; Clone ID: 701138685H1
ctttgagtcttcttgatccttctttttctccttgaactcaaacatggcagatgaggtggttctgctagattttnggccaagtccatttgggatgagggtcaggattgcacttgctgaaaagggtatcaaatatgagtacaaagaagaggacttgaggaacaagagtcctcttctcctccaaatgaacccggttcacaagaagattccggttctcatccacaatggcaaaccctctgtgaatccctcatgctgttcag

SEQ ID NO: 50529 - DNA, 261 bp, Glycine max
  unsure (1)..(261): unsure at all n locations; Clone ID: 701138686H1
gggcaccctctggcgctgcgcaaagttttatccaatttctctatagattcgttcattccctttagtattaccctgtgcttctctccaacctctcatcatctatctatttgctccaaacatggatgctaaatctcggatctcgcccacacgtctgacagataagangtgtgtgccatgcaatctganggaattgcgaccaatgagtgaggatgcagcacacactctaatgccacaggttgctgagtggaatttggtaaacga

SEQ ID NO: 50530 - DNA, 249 bp, Glycine max
  unsure (1)..(249): unsure at all n locations; Clone ID: 701138687H1
gtaagttttcantcaatggccagcgctcagctctcagcaatatcttcgtcgatctctacggcgtcgtttgaagggcttcgaccttcggctgttcagtttgcttccgcgggcagaattagaattgncaatctctcccaaaggtctttccggggcttggttgtcanagccgccaccgttgttgcccccaaatacaccgcgattaagcctctgggagacagagtgctgataaaaattaaggaagcagaggag

SEQ ID NO: 50531 - DNA, 259 bp, Glycine max
  unsure (1)..(259): unsure at all n locations; Clone ID: 701138688H1
cttccgggttcacgtttcacaatcactttttgcgcttctctcactcactcacnnnnnnnnnnnnnnnnnnnnnggttttctttctcgaactcgaacgaagatgcgtgagattcttcacatccagggagggcaatgcgggaaccagatcggagccaagttctgggaggtggtgtgcgcggagcacgggatcgattcaacggggaggtaccaaggggacaacgagttgcaactcgagcgagtcaacgtctactacaatgaa

SEQ ID NO: 50532 - DNA, 255 bp, Glycine max
  Clone ID: 701138689H1
atttcctcacctacgcgtacattcttctctacattgctctctccagcggccaaatcttcttcaacaagtgggttttgtcctctaaggaaattaacttcccttatcctttgggcttgactctacttcacatggtcttctcctctgttctgtgttttgtgttaaccaagattctgaaggttatgaaggttgaggagggaatgactcctgaaatatacgctacttcagtagtgccaattggggccatgtttgcaatga

SEQ ID NO: 50533 - DNA, 257 bp, Glycine max
  unsure (1)..(257): unsure at all n locations; Clone ID: 701138690H1
gtccactcaaccttcgcttntcgatatgtcagaacttcgcttcccaggtttaagatgccggaggagtcgataccaaaggaggcagcgtatcanataataaacgatgagttgatgttggatgggaacccaaggttgaacttggcatcatttgtgacaacctggatggagccagagtgtgataaactcatcatggctgccattaataagaactatgttgacatggacgagtatcctgtcaccactgagttacagaatcg

SEQ ID NO: 50534 - DNA, 257 bp, Glycine max
  Clone ID: 701138691H1
gaaggcctggagggtgaatcacttctgatctgttctccattggaagccgtcgtccattctgagtcagatcgaaaactcacagtcacactcattacgagttgaaatcgttggaacctcgtcgaacaaccattcaaattgagacagacacacgtgctctgactcgccggaatctcaccggaaaacaagttcgtcggaactcagttggcgaacttgaaattgacgcttagggcaactccaaccaaaaattccgtccaaaa

SEQ ID NO: 50535 - DNA, 257 bp, Glycine max
  Clone ID: 701138692H1
ctgaaggcaacgccactgcaatctgttctaattagaaatagaaggttcatcatctcaaaaaggcttttgtgattctcgatttgatttggatcgcacagaacgaaggcatgggtcaagcttttcggaagctcttcgacaccttcttcggcaacaccgagatgcgggttgtgatgcttggtctagatgctgctggcaaaacaactatactgtacaagctccacattggagaagttttatctactgttcctacaataggt

SEQ ID NO: 50536 - DNA, 260 bp, Glycine max
  unsure (1)..(260): unsure at all n locations; Clone ID: 701138694H1
caanatcctcctcaccaaaccctaaccacaatcatggcaagactttttgngcctcccttcgccgctccttggttttccgncccggcggtgacgattcacctttngccggaatcgcnaanaagctcggctccgncattcgcaaatcgcgaatcgccctcgaacctcctcctccgatacggtggcgcaagggcgagttgatcggttccggcggcttcggtcacgtctacatgggaatnaacctcgactccggggagcttatt

SEQ ID NO: 50537 - DNA, 259 bp, Glycine max
  unsure (1)..(259): unsure at all n locations; Clone ID: 701138695H1
gttcactgtcactttacccaatcctaacactttcttctctctgtnttccttcttcctcgcatcaatggagtcggacggcgttctcctcggcatgtgcaaccctctcctcgacatctctgccgtcgtcgacgacgctttcttgcaaaaatacggtatcaagttgaacgatgcgattctcgccgaggataaacacaaacctatgtatgaagaattggctaacaatcctaatgtggagtacattgctggaggtgctactcag

SEQ ID NO: 50538 - DNA, 269 bp, Glycine max
  unsure (1)..(269): unsure at all n locations; Clone ID: 701138704H1
cgagaacgnaagtcaacttagtggtaagaactgttgttaccgtgggcaactacgataacatcattgattgggagtttaaaacaagtggctcantcaaaccctcgattgctctctcgggtatattggaaattaagggagtggatattaagcacaagagtgagatcaagagcgatcaacatggtatcttggtgtcggcaaacagcattggtgtttaccacgaccacttctacatttaccatcttgaccttgacattgatggngttgccacc

SEQ ID NO: 50539 - DNA, 273 bp, Glycine max
  unsure (1)..(273): unsure at all n locations; Clone ID: 701138705H1
ggactataccatttcaagaggaggaactcaaggcccttttattgtgctgttggtattttcttctttttgtgctttaggncaatatgcagntgcagcntatctccaagtttnaggcatgttactgtgtttccaagtagagggttcaaggagtttatcaaagtgaaggttgcatcgaagcgtgtctcgcatcggntggcncttctatcantcngggtctncacttttctgctccggtttgtgttngtnttaacagcagtgggatggcattggatg

SEQ ID NO: 50540 - DNA, 272 bp, Glycine max
  unsure (1)..(272): unsure at all n locations; Clone ID: 701138706H1
agcgaagtccactatgccgaagcaaattcacgagattaaggnccttcctcctcactggctaggaggaaggatgcacgctctgtnaaaatcaagcggagcaaggatgtggtgaagttcaaggtccgttgctccaagtacctttacaccctctgtgtgtttgnttctgagaaggctgataagttgaagcaatcactttcctccaggtttaagcgtgcaggatgtgtgattcctnctgctgtatgaagatccaggttttcnctggattttgggga

SEQ ID NO: 50541 - DNA, 287 bp, Glycine max
  unsure (1)..(287): unsure at all n locations; Clone ID: 701138707H1
ttttatgcataaganaacaatagctggccacaagataagtagacaagatagcagggaaaaaatcaaacatatacttcagcanttagttccagatttgcacaacaattatggcggcagttcctcatccactccatttttgggaatcagagaagaaagccctcagattaccaanacaccgttcangccctcccacagttttctccagaccacagcgncttcganaaggaagacggaggaaatcaacctggaaacaccttnttcccagatggcagaggtggtcnnaacta

SEQ ID NO: 50542 - DNA, 265 bp, Glycine max
  unsure (1)..(265): unsure at all n locations; Clone ID: 701138709H1
tcccaccctgcatcttagcagagccactctgatcactaaaatgccattgttaacttcctctttgttcaacatggttcctctcttctctcttcttttgttctcactcatgattcgttatagtacttctcaggatccaccttcacctggttactaccctagttccaaaattagtcccgttagcttggtganggattagaaccttggggactcagcatcagaaactagaccaagactcataacaatctgggctgactcttactcaggg

SEQ ID NO: 50543 - DNA, 257 bp, Glycine max
  unsure (1)..(257): unsure at all n locations; Clone ID: 701138711H1
atcctctatatatagttctctggcaattaaggtctcatccaaataagcacaaatnggtagccagagttacttcaaggctttgattatttgccttatagcactaattggatcaactcaagctcaattgcagcttggtttctatgccaaaagttgtccanaggctgagcaataattctgaagtacgttgttgagcatatccacaacgctccatcactagcagtgctctcataagattgcncttnccatgattgntttgt

SEQ ID NO: 50544 - DNA, 273 bp, Glycine max
  unsure (1)..(273): unsure at all n locations; Clone ID: 701138713H1
gagatgccgtggtattgattgggattatggtntcgcatcagaaagcaacctcagtgatcgaaacagtgacgtttttttttgnagnttccacctantatcaatcnacccacttgcgactttaagatactaagaaggaaggnaggcggggaagtgagaagtgtaatgggcttctgagagggaatgntttgacctctctggacccttacgtttaaccnaagttggctggggataatgcntatcatcgnaagtcgggtgcnggcnaggttggtccaa

SEQ ID NO: 50545 - DNA, 96 bp, Glycine max
  unsure (1)..(96): unsure at all n locations; Clone ID: 701138714H1
ggacgcagtcanggccgnagcagagtttnaantcanattncaatgagcgatttgagagtttccagaaaagaaattgattttccagtcagtatcaga

SEQ ID NO: 50546 - DNA, 270 bp, Glycine max
  unsure (1)..(270): unsure at all n locations; Clone ID: 701138715H1
tgagggtgagagtgacacaaatctagagagagcactagtactctaaaagtctattatattcttcaaaatatgaccatgcatcgcgagtcttgggcttttgtcttcggcgttatgggcaacatcatctcctttggagtgttccttgctccattgccaaccttttaccaaatctacaagaagaaatccactgaaggtttccagtcacttccttatgttgttgcactgntcagtgcaatgctttgggatttactatgctttcgtgaaaaggga

SEQ ID NO: 50547 - DNA, 182 bp, Glycine max
  unsure (1)..(182): unsure at all n locations; Clone ID: 701138717H1
atctatgtccctgacgctgagcaagaggtctccaattcanagcctctcttcagaatctttcagcctcgtcgtcagcatctccgcacancttcgngcacttgcgcatccttcctcgcctanagctctacgtcgtgtcgantagnagcganagttcgntgttaatggatnatgaacggaggtag

SEQ ID NO: 50548 - DNA, 274 bp, Glycine max
  unsure (1)..(274): unsure at all n locations; Clone ID: 701138718H1
gtaagcctcctgcttatgcttaagctaacaagaagaaacaagtccaattttcctccatcaccaccanagttaccaataattggcaatcttcatcagctaggcacactgccacanngntccttccaagcactctctcgcaagtatgggccctctaatgatgctgcaattaggccaaactccaaccctagtggtctcatcagctgacgtggccagagaaataatcangacgcatgatgttgttttctccaaccgnccacaaacctncggntgctaa

SEQ ID NO: 50549 - DNA, 251 bp, Glycine max
  unsure (1)..(251): unsure at all n locations; Clone ID: 701138719H1
gcatccatgttaagctagtggcncatcggatccagctacacgcctacaacctacagttttggtttggtttgcttgattgaagatcaaggaaggaagatgttgggtgttataaggcacaagagtattcgccccgccttctccgnaatcagncacttctcttctgcagctaaagagattactgtcagggctggctctcanctcngcactcgatgaggaaatgtcagctgatcctaaagtcttcttgatggggg

SEQ ID NO: 50550 - DNA, 277 bp, Glycine max
  unsure (1)..(277): unsure at all n locations; Clone ID: 701138720H1
gtacagggnctccaacgcgccgcatgtcgacgtggcatcggnaacatcgaangatgagcaacgtagttccgacattcggtggccttntccgaaatggtacccggtttcgcgagntgtttctnccgggtgtcagagaagtcatcaagcatgttgtntgcggttaaagatggagcttgcgaaggcatttccatgggaacaacagccatgttggtcttggcangagaacgcttttcatttccaacccagagaaaaactggatgaacgntcccaatggtcc

SEQ ID NO: 50551 - DNA, 223 bp, Glycine max
  unsure (1)..(223): unsure at all n locations; Clone ID: 701138721H1
gagcttgtttaagcttttcttccattaacatattatcanaatgtgtggtattcttgctgttctggtngtncccgatggnctcttcgaggccnaaaaggggtccggcgtggttgagntgctctacacagattggaagcancgtgggccnngaattgggaagtgggnctccatccancaatgngngnccgggtttntgggcannattcaaacnggtttaggccat

SEQ ID NO: 50552 - DNA, 255 bp, Glycine max
  unsure (1)..(255): unsure at all n locations; Clone ID: 701138722H1
tatctccatttccatttcctctcactcagtttccaagaatacttaagctatgggaaagtcanacccaaccgtgagcgctgattaccagaaggccgttgagaaggcgaagangaagctcagaggcttcatcgctgagaagagatgcgctcctctaatgctccgtttggcatggcactctgcnggaanttagnacgtgagctcgnaagaccggtggtcccttcgggaaccataaagcaccccttncggaantcgntc

SEQ ID NO: 50553 - DNA, 197 bp, Glycine max
  unsure (1)..(197): unsure at all n locations; Clone ID: 701138723H1
tctggatgggattattttganggggcacctgttaaggtcaggagacctacnnattatatcttcttagtgtaccctaggccaagccaacctaacccaanccttattggtgtgtggttacactggncggcgtgacctgntgtctatcgattcgtgtgctcaatattatgacnagtaggnttangcttgccaggttgcag

SEQ ID NO: 50554 - DNA, 272 bp, Glycine max
  unsure (1)..(272): unsure at all n locations; Clone ID: 701138724H1
cgaaccctaaccctagaagaaaganaaaaacccacaacacacaatcagtactaccaactagggtttttgtcatggctagtttgcaaactagggttttcttgatggcccttctgtgcctgctggctctnggtgcaaccattattccaatggcacaaggggaagtgtcatgtggncaagttgngagtaacctgacccatgcatctnctatgtgctntatggtggagccacggttcctgcacagtgcttgcaatgggatcaggaacctctatggc

SEQ ID NO: 50555 - DNA, 273 bp, Glycine max
  unsure (1)..(273): unsure at all n locations; Clone ID: 701138725H1
tcagcctctgcctaatgcagataaagaagtgttgcatattggtggtgaggagaactctgccagagaaactcagtctcttgctattgcagataatcaagcattacaacatgttggaaaaaatgttcctggtcacctaaaaaggcatcaacctaagatgcccccaaccttgaatgagtctaagaaggcaagagagcatataggctgttgcagtaacatcactaacccagaaagcaaagnaagaagataatttttctgtagatnatgttatcaggg

SEQ ID NO: 50556 - DNA, 265 bp, Glycine max
  Clone ID: 701138730H1
cacaaatgcactaaagatattgatgttcatcttctcaaagcatagctctaaaagttatgcactaagaaataatgggcttggcctctggataagtgcttatatgtataataatcggtgtggagtttgacgagaaggatgctatatagatcctcctttgtatggaataaacttggatatgcatgtcggtgatgtcttgtgtgtgttaaattatatatgtggaagtgctcaacgtgatacatatgaatataatgaatgtttatgaacc

SEQ ID NO: 50557 - DNA, 271 bp, Glycine max
  Clone ID: 701138733H1
cgaatggcatctgggacgcagagtagtggaatgttaactagagagcaactttattatcttttcgatcgtttcatttttcttacttcccaacctgatgtgaaaaaaaggattgcagaggctgtgcaggataagcaggaagctgttgctgtgaccactgcaatacaggaagagatatttttggagatgggtgttgacccaagatttggtatctcatgccttggaaaagtcagtactgtctatgagaatgacctggatttggtgattcagtttt

SEQ ID NO: 50558 - DNA, 270 bp, Glycine max
  unsure (1)..(270): unsure at all n locations; Clone ID: 701138734H1
ggactggtgtcttggcatggaattctcgcattttggcttcagggagcagagataggaacatacttcagcatgacatgagggtnccaggtgactttgttagcangcctgttggtcacaagtctgaggtatgtggattgacatgntcctgtgatgacagggaacttgcttctggtggtaatgataatcagctcctggtatggnatccaacactctcagcaaccagttttgagacttaccgagcacactgctgctgtgaaaggccattgcttt

SEQ ID NO: 50559 - DNA, 265 bp, Glycine max
  unsure (1)..(265): unsure at all n locations; Clone ID: 701138735H1
ctcttcccatcaagaggggattgtcgagtcattttgatggaaaatcaaaatcgttctcagntctatctcaaatgagtaatttgagtaatctgaaggagttgcaaaagcaagagagtcctttcaacaagagaagaagggttttgattgcatccaagtggtccagaagatcatcttctattcctggtccaacccacaatccatgcctcnttgcctgtggatgaggatcaggattatgattntgangaggaagaagaaganggngatg

SEQ ID NO: 50560 - DNA, 235 bp, Glycine max
  unsure (1)..(235): unsure at all n locations; Clone ID: 701138736H1
tggatnccaagttagtaccaagttcaagacancgctgatancatcatcaacaccattgagagttagagancttaaagntaaggtggangttcacaaaaagnacctctaattgggccatcttcntgacctctagaactcgagatctgaaagaganaagagaattactcatagnncaaccagggacntcagaatcttctnaaagatcagtcgagtcaaatgtgccaagtatctaaag

SEQ ID NO: 50561 - DNA, 272 bp, Glycine max
  unsure (1)..(272): unsure at all n locations; Clone ID: 701138738H1
aaacgatgaacantgatagganaattggggttgccttngacttttccaaaggaagcaaaatcgctctgaaatgggctattgacaatcttatcancaacggtgacactctctacntcgtccacaccaagccttncggaggnngtggttcaggnnatcttctctgggtccaacactggttcacctcnggattccattggtcnnagnntccgtgcnaaaggaggtgatgcgtcanctatgcngtngatactgangctgangtgttgtacttgcnt

SEQ ID NO: 50562 - DNA, 261 bp, Glycine max
  unsure (1)..(261): unsure at all n locations; Clone ID: 701138740H1
aaaaaatcaggaaaatttgtnttggcttatgttcctttatgccaagaganagactattatcttgcatctgcatgtgaagagatatatgccccacccagtgcttacttttctttgtttggattgactgttcaagcctcattcctcaaaggcgttttaggataacatnggaattgnnccacaagtgggaaaggatttgganaatncaaaagtgcaggagntcacnagctcgaaggaaccagtctgncgaaaatngtgagatgc

SEQ ID NO: 50563 - DNA, 271 bp, Glycine max
  unsure (1)..(271): unsure at all n locations; Clone ID: 701138741H1
gcagtgagaagccgagcgattttntntaccttccaagagatgaagcatttggtcacttgaagtgcatcagattcnctcgcttatggaatcaaatctgtatcccaagatgtcttgnctgtcttgactgatgcantcgatggaaatattgtgagccttgagtttgataattggctggagtgcacaagtctatgaaggtggagttacantagctacaancttctcttagcaagatcggncctataccagtgatcgaggngatttttncgnatga

SEQ ID NO: 50564 - DNA, 271 bp, Glycine max
  unsure (1)..(271): unsure at all n locations; Clone ID: 701138743H1
ccagtctggaactgggaaaacagcaactttctgctctgganttctgcagcaacttgactatagtgtnactgnatgccaagccttggttttagcaccaactagggagcttgctcagcaaattnaaaaggttatgccnggcacttcggagattancttggtgtgaaggtgcacgcatgtntgggaggtaccagtggtgctggaannancaacgcaattctntcangttgggtncaggttcgtngtggtnncccccggnccgtgnaattngana

SEQ ID NO: 50565 - DNA, 272 bp, Glycine max
  unsure (1)..(272): unsure at all n locations; Clone ID: 701138744H1
aggacccatctgctccccatggagttcgtcttttgantgaggactatccttatgcttctgatgggctagagatatgggatgccatcaagtcctgggtgcaagaatatgtctcattctactacaagtcagatgaggaactccaaaaagaccctgaactccaagcttggtggaaagaacttgtagaggtgggtcatggtgatttgccagntgagccatggtggcaaaanntgcaaactcgtgaaganttggttgaagcttccgtatcctcatat

SEQ ID NO: 50566 - DNA, 272 bp, Glycine max
  unsure (1)..(272): unsure at all n locations; Clone ID: 701138745H1
ggagatgggccatgggatccagattctgacatggacattgatgtcgaacgtgagcttgtctcgagcaaagtanagaaagaaatttcttcaacatcagcccaatgatctggaggaccagacaagtggagagcatttgagaggctctgatactgcagttgctgaaacttgcatgaaggctctagatgtttcttgtcagaaagctgatgaagataatgtgaaagtagnacaaaatactgtgaatganttgggccaagagacggacctgaagtcta

SEQ ID NO: 50567 - DNA, 277 bp, Glycine max
  unsure (1)..(277): unsure at all n locations; Clone ID: 701138746H1
ctcttttggnnagaactgatcaagaagtacatggaaaagggaagccattgtcatcattgccatatgaaggatctcaagttgagntattaggtcgttgcccacgaccagttggcttacttaanggnaatgggagatatggaagtngntccttccagagttgatgatgtgntcnagttncgggagaagcaattgatnaagnctgancattngantgggtgnctgcaaattcggttnaagactcccatacttaanggtcccaagtncaaggggcttgcng

SEQ ID NO: 50568 - DNA, 275 bp, Glycine max
  unsure (1)..(275): unsure at all n locations; Clone ID: 701138748H1
acccaccctccatacacactctctctgagtcggtcgagttgaatcggtgtgagtcagtgaccgagtcgaaccatgtcggacgaagaacaccatttcgaatccaaggccgatgctggagcctccangacctatcctcaacaagccggaaccatccgcaaaaacggttacatcgtcatcaagggtcgtccctgcaaggttgttgaagtttcnacttccaagactggtaagcacggtcatgccaagtgtcactttgttgggattgatattttcactgc

SEQ ID NO: 50569 - DNA, 272 bp, Glycine max
  unsure (1)..(272): unsure at all n locations; Clone ID: 701138749H1
ttgacttctctccgaatgggatatcgacaatagttcaggtgaacgaccttaagaactcttcccggactgggcaagagggaactgaggcaggccaccaatcaggcccttcaactggcttcaggacaactaccctgagttcgttgccaagcagatattcatcaatgtcccctggtggtancttgccttttctaggatgatcagtcccttcttcacacagaggaccaagagtaaatttgtttttgctggcccttccaaatctggctgataccctt

SEQ ID NO: 50570 - DNA, 267 bp, Glycine max
  unsure (1)..(267): unsure at all n locations; Clone ID: 701138750H1
tttcacccaagctactccactctcttggttatcggaggataccaggtatatttgtgtactatgctgtatgtttttccttttcgctctttttatngttcttatttgctnnnnnnnnnnnnnnnnnnnnnnntctntacaacaatctttgtgtgtttactatagtagggcancagtgtaantataatagtnccncttgtacttnttttattattataatacatgttactttgctgataaaaaaaaatgtnggatacaggggtaattttt

SEQ ID NO: 50571 - DNA, 265 bp, Glycine max
  Clone ID: 701138753H1
ggttcaaacactctcatggcatcagacaagaagattaggatcggcatcaacggatttggaaggattggccgtttggtggccagggttgctcttcagaggaatgacgttgaacttgttgctgtcaacgatccttcatcaccactgattacatgacatacatgttcaagtacgacaccgttcatggggcagtggaagcatttgatgtgaagctgaaggactctaagacccctctcttcggtgagaagcccgtcaccgtttttggatc

SEQ ID NO: 50572 - DNA, 272 bp, Glycine max
  unsure (1)..(272): unsure at all n locations; Clone ID: 701138754H1
tttttanttcttctctcagcattctccatctcttccaaaaatgaagttccaagattatgagcctccctctagcncaaaacacatgatcccaaaagtgaccttactagcaatcttggtcattctaatatttgccatcaccnctttgtggtancctttgttgagctactctacttcacacttgaangattcantnngnntaatattccatcatcttnatcacatggntcaggggcangaaganaacttggccncaacatatgtgggagnagtgt

SEQ ID NO: 50573 - DNA, 253 bp, Glycine max
  unsure (1)..(253): unsure at all n locations; Clone ID: 701138757H1
ctgtggctcgnccttgtattccttcntgtcatactatttcancaaggattggtaacntgtaacaagaatgaagacggatcagaagaatggggatatgtgcaanttagaccanaaggcccacttgttctggtgggctttacagaagtccatanagagtngngaatccctccaagccttggcccatcattctctggcttcaggggaggaccaggcttcttcaggagttgggtttggnaattttggagaggttggt

SEQ ID NO: 50574 - DNA, 276 bp, Glycine max
  unsure (1)..(276): unsure at all n locations; Clone ID: 701138760H1
gggagacaagacagagcagtacaggttactaccanngcgctaccaaggtttatattgtttattattctacatntggacatgttgagannnanagctagagagatagaanaaggggctgcttcggtggatggagtagaagcaaaactgtggcaggtacctgaaaccttgcctgaagaggtccttgcaaagttgggagcacctccaaagagtgatgctccanttattantcccaatgagcttcctgagggtggtggttttttgnttggttttcccacg

SEQ ID NO: 50575 - DNA, 265 bp, Glycine max
  unsure (1)..(265): unsure at all n locations; Clone ID: 701138761H1
tttctgatcgctcatagagagttcgacgcggcggttgcagaagaagattgcacanatgaagttcaacatcgcgagtcccaccactggatgccagaagaagctcgagatcgacgacgatcaganactnacgagcattttgggacaagaggatctcacaggaggtcagcggagatgcacttggtgaggantttnaggggtangtcttcaaaattactggaggtgtgacaaacaaggattcccgtnaaacngggagtgctacncctgg

SEQ ID NO: 50576 - DNA, 134 bp, Glycine max
  unsure (1)..(134): unsure at all n locations; Clone ID: 701138762H1
attcattcnttgtgcttgtgcttggctatggtgatcacattgatganccctacnaatgcaancctntctccccatttctatgataaagtttgccctcaggcattgccagttatanagtcagtggttcaacgagc

SEQ ID NO: 50577 - DNA, 266 bp, Glycine max
  unsure (1)..(266): unsure at all n locations; Clone ID: 701138763H1
agnagatanattccctgggcgaagtgatgaagcgccagacncanttnctgggggtnttgtcgantgantcagcagaaggaacatcccnanttcagaagaaaggctgaagatcttttgtagagcacattttgtccttactgaagccntangtggcttccaatttgtgctgactcacttggntggccgtcagcttctattagatcgaatcctggggnagttgtcangcctgattcatacaaggctatnntgatgngggatgnccatgt

SEQ ID NO: 50578 - DNA, 197 bp, Glycine max
  unsure (1)..(197): unsure at all n locations; Clone ID: 701138765H1
gatttctccctcttcgctctctctcagtgaccagagacagatgatgatggagatggcgaangaaacgctgtcgttgcggcactcgcggcgttggtgtactcgcgcgatgtggggtgatgcnagagatngactagngtgtgatcanangagattggnaagtggattagntgcatatttactacatacgttcactcang

SEQ ID NO: 50579 - DNA, 260 bp, Glycine max
  unsure (1)..(260): unsure at all n locations; Clone ID: 701138766H1
gttgtaactcgttcttcttcttttgtngttctgtgtttgtgtttgttttttctctcacctgaaaatgtcttgctgcggtggtaactgtggttgcggaactcctgcaagtgcggcaacngctgcggaggctgcaagatgtacccagncttgagctacactgagtcaacaccaccgagaccttggtcatgggagtggcacctgttaaggctcaatttgagggtgctgaaatgggtgtgcccgtgagancgatggctgcaatt

SEQ ID NO: 50580 - DNA, 267 bp, Glycine max
  unsure (1)..(267): unsure at all n locations; Clone ID: 701138771H1
gctccaggnncatgccatatgagggcatgcacgtacggcctcgnaggggaaccagaaaattatgttaacaanataatctggaaccctaatgtatcagtgtcntcatcagtgtgtagttnaagctagctttgctatggttacgtnctttgagatgagagtcttgatgaacagnncnattctnatgtattgctttcctnganagtnantgcatgcttctnancttctgtctaannnnntcgnaggnttncngcggccagntcgncgngt

SEQ ID NO: 50581 - DNA, 267 bp, Glycine max
  unsure (1)..(267): unsure at all n locations; Clone ID: 701138772H1
gcgcggcataacctaaacctatctttcttctctctctgtgtgtgcgcttcaacggcaaccagaagcagccatggccactgcaaggactgtgaaggatgtttcacctcatgagttcgttaaggcgtactcctctcacctcaagcgatccggcaagatggagctgccagagtggactgatattgtgaaaactgcaagatttaaggagttgggctccttntgatcctgactggtactatgtcagagtgcttnccatggcaagaaagatct

SEQ ID NO: 50582 - DNA, 268 bp, Glycine max
  unsure (1)..(268): unsure at all n locations; Clone ID: 701138775H1
gatctgagtggtgactctttcacttctcatcactattattattaggtctgaaggctcattgccattatcatgtcaaggaggccagtaaatccttcgcgtcggctaggtgatggtggaagtataccatttgttgcatctatccagtccaaatctcaaaactctcccctactatctattgggcttgtcatgtgggtgcaatcctcctgattggttatngttacagcaattcaggtggagtagcggtggtattaaggatgtaaaacttgga

SEQ ID NO: 50583 - DNA, 270 bp, Glycine max
  unsure (1)..(270): unsure at all n locations; Clone ID: 701138776H1
tttgcataatattggcactaagtctttttngncacgaaattgtgaagatgtactgttatcattgtatcaactatattgtcgcccttctttttttatttgatttggcaaacacggctacttttctccaaataagatggntcatttgtattgccggctttgtgcacanttatctncttgtaagaagtccantttcgggcaacancgttgtaatgcagnaataggtcatagcattgtaaatctccaggcgataaatggaatatcnaatggaag

SEQ ID NO: 50584 - DNA, 207 bp, Glycine max
  unsure (1)..(207): unsure at all n locations; Clone ID: 701138777H1
actttacttganaacaatattgtaaaactcanaatctagtttcatacttnntttcttcttnttgaaatggctcnccaggntgctcgttgtnccgcttcnnnctcggttcttaaaganggaaanagngtgngctctcngggntccacttgtcggcttcattncagaccttaagtantcagtntcagatgagtnagangntcgncaaag

SEQ ID NO: 50585 - DNA, 269 bp, Glycine max
  unsure (1)..(269): unsure at all n locations; Clone ID: 701138778H1
gaaacaatgcctatctcaaccttatccccctccttgtcggcaatgtgggattgattttcaccaagggtgacctgaaggaggtcagtgaggaggttgctaagtacaaggttggagctcctgctcgtgttggtttggttgctccaattgatgtcgttgttcctcctggcaacacagggctcgatccctctcagacctctttcttccaggtggttaacattcctaccaagataacaagggtactgtgganatcatacacctgtggaactcat

SEQ ID NO: 50586 - DNA, 272 bp, Glycine max
  unsure (1)..(272): unsure at all n locations; Clone ID: 701138779H1
tttctctcttctctgcttcttcttgttcaaatcttaggagctgaggagaatcaatcgagagaaatatgtctngtatcgctcgtggacgccttgctgaggaaacaaagtcatggcgcaaaaaccatccacacggtttcgttgcnaagcccgagactctacctgatggcaccgtaaatttgatggtctggcattgcactattcctggcaagaccgggactgattgggagnctggntatttcccactgacaatgcacttcnatgaagattacctt

SEQ ID NO: 50587 - DNA, 263 bp, Glycine max
  unsure (1)..(263): unsure at all n locations; Clone ID: 701138780H1
cgctgctgctataaaaaagctcgaatactcggataaggagaaacatcttttaanggcgtcccaaatccgtgagtngtctggaatcaatacattcgcacctgctacccagactaagttgcttgaactcttgggaaatcttaaacaagagaatgtgaactccttgactatacttgtgatgggaaaaggaggtgttggaaaatcttcaactgtgaactccatcattggggaaagagtggtttcgattagtcctttccagtcggaag

SEQ ID NO: 50588 - DNA, 86 bp, Glycine max
  unsure (1)..(86): unsure at all n locations; Clone ID: 701138782H1
gggagggcctagtactccaccacccacatggagacttgagcaaaatggtggtgntaaggttcaagagtttcttaacttttccacac

SEQ ID NO: 50589 - DNA, 348 bp, Glycine max
  unsure (1)..(348): unsure at all n locations; Clone ID: 701138783H1
ctgcctcctttttatcnaatctatctcttcttcaagaatagttgaanatggggctgtctttcaccaagttgttcagcccgactgtntgccaagaaanagatgcgtatactgatgggtgggtctcgatcgctgncgggtanagaaccacccatttcctgtancaaagcntncaaggcttnggaaggagatttgntcnaacccancccatttnccccaagnccatttnggggttttnaaatcgttgggganaaacctngttgggaaattagtcaanggcanncaattccangncttttccagctgggtcttggggggaantggttcgggaaggggttccaagcggaacca

SEQ ID NO: 50590 - DNA, 269 bp, Glycine max
  unsure (1)..(269): unsure at all n locations; Clone ID: 701138784H1
tggcaaaggacatggttgangttcttntgcaacttgccgaggatcctactgcttgaggtcaagctcgagaggcatggagttaaggcttttacacaggacctaatagcaggtgggactgagagtttcagctgtancantggnatgggcaatctcatagctattganaaggccagagattttcaagnanggcaacagaggatctagacanggtgataggtagacananatnggttnaagacgacngaccattgnganttttccnttatgtt

SEQ ID NO: 50591 - DNA, 254 bp, Glycine max
  unsure (1)..(254): unsure at all n locations; Clone ID: 701138785H1
cttgagactaataatggatggtatagttcaantgcagaggcaacttgntgattatacngcttncctatttcatgagggttttctagatgaccantttaaccagcttcagcaacttcaagatgaaagcaacccagattttgtggttgaagtggtgactctcttgtttgaagatgcggagaggcttcttaatgagctcacnaaaacactgtaaggtaccnaattncctgcttnantatacacatctttaggncnaa

SEQ ID NO: 50592 - DNA, 265 bp, Glycine max
  unsure (1)..(265): unsure at all n locations; Clone ID: 701138786H1
ccagatctcactttgttccgttcagtgcagagaagaaaatggcggtgatggccgttcaccaattcgcgcaatgcatcacttgccacgcttggagcnccgatcaatccatggtggctttatgtccaaacaataatgangtgcacatctataggttggttgaagacaaatgggaaaaggtgcatgttctttcanaagcatgaccaggtatttctgggatagactggagcacnagatcaaatagnatagttactgnctcccatgatcg

SEQ ID NO: 50593 - DNA, 139 bp, Glycine max
  unsure (1)..(139): unsure at all n locations; Clone ID: 701138787H1
gaagtcccttcccttctccttcttctccaaaggcaaaggtctttgagatggaagtcttaaacccaattgaaggcaagacctacaagctcccagttggataacagatttgatccaagtgntganattcttgctggttact

SEQ ID NO: 50594 - DNA, 75 bp, Glycine max
  unsure (1)..(75): unsure at all n locations; Clone ID: 701138788H1
ggcttcctcagttacttcctnttttcgcatcanncnatttgaagtcggtttnantnggtgagactantanactca

SEQ ID NO: 50595 - DNA, 230 bp, Glycine max
  unsure (1)..(230): unsure at all n locations; Clone ID: 701138789H1
ctcagtcatctcttttaccattctcttctctcttgctcttgcaggagagagccatgtccatgcatcgctacctgaggaagattattgggaagtgtttggccaaacactcccattcccactgcactgcgagagttctaaagccttcccgcagtgttgaaatcgagaatcctaagcaatgagataccataccaaaaatctctaaagagactatcagaacatgaatnatacag

SEQ ID NO: 50596 - DNA, 277 bp, Glycine max
  unsure (1)..(277): unsure at all n locations; Clone ID: 701138790H1
ggggtaaacttnctctntctcncttgcttatncctcccaaaaggaaaagacggtttccgttggaaggnanaannagaganattgantnnnatatntgattgtgcgtcgacgatggagaacnncgacagcatcatatccgcgggatcagatcgnacangcancggtgtgggttnggctncgccgtcttnttccggttcatttgctcattgggaacgcttttnctgcgtcaacgtcggcagcttctgnncccgacancgncgatggacgacgangattt

SEQ ID NO: 50597 - DNA, 269 bp, Glycine max
  unsure (1)..(269): unsure at all n locations; Clone ID: 701138791H1
accacaccacccatcaacgacatgcttcctctttcccttctcaagactgcccaaggccaccctatgttggtggaactgaaaaatggggagacatataacgggcatttggttaattgcgacacatggatgaacatccatctgcgagaagtcatttgtacatctaaagacggagatagattttggaggatggctgaatgctacncacgaggcaatacaatcaagtaccttcgagtacctgatgaggttatgataaagttcaagaagaaacc

SEQ ID NO: 50598 - DNA, 99 bp, Glycine max
  unsure (1)..(99): unsure at all n locations; Clone ID: 701138792H1
gnagaatccccgccccctcgacgaggatgacatcgcccttctcaaaacctatggtttggggccttattccacacnacntacgatcngncngnatnanat

SEQ ID NO: 50599 - DNA, 260 bp, Glycine max
  unsure (1)..(260): unsure at all n locations; Clone ID: 701138793H1
gccagatctcatcgcgccaggtgtnaanatcctagcggggtggtctaaagcngtggggcccaccgggttgcccgttgataacaggcgcgtggatttcaacatcatctctggcacctccatgtcgtgccctcacgtgagcngcttagngcgctgatcatatcggtcacctgantngagtcnagcngcngtgagatcgctctgatgacaacggttacacatttacaaaactgtgagaattgcagacagcgcaacggaaacca

SEQ ID NO: 50600 - DNA, 274 bp, Glycine max
  unsure (1)..(274): unsure at all n locations; Clone ID: 701138794H1
ggcanccaccattactcagcactgccattcttcaatcacactaatggctgtcaccttctcagatcttcacaccgaagagggcatcaaatccctcgatcaattcctttctgggaaaacctatatctctggggatcaattgacaaaggntgatatcaaagtgtatgcagntgttgtggaanagccaggagacnctttcctaatgctggcnaagtggtacgatgccgtctcttctcaacttgctncaagcttccctgggcacgctcaaggggtaaga

SEQ ID NO: 50601 - DNA, 285 bp, Glycine max
  unsure (1)..(285): unsure at all n locations; Clone ID: 701138802H1
annnanngggngttggnacatggttaaaggaaattaaagacactactaaagaaggatatagttttgaagagctatgcatcaagaaagaagccattgagggagaagagaagttttgtgcaaaatccttgggaacagtaattggttttgccatttcaaagctgggaaagaacattcaagtactttcaagttccttgtcaataagcaagaccaatacactgtggaaggagtgcagatcttggagacaaagcagtgatgtgtcataggctaaatttcagactgcagtat

SEQ ID NO: 50602 - DNA, 295 bp, Glycine max
  unsure (1)..(295): unsure at all n locations; Clone ID: 701138805H1
ctctcacgcagtcgcagtgagtgaaaaggaaaaccctaattgcggtattctcagtgccttgcgagagaaaganaaaatggcngataatcttgttctccgtggcaccatgcgngccnanaccgacgttgtgacggcgattgccactcccatcgacaactccgacatgatcgtcaccgcctcacgcgacaaatccatcatcctctggcatcttaccaaggaggacaagacttacggtgtcccccgccgccgcctcaccggccattctcattttgtccaggacgtcgtcctctcttct

SEQ ID NO: 50603 - DNA, 294 bp, Glycine max
  Clone ID: 701138806H1
gccgacgtccacctcggcaccaaaaactgcgacttccaaatggaacgttacatcttcaagcgccgcaacgacgggatttacattattaaccttgggaagacatgggagaagcttcagttagcagctagggttattgttgcaattgagaaccctcaggatatcattgttcaatccgcaaggccttatggtcaaagagcggttctgaagtttgctcagtacactggtgctcatgctattgctggaaggcacactcccggtaccttcaccaatcagcttcagacttcgttcagtgag

SEQ ID NO: 50604 - DNA, 299 bp, Glycine max
  unsure (1)..(299): unsure at all n locations; Clone ID: 701138809H1
gggggaaggngcaggatgtgtcgttgggntcgaacaagttccccgacagacagccgattgggacggcggcgcagagcnaagancgacggcaaggactaccaggagccggcggccggcgccgctggttgacccgacggagtttacgtcatggtccgttttacagancagggataggcagagtttgtggccacttttnctgnttctctacatcancgtcttaaccgttatgggagtcgccggggctaagtctanatgtagtacccgttgggattcaaggaatcgcntgngcctcggtngca

SEQ ID NO: 50605 - DNA, 291 bp, Glycine max
  unsure (1)..(291): unsure at all n locations; Clone ID: 701138810H1
ctcatatatcatggctacctccatggtgaagcttatgcttttctctgntctcatactcttgtccttgcaagcagttgtgtctgtaacaccactgcattttcaacatccactagacccnttaaccaaacaagagataagtcttgtccaaaccatagtccaaaacaagtacccaagctcaagtaacaggttgagcttccactacattggactcgccgaacctganaaggatgccatcctcaaatgggaatccatcaaaccaatgttatanctgtccctcgcaaagccttgggc

SEQ ID NO: 50606 - DNA, 288 bp, Glycine max
  Clone ID: 701138811H1
gaaacattattcccattgctatatattatggctagcatgaaggttacatgggtggttgtgatcatgtgcatggccgtggtgggtgcaccgatgatggcgcaagcatgacatgcaatgatgtgacggtgaacatggcacagtgcctatcctacctgatgcagggaggaacaccttcaacactttgctgcagcggagtcaagaacattcttggctctgctgtcaccaccgttgacaaacaaactgtgtgcaatgtctcaaggcggatgctgctaggtacaacatcaatga

SEQ ID NO: 50607 - DNA, 291 bp, Glycine max
  Clone ID: 701138812H1
ctcccagcaaccactctccccaagaagatgctgaagctctcagaaaggcttttgaaggatggggaactgatgagaacactgtcatagtaattttgggtcatagaactgtgtatcagaggcagcaaatcagaagagtttatgaggaaatttaccaggaggatcttgtgaagcgcctagagtctgagatcaaaggagactttgagaaagccgtgtaccgatggatactggaacctgcagatcgtgatgctgttttggccaatgttgccatcaagagtggcaaaaactacaatg

SEQ ID NO: 50608 - DNA, 276 bp, Glycine max
  unsure (1)..(276): unsure at all n locations; Clone ID: 701138813H1
gnntccacatcaccctaancancanacggctaggtgtacgctnggacttcaatnggcagtgactgaagctcagaatcctcttcttgganaaaacacatgtggttccttgttaaaaaagcttcagganatatgggatgaggttggtgagagcgacgagcaacgagacaagatgcttcttcagttagagcaggagtgcntggatgtgtacaanaganaggttgagcaggctgccaagtcaagggcgcagtacttcaagctctgtctgatgctaagctt

SEQ ID NO: 50609 - DNA, 292 bp, Glycine max
  unsure (1)..(292): unsure at all n locations; Clone ID: 701138814H1
attcccaccacatgcgcagacacgtgatctaggatctctctctatctgggatctgcttccttctcttctctttctcaattctcattcataattctaattcattcctccgatctgcgactttctatttctccctcaacacaacacgagacancatgttcctctttgactggttctatggcattctcgcttccctcggtctctggcagaaagaagccaaaattctcttccttggtctcgataatgccggcaaaaccaccctccttcacatgctcaaagacgagagattagttca

SEQ ID NO: 50610 - DNA, 285 bp, Glycine max
  Clone ID: 701138815H1
gatcgcagcaaaccagagattgaactccgacgatgcctcccgtcgctcctcgatccggcgatgccatattcgccaacgtcgaacgcgtcaatgcggagtgtttactttgacgtatggcgcaattgtgcgtcaattgctcacggatctggaagaggttgaggaggttaacgagcagcttgatcaaatgggttacaatattggaatccgattgattgatgagtttttagctaagtctaatgtctcaagatgcaacgatttcagagagactactgatgtaattgcaaa

SEQ ID NO: 50611 - DNA, 161 bp, Glycine max
  unsure (1)..(161): unsure at all n locations; Clone ID: 701138816H1
ccctcttaataccaattttctagggtttatacaattctcgatggcttcttcagatgttgagtaccgttgctttgtcggtgggctcgcttgggccactgacgaccaagctctcgagagagccttctctcagtacggcgaaatcgttgaaacnaagattatca

SEQ ID NO: 50612 - DNA, 302 bp, Glycine max
  unsure (1)..(302): unsure at all n locations; Clone ID: 701138817H1
ccggcgagtaaganaaatgcagcatttcgtggatttgcaagagaattcggagttgggtgagtcgaattcatggctttcagcgaaagagcagtccggtgcggcacccaacaccaatttggatcgcgtcctcttcaacgacctcgtcgagattgtccctctcgttcagtcactcatcgatcgtaaagcaagccgttcattcacgcggcgtggttccatgatctacaccaagacacccacaagagaatcattgtccaaaagaacaacagattcaaaaagtaggaatgttgcccaatctattcttg

SEQ ID NO: 50613 - DNA, 293 bp, Glycine max
  Clone ID: 701138819H1
cttcgtcaaaaccaaccaaacccctccccaattctcaagccaaccatgtcttccttcaagagcaagtaccaagatgaactcattgccaatgctgcttacattggcaccccagggaagggtatccttgctgctgatgagtcaactggtacaattggcaagcgattggccagcattaatgtcgagaatgttgaagcaaataggcgtgctcttcgtgaactcctattcaccacacctggtgcttttgagtgcctcagtggtgtgatcttgtttgaggaaaccctataccaaaagac

SEQ ID NO: 50614 - DNA, 288 bp, Glycine max
  unsure (1)..(288): unsure at all n locations; Clone ID: 701138820H1
ctgagttaaggcttggactgcctggaaacggaggcactgaagaagtgctcatcaggaagaggggtttctctgagactgaaactggtcatgaagatgagtctgccaccactgtggatttgatgcttaatctttcttctaaggagnnnnnnnnnnnnnnnnnnnnnnnnnnnnnnnnnnnngataagcacaagactttgcctaaggagaagacccttctgccagcagatcctgctaagcctccagccaagacgcagtggtgggttggccacctgtgcggtcctccggaag

SEQ ID NO: 50615 - DNA, 296 bp, Glycine max
  unsure (1)..(296): unsure at all n locations; Clone ID: 701138821H1
gggtaagggaacggggagtttcggtaagaggaggaacaagacccacaccctgctgtgtgaggtgtggccgccgcagcttccacctccagaagagntcgttggctcnggcgcgcgcctaacccgctgngaccaccaggaaatataactggagcgtgaaggccattaggagaaagaccaccggaactggaaggatgaggtacttgcgtaacgtgcctcgcagattcaagagcggcttcagagagggtaccgaagctgcacccaggaagagaggagctgctgcctctgcctaagctttg

SEQ ID NO: 50616 - DNA, 290 bp, Glycine max
  unsure (1)..(290): unsure at all n locations; Clone ID: 701138822H1
ggaaggagaagagggttcccagcagccacagttggtgctcggggacaagctattccttcttcgacaacccgatgttcaagacattgacaaggntcgctacaaggaggatgttttcactcacatcaaccaaaacgatatggtccccttgtatgaaaccctagtggccgattccgtgttggacttggatcgtgccctcttggactctatgcgcgctaaaattcacgatgagctcgccaacctcgacgaaaagattgctgatgctgaggaaaacttaggagagagtgaagttc

SEQ ID NO: 50617 - DNA, 289 bp, Glycine max
  unsure (1)..(289): unsure at all n locations; Clone ID: 701138823H1
cttaaacaagagaatgtgaactccttaactatacttgtgatggganaaggtggtgttggaaaatcttcaactgtgaactccatcattggggatagagtggtttcgattaatcctttccagtcggaagggccaagacccgtgattgtgtcgcgatcaagggctggttttacattgaacatcattgacactcctggtctcattgaagggggatacatcaatgatatggcacttgatataataaaacgtttccttctgaacaagaccatagatgtactgctttatgtggatc

SEQ ID NO: 50618 - DNA, 287 bp, Glycine max
  unsure (1)..(287): unsure at all n locations; Clone ID: 701138825H1
attttcgatggcttcttcagatgttgagtaccgttgctttgtcggtgggctnncttgggccactgacgaccaagctctcgagagagccttctctcagtacggcgaaatcgttgaaacgaagattatcaacgatcgtgagactggaagatccaggggttttggatttntgaccttcgcctcggagcagtcnatgaaagacgccatcgaagggatgaacggccaaaaccttgacggccgnaacatcactgttaacgaagctcagtcccgtggtggcggtngcggcggac

SEQ ID NO: 50619 - DNA, 286 bp, Glycine max
  Clone ID: 701138826H1
gatttcggccgtttgctccccaaggaaagaagcagagtgtttcttttgaaatcagctagaaaagatgtcaggtgaagaggtagctgttgcagctgaggcacctgctgcttcaattccaggtgagccaatggacatcatgactgctctacagcttgtgctgagaaaatctctggcctatggtggtcttgcacgaggtcttcatgaaggtgctaaggtgatcgagaagcatgctgcacagctctgcgttctagcagaagattgtgaccaacctgattatgtgaaatgg

SEQ ID NO: 50620 - DNA, 288 bp, Glycine max
  Clone ID: 701138827H1
ctcatctcaattttcagatatgtcgacatctgataagccagaagaggtggaaaggggtagcaaggatgaaaagcacaaggaagatgatcaagaggaggggaagggtggattcattgagaaggtgaaggatttcattcatgacattggtgagaagattgaggaagctattgggtttgggaagccgagtgccgatgttactgcgatacacattccatcaattaatcttcacaaagcagatcttgttgttgatgtgctcatcaagaacccgaatccggtgccgatccctct

SEQ ID NO: 50621 - DNA, 288 bp, Glycine max
  unsure (1)..(288): unsure at all n locations; Clone ID: 701138828H1
ctctctgttctcttctacctctcaagtntttgaagtatagagatggcagagacattcctatttacctcagagtcngtgaacgagggacaccctgacaagctctgtgaccaaatctctgatgctgtcctcgacgcttgcctcgaacaggacccagacagcaaggttgcctgcgaaacatgcaccaaaaccaacttggtcatggtcttcggagaaatcacgaccaaggccaatgttgactacgagaagatagtgcgtgacacctgcaggaacatcggctttgtctcaaac

SEQ ID NO: 50622 - DNA, 285 bp, Glycine max
  unsure (1)..(285): unsure at all n locations; Clone ID: 701138829H1
acncctntcttctatttctatgcctaactctnncctttgtnnttgntgtccttgcttcaaataccgtaaaaccttcaagaatccaccacttccaccaggtcctagaggncttcccataatagggaatcttcagcaactagatagtcctctcttcatgagcagctatggcatctctcaaagaaatatggtcctttattttcccntcaattggattaaggccagncatagttgtttctctccaaaattggccaaagaggtaatgaaagacatgacttgagtgngtgg

SEQ ID NO: 50623 - DNA, 289 bp, Glycine max
  unsure (1)..(289): unsure at all n locations; Clone ID: 701138830H1
agaaaaagnagctgcagaagttaaggtaaccgaaactgaggttgatgaagagaaagtggcggtgtctgcttcttctgctgatgaagacggagctaaaacggtggaagctatcgaagaaagcgttgtgtctgtgactgtttccgaggaagcaaaggtggaagctgtttctgcttcacccgaagaagtttccatctggggtgttcctcttcttgctgacgagaggagcgacgtgattctcttaaagtttctgcgtgctcgggacttcaaggtgaaggaggcattcgcgatg

SEQ ID NO: 50624 - DNA, 156 bp, Glycine max
  unsure (1)..(156): unsure at all n locations; Clone ID: 701138831H1
ggcagagcaagacaaggtgatcctacacgggatgtgggccagcccttatgccaagagggtggaattngccctaattttaagggcataccctatgagtatgttgaagaagacttgagaaataagagtgatttgcttctaaagtacaaccctgttcac

SEQ ID NO: 50625 - DNA, 300 bp, Glycine max
  unsure (1)..(300): unsure at all n locations; Clone ID: 701138832H1
ctcactcaggatatcccaaagccnntggaantgggaanacatttggacatgacatattctatccaaatgggattctaccaatgtcactttncgggcgtcgcttngatgtcnacctggatcatcctttctttgagcatcagattcattggttctccatttttaactctttcatgatggtcatcttcctctactggattggtgtcaatgatattgatgcgaactctgagaaatgactatgcaaagtatgctcgggaagatgatgatttggagagagatgttagtgaagaatctggctggaac

SEQ ID NO: 50626 - DNA, 302 bp, Glycine max
  unsure (1)..(302): unsure at all n locations; Clone ID: 701138833H1
gaccattcctgttatcaccgctgctgctaatcctttcaattaaacagaaagcttattaattatcaatcatgcagacttcacttcttcaagttgttggaactccagtcatctcagcaacatatgatcagcttcaaaagtcagttaacagatacttacctggtcctgccactcaatgccaatattcaaccacaacatcaaagnccaatgagactggggacaaacatatctgaaactgttaagagaaagctaagtttaggggctcgcattcttcgagtgggtggagtggaaaaagtgttcaagca

SEQ ID NO: 50627 - DNA, 296 bp, Glycine max
  unsure (1)..(296): unsure at all n locations; Clone ID: 701138834H1
cttttganaaccaatgaagatggttctgtctgggtnctctgtgctgctgcacattgttcctgctctcaagactctgttttgctggcgacccaactgttttcactgaacttcgtgtanccctacaccactgtttcacctctgggtgttcctcaacaggtcatagctatcaacaagaagtttccaggacctgtcatcaatgttacaaccaataaccatgtaattgtgaatgtgtacaatgaattggatgaaggccttctcctttcatggtcgggggttcaaatgcggcgtaactcgtg

SEQ ID NO: 50628 - DNA, 292 bp, Glycine max
  Clone ID: 701138835H1
gcttctcaagccggcgccatgaggaaggtggcttcctacttcgcccaagccctcgcgcgtcgtatctacggaatcttcccggaagaaaccctcgactcctccttctccgacgttctccacatgcacttctacgagtcctgcccttacctcaaattcgcgcacttcaccgcgaatcaggctatcctcgaagcatttgccactgctgggagagtccacgtcatcgatttcggcctcagacaagggatgcagtggcctgcactcatgcaagcccttgcattgcggcccggcgggc

SEQ ID NO: 50629 - DNA, 289 bp, Glycine max
  unsure (1)..(289): unsure at all n locations; Clone ID: 701138836H1
atgcctgantgtaaacttggattaaatgatagagtattattagaggcacaaggtagaacaaccaagggaaaatcaattgacttggaagacatcaaatttcatcagtgtgtgcgtttggcccgatttgagaatgatcgaacgatttcatttatccctcctgatggatcatttgatttaatgacatataggctcagtacacaggttaagcctttagtttgggtggaagcacaagttganaaacattcaaaaagccggatcgagattatggtaaaagctaggagtcaatttt

SEQ ID NO: 50630 - DNA, 287 bp, Glycine max
  unsure (1)..(287): unsure at all n locations; Clone ID: 701138838H1
gcggcttccaccgcggactatgtcnncanatccttggaaaccccgttaacctcagatgcgcaaccaggtctgctccatcaccaactacacctgtcaccttcaagaccgtcgcacttttctccaagaagaagccagctccacctccaaagaaaaagcctgccgctgtatcccccgccaatgaggaactcgccaagtggtatggtcctgacagaaggatcttcttgcctgagggtctcttggaccgatctgagatccccgagtattgaccggagaagtgcctggagatt

SEQ ID NO: 50631 - DNA, 287 bp, Glycine max
  Clone ID: 701138840H1
tctgtacccgcctagccattgatttggaaaagtccaacttcaaggatgagtaagcttcagagtgatgctctaagagaagctatctcaggaatcatggctgattccaaggaaaagaacaggaaatttgtggagaccattgaactccaaattgggttgaaaaattatgatccccagaaggacaagcgtttcagtggctctgttaagttgcctcatattcctcgccccaagatgaagatttgtatgcttggagatgcccagcacgttgaggaggctgagaagataggatt

SEQ ID NO: 50632 - DNA, 278 bp, Glycine max
  unsure (1)..(278): unsure at all n locations; Clone ID: 701138841H1
agaaaatacacattacattactaagtctttgttcatttgagtagtagtgatgnctagcctcaaggttgcatgtgtggttgctgtgatgtgcatggttgtggtggccatgagtgctgcacccatggcacaggccgcaatcacgtgcgggcaggtcgccggcgacatgtctccgtgcttcagttatcttcgaagcggcggaaaaccgtcgcaggcctgctgcaacggagtgaagtccctcagcagcgcggcgaagaccaccgcggaccgccanggggcgt

SEQ ID NO: 50633 - DNA, 287 bp, Glycine max
  Clone ID: 701138842H1
ctctttttcggcctcattccattttcatctatcaatggctccagtagccagcagcatcttcagattcaatcaagccaagagatgtttgcatcgttggtgttgcacgtacaccaatgggtggatttcttggtactctgtcatctctatctgccaccaagctaggctctatagctattgaagctgctcttaaaagggccaatgttgatctatcccttgtggaagaagtattttttgggaatgttcttagtgctaatttggggcaagctcctgcaagacaagctgctctt

SEQ ID NO: 50634 - DNA, 285 bp, Glycine max
  Clone ID: 701138843H1
tgtgaagtcagtccaaacttcagtttcaaagatgcctcgtggaacgcttgaagttgttctgatcagcgccaaaggaatcgatgacaatgattttctctccagcattgatccttatgtgattctcacatacagggcacaggagaaaaagagcactgtgcaagaagatgctggatccaagccacaatggaatgagagctttcttttcactgtctctgacagtgcatctgaacttaatctaaagataatggataaagacaactttagtcaagatgattgtcttggcgt

SEQ ID NO: 50635 - DNA, 278 bp, Glycine max
  unsure (1)..(278): unsure at all n locations; Clone ID: 701138844H1
gaaaacccaaagtgcttctctcctctgtctttttctgctctgcttgctatccttttggctagtngcactgctgcaagtgcaactccaagaagcgcagtgccaagccaccatgtttcaacattcaacagaagcctttttccttccacttttctctttggaattggttcttctgcttaccaggcagaaggagcagcaagtgtagatgggagaggaccaagcatatgggacacctacactagacagcatactgaaaagatttgggatcatagcaccggtga

SEQ ID NO: 50636 - DNA, 152 bp, Glycine max
  unsure (1)..(152): unsure at all n locations; Clone ID: 701138845H1
ctcgancgcagtnagnntggaatgcttcatnaaagcaagcagccccaatatctgggtncaggcctatcngnggacncataagggtcgttgacctngaantcatgangatcgttnagtatcacgacggtggcattataccagnancaactgct

SEQ ID NO: 50637 - DNA, 290 bp, Glycine max
  unsure (1)..(290): unsure at all n locations; Clone ID: 701138847H1
gttggaatcctcttcttcccctctggtgttctcagtacggaggagtgnaccggagctggtggctccggccaagccgactccccgcgaaattaagatcctatctgagatagattctcaggcgggtcttcgtacccaaattccaatcatacagttctatccgtaacgacccatcattggcaggcaaggacccagttcaagccattcgaaacgctcttgcggaagcacttgttttctactacccgtttgcgggtagaattaaggaagaaggttcggatgganaactcgtggtg

SEQ ID NO: 50638 - DNA, 292 bp, Glycine max
  Clone ID: 701138848H1
agtaccaggcggcaaaaccatttccgctgaggactgagacgcggtggtggcggcgcatggtgaagctcaatatacccgaccagcccgagcccaaaaccgtgctagtccagaaaaccatcgaccccaggcccaagccctggcacaatgcccatcatggaaaacacgacaccgtcaaagaaagtgaatccaaggagaaggttgttcacaggaagctttcggagtctgaggagtccggcatgagagtcttaaccattgcaggggaaaacagaggagcgtacacgcaagctagagg

SEQ ID NO: 50639 - DNA, 294 bp, Glycine max
  Clone ID: 701138849H1
ggagtgtggactttaaaagggtactctataagtttgttgcttgtgcatatttgtactttgttcatgtgctgtggtgtgtgttgttgttgagagagtttgagaaagaataatgggaagaacaccatgttgtgacaagaagggtttgaagaaaggaccttggacagctgaagaggatgaaattctttctagttatatcaagaaaaatggtggtcatggaagctggcgttctcttccaaggatggcaggtcttcttcgttgtggcaagagttgcaggcttaggtggacaaactatct

SEQ ID NO: 50640 - DNA, 291 bp, Glycine max
  Clone ID: 701138850H1
gagccactagggtacgtgttcgataatactgtggtttctgttcttccagactaaggtaaacgaaagtgcgcaatgcatgcaagcagcaaaatgggtgaaaaatataaaccttggatcatctttcttcatctactagtaatcacgtgttcctgcaatagaagctgcagagccaggggattgattgaaacagaagacaaattcttcaaagcaacctcaaatgatcatcatgaaacagaacatgcacatgctcactctcacgtggatcacatagatccttctgtgatggtgttt

SEQ ID NO: 50641 - DNA, 152 bp, Glycine max
  unsure (1)..(152): unsure at all n locations; Clone ID: 701138851H1
ggtcccgtggctcgcagtgggtcatgtgaacncttatttggagctgtcaaagattcttggtcaaaagggncactttgtnaccgtataagcagtccaaanaacattgatgntcatgcncaaaatcccggaaaccttacagccatccatcaant

SEQ ID NO: 50642 - DNA, 286 bp, Glycine max
  unsure (1)..(286): unsure at all n locations; Clone ID: 701138854H1
gaaaaaaaccacaaccaccaccatctagggtttttctttttctcatggctagtttgtcaactaggattttcttcatcatgtcccttgtgtgcctggctctcggtccaatggcacaaggggaaatgacatgtggccaggttgtgagcaacctgaccccatgcatctcctatgtggtgtatggtggaaccaatgttcctgaacagtgctgcaatgggataagaaatctctatggcatggctcagaccaaaccagaccgccaagctgnttgcaactgcatcaagaacgg

SEQ ID NO: 50643 - DNA, 288 bp, Glycine max
  unsure (1)..(288): unsure at all n locations; Clone ID: 701138855H1
gttcctcctccancagcacaagcatctatgatgccatttccccatgtacagttcncttcaacctgctacactagtaaagccaatgggtcaagctgcnccttccgaacctagcttgcatagctctcctgctagagaagaaggtgaagtacctgaatcagaattagacccagatacaaggcgtanggcntctcatattgcaacatggacaagacaccagggatcatgcatctgctgagcctccatttcctgttagacatcctgtgcaaacctctgctcctcatgttccat

SEQ ID NO: 50644 - DNA, 284 bp, Glycine max
  Clone ID: 701138856H1
gttccgtgttccaaacagtaaggaactactctcttctcttctatgctctgtaactctctagacgatgagtttgagtatgagcttgtgtggtagttacagtcttcaaattcgaaatcgcagaattgtaagctgcaatcttcaccaggatggcaggcatattgttcccatcaatacgcaccaaaaaacttccaaacctgaaaattgtctcggtccaaatggaagattaatggcaataacattaggacatgcattggagtcatgacagtggcacacttggttgctcc

SEQ ID NO: 50645 - DNA, 282 bp, Glycine max
  Clone ID: 701138857H1
ctctcgccgtgtttttcagcctgaatgggaagtgctggaggaactgactatggtgcatacacttatgagaatcttgagagagagccttactggccatcagagaagcttaagatttccatcactggtgctgggggttttatcgcgtcacacatagctcggcgcctcaagacagaggggcattacattattgcttctgattggaagaaaaatgagcacatgactgaggacatgttctgtgatgaattccatcttgttgatctcagggtcatgaataactgcctc

SEQ ID NO: 50646 - DNA, 281 bp, Glycine max
  unsure (1)..(281): unsure at all n locations; Clone ID: 701138861H1
ggcttctcaagtttgtgaaactttggctttcatcaacggtgatgatgggttgaaaatcaacggtgctcttctaatgtccctgatggaagagccatcaccaagtgatgagagtgatgatgatcgattggatagcttgattaggtcctttgaggctgaaattagtggaagcaagatgggggatcatcatgattcatcatccatagggtcagaaatantgatgagcaataatattatagaagagtgtgcatctcaatcatggaataataacatgggagagattg

SEQ ID NO: 50647 - DNA, 290 bp, Glycine max
  unsure (1)..(290): unsure at all n locations; Clone ID: 701138863H1
ggggtacaaaaaaatagaggagcatgancctccatgctgtttaaactctaatagactcgatcttgtttggtagtgctatttctattgctataaacccaaaccaaanangattccacccttgcatntatgntnctcgtacgtgtntctgccgctgaaaatttctttctctgctttgctcgctctataactttcgactttattttcgatcaacatcatcaaactcctcgcatttgggggtttttttttccctcagctattcaccagaaaaaaagcttccatttttgctcaga

SEQ ID NO: 50648 - DNA, 294 bp, Glycine max
  Clone ID: 701138865H1
ctcccccatgtgaacgttacattacaccttagtttggttttgtagcattattatccccaacccatcaaaagcaacaatcattgaattaattgcaccaaatattgttttgctgtaatcaatactccaatggggaatgccttggggggaaagaaaaccacaaaggtgatgaagattgatggggaaaccttcaagcttaaaaccccaataaaagtttgtgatgtgctaaaagaccaccctggccttgttctgttagaatccgaggctgtgaagcattatggtataagagcaaagcct

SEQ ID NO: 50649 - DNA, 291 bp, Glycine max
  Clone ID: 701138866H1
ggctgacttggatactcaattttgctgtttcttgaagcaagctggctagtgagattccgtcaaagccactcccacttgttcgggaacaagtgacaaacctttgcatcaatgcactattttcataccgtaaattttgtgctactgtatcctcatctggacaacttattcttccggaggcattaaagcttttgcccctgtacacacttgcattaactaagagtacagggttgcgaacagaaggaaagatagatgaacggtcattttggataaactatgtatcctctatctctg

SEQ ID NO: 50650 - DNA, 283 bp, Glycine max
  unsure (1)..(283): unsure at all n locations; Clone ID: 701138868H1
gccaacgccaattccattcagatcacagtcccttcaattcctgctggcagcatactgtgtgcaacaaagccctaaaatggaggggactgtcttcactcctgcactgcaagaaattgagcatgtaaagtctgatcaaggagaaattctgagcaagcctttcttggatgcgtgcaagcacatattgcctgtaatagataagtttggngctgctatgggccctgttaaatctgacataggtggtaacatatcgagattggaaactatgtattcttccaatccatcc

SEQ ID NO: 50651 - DNA, 281 bp, Glycine max
  Clone ID: 701138872H1
gtgggcttcaagagctgcttcctacctcaggatctccgtgtttcacagaagcttctctaacgttttgaatgatctgaagtatgctgattctcatgagtgggtgaaggttgatggaaattctgcaactgttggcataactgatcatgcccaagatcatttgggtgaggttgtgtatgttgaattgcctgaagtgggagccaccgtgacacaaggagaaggttttggtgcagctgaaagtgtgaaggcaactagtgatattaactctcctgtttcaggaaaag

SEQ ID NO: 50652 - DNA, 282 bp, Glycine max
  unsure (1)..(282): unsure at all n locations; Clone ID: 701138873H1
gggaagttctctgtttatgtccatgcatccaagacaaacaccggttcatgtgagccgttattttgttaatcgggatatacgcagtgacccggtgatttgggggaaaatttctatggttgatgcagagagacgactattggcaaatgcccttcaagatactgacaaccagcaatttgttctactgtctgatagctgtgtgcctctgtatgattttgagtatatctacgagtatctgatgtatacnaatatcagctttgtagactgctttaaggatcccggtcc

SEQ ID NO: 50653 - DNA, 282 bp, Glycine max
  unsure (1)..(282): unsure at all n locations; Clone ID: 701138876H1
gtttagtgacaccaaacagacgggaaatgggtcgtggggtcagtgctggtggtggacagagttccttggattatctctttggcagtggggtacctgccagcagtgcaaatggtcgctcgcactcaaaatgcaagtgctccttcaccaccggttgataagcaaagtccagcaccagcaccagcaccnnnnnnnnnnnnnnnnnnnnnnnnnnnnnnnnnnnnnnnaccagcaccagcaccagcaccagctgataagcaaattccagctggaattcctggaagt

SEQ ID NO: 50654 - DNA, 274 bp, Glycine max
  unsure (1)..(274): unsure at all n locations; Clone ID: 701138877H1
tttcacanccttcactttactctctctctctgacagctaanatgcaaggaggnangagancattnttnncacatgggaatgtnattagnaatgctgttctacaagcgcgtgcgcatggtgaaccccctgctacagacaattgcctcttcgcggtttgaatctgttacgcctgctccgcattgaggagcatggttttnagagcaccacaatttcagacatcttgaatgataaaggcnagggtgctgatggctcctggctttggtgcnncacagat

SEQ ID NO: 50655 - DNA, 279 bp, Glycine max
  Clone ID: 701138878H1
tttaccataatgctataattttaagaattttgataattctaattctatgatggtatgatatgattactgtcttgtcgggtccgataggaactttagccaatcagttttttgaatccaggaagctttcacaaccaaccttttccgatctttctctcaaaccggctcgcatttccagaaaaaccctgagcttgaagatggcccaagttgctcaaaacccttctcagcagcagaaagtcataataactaacaagtatggcaataaactagtgggcattttgc

SEQ ID NO: 50656 - DNA, 284 bp, Glycine max
  Clone ID: 701138879H1
ctggaacatcaagctttgatttacaaatacatggtggctggtcttcctgtccctcctgatctagtccttcccattcagaacagcttccactccatttcccaaaccttcttgcaccatccctctaccaccatgagttattgttccttctatgggaagaaggtggacccggagccaggacgatgcaggaggactgatgggaaaaagtggaggtgctccaaggaagcctacccagactccaagtactgtgagcgacacatgcaccgtggccgcaaccgttcaagaaa

SEQ ID NO: 50657 - DNA, 287 bp, Glycine max
  unsure (1)..(287): unsure at all n locations; Clone ID: 701138880H1
tcttctttgttttcaatnaggtttttttgttgctctccttcaaactccatctttccaaatcctctctttgcgattgtgttttgatctgcttcctactgcgatagtttctctactgttacatggccatggcggtttccgcaattggttttgaaggtttcgagaaaaggttggaaatatcctttttccagccgggactttttgctgaccctgaaggaaggggtctaagggctcttacaaaatcccagttgggtgagattctaacaccagctgcttgcaccattgtttct

SEQ ID NO: 50658 - DNA, 287 bp, Glycine max
  unsure (1)..(287): unsure at all n locations; Clone ID: 701138881H1
ggtcccttttcagagnctgtctnaattccccttcccattatctcagttgtctgtgcctgagagcaagaacagccacagaaactgagaagaaaagaaaaaaagaatgctatcttcaaatgttgttccatcatcatcccctgtcactttctccaaacccaatcaccattttttcatcaatgcatctcccaatcccaaaccaaatcttctcaggtttcaggcccaacacagaaccactcctctcaaaagttccaaactttctttatgccaagtctcagatccaacntcaa

SEQ ID NO: 50659 - DNA, 129 bp, Glycine max
  unsure (1)..(129): unsure at all n locations; Clone ID: 701138882H1
gngagcatttcactgagttatataaanngcgtggcttgtggnctgtgtagaactcaaatcgancaaataaatggctactgaacatgnaagacgatttcaaggatgagaagaatccccgccccctcgacg

SEQ ID NO: 50660 - DNA, 283 bp, Glycine max
  Clone ID: 701138885H1
cctatctcctcttcctccttctaattctcttatcttctctcccaaacatttcccaagccacctctcgtgccccaaatcgcatgttagctttggttcaaaaacaaccacttgtccttcaataccacaaaggtccccttcttaagggcaacattacgctccatttgctatggtacggtacattcacccccacgcaacgctctatagtcatcgacttccctcgaatccctaacctccacgtcatcacctgaatccccttcagtttccacgtggtggaaaaccaccg

SEQ ID NO: 50661 - DNA, 280 bp, Glycine max
  Clone ID: 701138886H1
ggcagcgacacgtatcaacttcaataatcgcatcgcagaagcagtttccggtgcatctcatcgtctccgaaaatgaacgacgcagatgtctcgaagcaaatccagcagatggtgcggttcatccgccaggaagctgaggaaaaggccaacgagatctctgtctccgccgaagaggaattcaatatcgagaagctgcagttggtcgaagccgacaagaagaagatcaggcaagaatacgaacgcaaagagcgccaagttgaaattcgcaagaagattgagt

SEQ ID NO: 50662 - DNA, 280 bp, Glycine max
  Clone ID: 701138887H1
ctgttattcgcaccgcaaacaaacagtgagccatggccgtcggaaagaacaagcgcatctccaaagggaaaaagggtggcaagaagaaggcagctgatccctttgccaagaaggattggtatgacattaaggccccttctctttttcaagtgaaaaatgttggcaaaaccctcgtctctcgtacgcagggtaccaagattgcttctgaaggacttaaacatagagtgtttgaggtctccttggctgatcttcaaggggatgaggatcatgcattcaagaa

SEQ ID NO: 50663 - DNA, 282 bp, Glycine max
  Clone ID: 701138888H1
gtctcattggtgcccaaccgtgattgcccatcgaatgctcagttcctagatacatatgttcacgctgctgatggtactccgttactcatcaagaacgcaatctgtgtctttgaacaatatggcagcatcatgtggcgtcacaccgaaacaggcattcccaatgaatcgttcgaagaaacgagaacggaagtcaacttagtggtaagaactgttgttaccgtgggcaactacgataacatcattgattgggagtttaaaacaagtggctcaatcaaaccctcg

SEQ ID NO: 50664 - DNA, 277 bp, Glycine max
  Clone ID: 701138889H1
cattgatttctccctcttcgctctctctcagtgaccagagacagatgatgatggagatggcgaacgaaacgctgtcgttgcggcactcgcggcgttggtgctactcgcggcgagtgtggcggtggatgctcaggagaactcggacgtgaagacgctggtgaagtacaagcacgggaagaagtactgcgacaaaggatgggaatgtaagggctggtcaatttactgttgtaacctcaccattaccgattatttccagacctaccagttcgagaatctg

SEQ ID NO: 50665 - DNA, 277 bp, Glycine max
  Clone ID: 701138890H1
ggcaaacatggcaactcaaatgagcaagaagagaaagtttgtggcggatggagtgttcttcgccgaactgaacgaggttctgacacgtgagttggcggaggacggttactccggcgtggaggttagggttacgccgatgcgcaccgagattatcatcagagccaccagaacccaagccgttctcggtgagaagggaaggagaattagggaacttacctcagtggtgcagaagaggttcaaatttcccgagaacagtgtcgagctttatgctgagaag

SEQ ID NO: 50666 - DNA, 277 bp, Glycine max
  unsure (1)..(277): unsure at all n locations; Clone ID: 701138891H1
agaaaggtgtggtgattgtnaacaatgctcgaggggcaattatggacacccaagcaattgctgatgcttgctctagtggccacgttgcaggcnatggtggtgatgtttggcccatacaaccagctccaaaggaccatccatggcgctacatgccaaaccatgccatgactcctcatatttctggcaccaccattgatgcacagttacgttatgctgctggtgtcaaagacatgcttgataggcacttcaagggtgaagactttccagaacaaaacta

SEQ ID NO: 50667 - DNA, 277 bp, Glycine max
  unsure (1)..(277): unsure at all n locations; Clone ID: 701138892H1
ggcgaagtgtctgaagaaagcagtggttccttccactctgattgaggacccttctcctggaagnttcagtgcacacgtcttgctctccgtgtttgcgaggacccaagttcttgttttgtctacatagcctccggtccccacatttataagctccacattgctctgggagaatcttcagtcagcgaaggaaaagatagcctattgatacctgaacacactgagattattgcctcttcgttactcaaccgatgccctcatcgttcagaaattcagagta

SEQ ID NO: 50668 - DNA, 278 bp, Glycine max
  Clone ID: 701138893H1
ggcctgtgcagttgtccttttcataatctgctgggtgtttttcatcatatctgaggtgtgcttgttggctggatcagtggaaaatgcctatcacaccaagtacaggaccatcttcggagagaatcctccgtcttgcgaaacagttaggaagggagtgtttgctgctggtgctgcttttattttcttcactgccatagtttctgaattctactatatcaactactcaagggccagggaaagcttccaaccttatgctggtggcgagactggtgtaggta

SEQ ID NO: 50669 - DNA, 278 bp, Glycine max
  Clone ID: 701138894H1
gaggtttggagctgttcaaaatgagaggggcaaaaagaaggacctgtctcctcaagatgctgccttgttgatccagatcagctttagagcttacttgatccgtaggtcaaaggctctccgtgcccttagagaactggccattgcaaagtctaaattaaaggaaatcagagcccagttcaataacttttcctaccgacgtcatgtagctcgtgatgcggaggaacgccagcggttttctgagaaaatcatgtcttgctcctcactgttgatgccattga

SEQ ID NO: 50670 - DNA, 184 bp, Glycine max
  Clone ID: 701138895H1
ctctcaacaacttcaccttcttcctcctcgatcatgtctcacttcaagggcaagtaccatgatgagcttatcgccaatgctgcgtacattggcactcctggaaagggtattcttgctgctgatgagtcaacagggacaattggcaagcgtttggccagcatcagtgtagagaacattgaatcca

SEQ ID NO: 50671 - DNA, 289 bp, Glycine max
  Clone ID: 701138896H1
ggatttactgctattatgccttggttggccataaatgataaaaatatcccatcatttataaaagggcagaaaatagaagtatcaaaattggagctctatgaggggagcaccagtcctccagatttccttactgaaagtgagctgatatccctgatggagaagaatggaataggaacagatgcatcgattcctgttcatattaacaacatatgtgagcggaattatgtgcaggtacaagcaggcagaaagcttgtcccaaccacattaggcataacattagtaagaggtt

SEQ ID NO: 50672 - DNA, 279 bp, Glycine max
  unsure (1)..(279): unsure at all n locations; Clone ID: 701138901H1
gttactgtctgttcaagctaccatctctctctctcttncttagtgcctccttgnccagaagttaaaatggcccaagaaactttcctattcacatctgaatcagtgaacgangggcacctgacaagctctgtgaccaganctccgatgctgtgctcgatgcatgcttggagcaggacctgacagcaaggttgcctgtgaaacctgcaccaagaccaacatggtgatggttttcggagagatcanaaccaagggccacngtgannaataaganatgtgcnt

SEQ ID NO: 50673 - DNA, 278 bp, Glycine max
  unsure (1)..(278): unsure at all n locations; Clone ID: 701138902H1
caaattgaccttggacttcgtctttcctctctctccctgtgancctctcgttccgattcgttttcgttggtcttctagaagcttcttccaccangaacngaaaagaaangtttccaaagagctcaacgccaagcacaagaagatactggaagggcttcttaaattaccagagaataggggatgtgctgactgcnaaggctaaaggtccaagatgggctagtgtaaatcttggcatctttatatgcatgcagtgttcaggaatacatcgaagtttgggg

SEQ ID NO: 50674 - DNA, 276 bp, Glycine max
  unsure (1)..(276): unsure at all n locations; Clone ID: 701138904H1
gttccgcccctgcgtaaaatgttttcgcaccctatggaataaagacataaacttggtaatctcaattcatctgcaaatgatgttgggaggtgcaacagcaaggngcgtttncctgattaancttcttcctccgttccgctttcgcttcaaacactcctctgctctttcaaaaaccatttgttttcaggtttattcgacagaggcatctcctggcatagagagagtgacacatgaagtcctgaaagaatttcttgccactgttgaaaatgcaccaac

SEQ ID NO: 50675 - DNA, 272 bp, Glycine max
  Clone ID: 701138905H1
agataatagatagtaacagcatcattcatcactcatcagagatggctaccgttgaaagtagaagcaaatcagtggtattggctctctccaagtacctatcattggatcctagtgttgttccagccgatacttcagacagtgatattaagagtctttacctgaacatcatagcggtatcaggacatggggttaatcactctgatgaggtgttgaagtgggtagcatttgcagaagcctccctgtggcccttgatgcatgctttgagaatctca

SEQ ID NO: 50676 - DNA, 279 bp, Glycine max
  Clone ID: 701138906H1
catgctctctcccctcatctccttcttattctctgcaatatatcatagtgccaaactctcatctttctctactactctctcacacacacaatataagtccaccctaaacaatcaccatggcagttgaagctagttacatgaatctcttgccttctcagttactcactaacagagaactcatcaaatccaatcaacagctacagcatcaattaaactctgattacatgtacaacactactacccagatggattcttcttcagctttgcctcaaccagcaa

SEQ ID NO: 50677 - DNA, 281 bp, Glycine max
  unsure (1)..(281): unsure at all n locations; Clone ID: 701138907H1
gttnngtgcatatagaatttgtgaagtgagagtccaacctttcattttcaattttcaaagatgcctacgtggaacacttgaagttgttctgatcagcgccaaaggaattgatgacaatgattttctctccagcatagatccttatgtgattctcacatacagggcacaggagaaaaagagcactgtgcaagaagatgctggatccaagccacaatncnnntncagagctttcttttcactgtctctgaccttccctnctgaacttaatctgaagataatgg

SEQ ID NO: 50678 - DNA, 274 bp, Glycine max
  unsure (1)..(274): unsure at all n locations; Clone ID: 701138908H1
gccggtgttcagatgaagtcaaagtacaagactcaccaatatgttctaggggttgtgtctcttattctgttgattgcagggttatcgactgcattggtgatgctatttcggggtgagaaagggtatgaccactgccattggtgtcgctacttaacatgtgtccctacttctaaatgggaatgcagcaatgacagttaaataagaaaggggaantgattttcacttgcaatatcttttcttgtgtatagccatagagctcttagaaactggctgt

SEQ ID NO: 50679 - DNA, 278 bp, Glycine max
  Clone ID: 701138909H1
gctttcttgagttgagttaacagcatggagagggaggaagatgttaaggttggagcacagaaattctcagagaggcaagcattggggacaggagctcagggtgacaaggactacaaggaggcaccaccagcacccttgtttgagccaggggagttaaagtcatggtctttttacagagctgggattgcagagtttgtggccacattcttgttcctctacatcactgtcttgactgtcatgggtgtcaacagggcacccaacaagtgctcctctgttgg

SEQ ID NO: 50680 - DNA, 271 bp, Glycine max
  unsure (1)..(271): unsure at all n locations; Clone ID: 701138910H1
cacacacgcaacacgcttcagccactattctttcaaggaaaacacaaaatgaaagacacaatggaaactcctacgacactcaccaccttgctccgccacgtcgccgccaaattcccctcccgccgtgccatctccgtcgctgccaaattcgacctcacccactcccgcctccaccgcctggtcgaatccgccgccgctcagttagtctccgccggcgtcaaacccggcgacgtcgtcgccctncaccttccccaacaccatcgacngtcct

SEQ ID NO: 50681 - DNA, 263 bp, Glycine max
  unsure (1)..(263): unsure at all n locations; Clone ID: 701138911H1
agtaagtgaacatgatgaattgggtgatgctactaactctgcagcaatagtaaatgatggcagactcaaacagtggaacagaggatgacattcattcttcaactgactttgaattctacttgcaaggattagagagggccaagataatagtgaacaaaccattaccacaagtcacaatgtcgtctggaaggctgcctgcggtagttgtcttgtggtcagataagatgctaanatgtatgatacatacctgcttgattcattgc

SEQ ID NO: 50682 - DNA, 265 bp, Glycine max
  unsure (1)..(265): unsure at all n locations; Clone ID: 701138912H1
cactcttggtcttgcgaganaaagccatgccagagacgaagatttttggcatgctgtttggccaaacactcccattccaagttcattgcgagatcttctaaagcctggccctgcaagtgttgaaatcgatgatcaccctatggcaaattgaagaaacacagtacccgaaaaccttcttctataaagaagaccttcatccaggcaaaacaatgaaagtacaattcaggaagcctcccttncaacaaccatggggtgtggtacatgg

SEQ ID NO: 50683 - DNA, 265 bp, Glycine max
  unsure (1)..(265): unsure at all n locations; Clone ID: 701138913H1
gtcnctccttcctctgccttataattcttgtngtcccttttcgctggtagcattgaaagtgcaccagcancacgtgaagccaagccattatgctgcacccttcaataggagtgtttttccttctggttttctatttggaataggctctgcagcttaccagatagaaggagcagcagctatagatggcagaggaccaagtntatgggacacctatactaaacagcaaccagggaagatttgggatcatagtgatggaagtctagca

SEQ ID NO: 50684 - DNA, 263 bp, Glycine max
  unsure (1)..(263): unsure at all n locations; Clone ID: 701138914H1
atgaccaacatcataacatagatcaaaccctcttatcttgaaaacaatggccacctctcagggtgctaacagttacagaaatgccagancctctctcaaacctcacgtcaagtcaaagcctacgcaacaacgccgtaatagcaccggctccgtcaacggcaaggaacacgctgctgttcccggaagagttagagtggctgttagattgcggccacggaatgcagaggaatcagtggcggatgctgactttgctgactgtgttg

SEQ ID NO: 50685 - DNA, 267 bp, Glycine max
  unsure (1)..(267): unsure at all n locations; Clone ID: 701138916H1
attaaattcacctgaaagggcctgccatcttgcaanccaagcctttgaatgcgctgtctacggagatnncanancctgaatgaggattcttanaaggacagtaccttgattatgcaantgttgagggataagcttactttatggacttctgatatccccgaagagggtgaggacctaaaaatggaaagcgcaggcagggttgatcaaggagaagatganttaggccgntaacccatcattcggacaatgtctaagatttgatgcatt

SEQ ID NO: 50686 - DNA, 278 bp, Glycine max
  unsure (1)..(278): unsure at all n locations; Clone ID: 701138917H1
cctctcttgaaaaatctagatctcgttcttccttgatctacgttacgcttttagtgaccggatcnntatggatctgaaccagatctacacgccgatggtggttttggcctggtctttcatagatctgatgcatggaggctcagatctactgtacagagatactgtagataatcgatgagaagaacgcagatccagccgcttccgcttgttcgatcgctacagacgcttgtatcggattattcatgattgattcataagcagcatgtcttcctccggct

SEQ ID NO: 50687 - DNA, 275 bp, Glycine max
  Clone ID: 701138918H1
caacattctcacaagtcacagccaaacaccatttcattaattcttgcagaatattgcttagttttgttctatctgaatttggaaacagcttttgaatggcttttcaagagttgcactgctaatatgcacggtcgggtattttgtgattgcctctgccggcaatttccaccaagattttgatatcacatggggagatggtcgggctaagatactcaacaatggagagcttctcactctgtcacttgacaaagcctctggctcgggtttccaatcca

SEQ ID NO: 50688 - DNA, 217 bp, Glycine max
  unsure (1)..(217): unsure at all n locations; Clone ID: 701138920H1
gctatgcctatgatggctgttccttcatggagatccacgtgctgctgcgcttctnnnnnnnnnnnnnnnnnnnnnnnnaaccatcaacactgaccaacttcgttctcaacttgatnaccttcattcagaggctgacgccaccagagccaagggtaccctacttaacttgcccatctctattattgttcttgttcattcttatttcattctgagttac

SEQ ID NO: 50689 - DNA, 276 bp, Glycine max
  Clone ID: 701138921H1
ggcagccatggctgcgccttcagagctcaatggtcggtctctccctctcctccaactctttcttaggccaacgcctttctcccatcaccctcccctctcttcttccgggtaagtcaacagagaagcaatgtcctattgtaatgaggcttaaacgatgggaacggaaggagtgtaaaccaaacagccttcctatcttgcacaaaatgcatgttaaacttggagatacggtgcaagtcatatctggacgtgaaaggggtaaagttggggagattacta

SEQ ID NO: 50690 - DNA, 276 bp, Glycine max
  Clone ID: 701138922H1
gttcgcgtaccttctcgcatctttctcttcttcctaatcctcttcctttcatcttcagatctggatttttttcatttattttcttacgattttcctataatcaatcgtgattattttttgttgggttaggaaacgcgatctagaacttgccaaacggtgttggaatttgtgatctggtgaatcatgaatgctaggagagatggtcgtaacaacagagttgctctttttgatggtattgaggagggtggcatcagagcatcgtctctttactcctca

SEQ ID NO: 50691 - DNA, 276 bp, Glycine max
  unsure (1)..(276): unsure at all n locations; Clone ID: 701138923H1
cctttcttcaatcgaaaaaaactgtaaccctaacgagattgagagaagatgtcaggctgggacgaaggagccgtctactacagcgaccaagcgctcgccggcgacgacggttccngtgcccgcggtgaagccggcaccgattcgaaccactctctcatccagaaattcaaggaattcatccgaaacttcgagaccaccaacaatgtcttgccttacagggagagtctcctccataaccctaagttcntctcgtcgatctgggagatctcgacacct

SEQ ID NO: 50692 - DNA, 275 bp, Glycine max
  Clone ID: 701138924H1
ggaagagttgtacttcaccccatcaagaatgtcccctcagaatttgagcatgtggaaaagggggatgcattgtatgcaatggaattagctttgtctttggagaagttagtgaatgagaaacttctgaatgtgcacagtgtggcagatcgcaacaatgaccctcaaatggccgacttcattgaaagcgagtttttgtctgaacaggttgaatcaattaagaaaatttcagagtatgtggctcagttgagaagggttggaaagggtccggtgtttgg

SEQ ID NO: 50693 - DNA, 276 bp, Glycine max
  unsure (1)..(276): unsure at all n locations; Clone ID: 701138925H1
gaaactttcgaacccaatgagggagataaaggtgcagaagctcgtcctcaatatctccgttggcgagagtggagatcgtctcaccagagccgctaaggttttggaacagcttagtggccaaacccctgtgttttccaaagcaaggtacacggttcgttcctttgggattagaagaaatnagaagattgcatgctatgtcactgtcagaggtgacaaggcgatgcaacttttggagagtggtttgaaggtgaaggaatatgaacttctcagaaggaa

SEQ ID NO: 50694 - DNA, 257 bp, Glycine max
  unsure (1)..(257): unsure at all n locations; Clone ID: 701138927H1
tgcctatcgggaaagcaaaattacacgcatgctgcaggattccttgagggngactagcaaaattttgttaatttcatgcttgaacccatcattttgccaagacactatttacatggttagcttggcatcacgatcgtgtcattggattcatcgggcatctttagattctaccaagataagtgcaagttcagcaaaacaaatggtgaattctcataagaaccagatacctaaaagtgtttcaggaacagcaaagaaat

SEQ ID NO: 50695 - DNA, 266 bp, Glycine max
  unsure (1)..(266): unsure at all n locations; Clone ID: 701138928H1
agattctcactttccaaggnatctactattnccttcgtaagcnaaacaaaacaaacacaaactanttatttgttcgggatcgttctgaatatcttaagaaaaacaacacatcacgtcngatacgataccgtttcgttgggaaacagcaatgggagatggtaattatgatatgagggagttctgtattcctgattacatattagtgccgggatctgaggtgaaaagtgtttcgcatgtacctgcttgtccagtgattgctttcataa

SEQ ID NO: 50696 - DNA, 266 bp, Glycine max
  unsure (1)..(266): unsure at all n locations; Clone ID: 701138929H1
gnaaatccgaagtaggatctctcttgtttttngctcnaggtttttcgngatgnngtcgaanncgaattttgaaggagnttaaggatttgtcagaaggatcctccaacancttgcagtgccggtcctgttcatnaagatatgtttcattggcaagctacaattatgggtcctccagacagtccctatgctggaggtgttttcctagtgattattcattccctccagattatccctttaagccacccaaggttggcatcaggacgaag

SEQ ID NO: 50697 - DNA, 266 bp, Glycine max
  unsure (1)..(266): unsure at all n locations; Clone ID: 701138930H1
caactacaacagcaatgacttttggnaattcagtgaccagttgaggcttgaatctggtttggccaatctgtctctgaatgattattccatttggagcaacagctacagctccaagaggcctgatcagaggaggaactttgatgtcaagggcagtgatttcaacaactcatcaaagccttttgatgatgatttcaatgatggctggaagatcaccaattccaatggaccccttttctctatgcctcacaacaacaacactcacactc

SEQ ID NO: 50698 - DNA, 268 bp, Glycine max
  unsure (1)..(268): unsure at all n locations; Clone ID: 701138931H1
cccgcagcaacaataaaataaataaattgttacagaacaaggcgaaaganaaacatttgaatatttgtcagaaaacgttaaaaaaagtagtggtagtaataattattagatagattaagttgcatttctgttactcttttttttctttatttcatcaacnnnnnnnnnnnnnnnnnntcgaacgaaggctccttccattattccattcagcgattccatngtggcgagaggcgtgccggcgatggcggtggtggccgttgccgccctt

SEQ ID NO: 50699 - DNA, 278 bp, Glycine max
  unsure (1)..(278): unsure at all n locations; Clone ID: 701138932H1
cttcacttcactaatacatcatggcagacgagacccagaacangtatgagagctctgaggttgaggtccaggatcgtggtgtttttgactttctcggtaagaaaaaggatgaagaagacaagcctcatcctcaggaggnggtcatcgccaccgagtttcaaaaagtcactgtctcagaccaaggngagaanaagcacagcctcttagnnnagcttcancgatctgacagnagctctagctcttacaagtgaggnggaaggagtgntggagananangg

SEQ ID NO: 50700 - DNA, 274 bp, Glycine max
  Clone ID: 701138933H1
acgatcccaccaccgataaactcatcatgtggggcccagccaacaacagcttcatcgtcctacgaccccctcgacttctctcactccctcctccctgctttcttcaagcacaacaacttctccagcttcgttcgacaactcaacacttatggtttcagaaaggtggatccggatcggtgggaattcgcaaatgagtggttcctgcgaggacagaagcacttgttgagaaacatcgcgcggaggaagcacggtggagctgggaggagcatttcaa

SEQ ID NO: 50701 - DNA, 278 bp, Glycine max
  unsure (1)..(278): unsure at all n locations; Clone ID: 701138935H1
gcttctttgtcatanncaatcttcattccttgtgctnggtgcntgctatggtgatcacattgntgngaccctaccaatgcaaacctactctccccatttctatgataaagtttnccctcaggcattgccagttataaagtcagtggttcaacgagcaattatccgtgagcgacgcatcggagcatctcttctgcgcttgcatttccatgattgtttcgtaaatgggtgtgatggatcaatattgctagatgacacccgaaacttcactggcgagaagt

SEQ ID NO: 50702 - DNA, 272 bp, Glycine max
  unsure (1)..(272): unsure at all n locations; Clone ID: 701138937H1
gttttganaacagncaagtttctcgaggaagcgatccaaagcccaatgaatgaatggttatcgttttgaagaagcttttgatggcagtgctctgagactgantcattgaaactagattcaatttattcgctcctttcttcaccaaaattgaattgaatggatgctatcagaaagcaagcctccaagcttcgagaacaggtcgctcgccagcagcaggctgttctgaagcagtttgggggtggcggttatggaggttcagataatgtggttac

SEQ ID NO: 50703 - DNA, 271 bp, Glycine max
  Clone ID: 701138938H1
cccgtttgccttgttgtttgcgaataaatggcaactaagaggagcgcgggaacgttgaaggagggtgatttgaaggggaagagggtattcgtgagggtcgatctgaacgtgcctttggatgacaaccttaacatcaccgatgacactagagtccgtgctgctgttcccaccatcaagtacttgactggttatggtgctaaagtgatcctttctagccattgggacgtccaaaaggtgtaacacctaaatacagtttgaagcctcttgtgcc

SEQ ID NO: 50704 - DNA, 272 bp, Glycine max
  unsure (1)..(272): unsure at all n locations; Clone ID: 701138939H1
ggaagacatatncaagaagtctatgatgaagttctgcatatgagttctgctttacgagcatctggttccgaacctggcactaaaattggaatttatggatctaattgccctgaatggattgtggcaatggaggtttgttctgctcaaagctttatttgtgtgcctctctatgacacccttggacctggtgcngtaaattttatcatagatcatgcagaagtagattttgtgttcgtccaagataagaaggttaaagagcttttaaatcctga

SEQ ID NO: 50705 - DNA, 274 bp, Glycine max
  unsure (1)..(274): unsure at all n locations; Clone ID: 701138940H1
tgagttaaggcttggactgcctggaaacggaggcactgaagaagtgctcatcaggaagaggggtttctctgagactgaaactggtcatgaagatgagtctgccaccactgtggatttgatgcttaatctttcttctaaggagnnnnnnnnnnnnnnnnnnnnnnnnnnnnnnnnnnnngataagcacaagactttgcctaaggagaagacccttctgccagcagatcctgctaagcctccagccaagacgcaggtggtgggttggccacctgtg

SEQ ID NO: 50706 - DNA, 274 bp, Glycine max
  Clone ID: 701138941H1
cgaaatttgtgctccaacacaaaaaaatgaaacctacaatcaccattctcttgttgtctctactacttctcataacttcaccctccttggcaacccgacccgcatccaaccctgatcaagtcaagcacaacaaaaacaacaaccaaggtggtggtgctggtgctggtgctggcgggttctttggccctggaggagggttcagcatacccggttttggaaacgggtttggaaatggcatcataggaggaggatacggatccgggtatggaggtcc

SEQ ID NO: 50707 - DNA, 272 bp, Glycine max
  Clone ID: 701138943H1
atggtttcagcttcgcttcaattctggtcttggatagcacctactcctatatcccaccgttacacccataaatttgcttccctaacctcactcaaattagccactcctgtttcttctactaataccgtttatcttcccaagcctctagttgtgcgttttgctctaactgagtccgactcgcccaaatccatagaacctgaccctcaaactcttctccaagaaattgctgacagttttgatcttccttccgattattttcaaagcttcccggc

SEQ ID NO: 50708 - DNA, 270 bp, Glycine max
  unsure (1)..(270): unsure at all n locations; Clone ID: 701138944H1
cattagtgaaatggtgcaggttgagactgttgcacaatttggtgtagtgtttcttctctttgctttggggctggagttttccctggcaaagttaaaagctgtgngacctgttgctgttcttggagggctacttcaaattatcatttttatgttcatgtgtggcattctttccatgttatttggagccaaattgtctgagggtgtttttgtcggttccttctatcaatgtcatcaacagcagtggtggtgaagtttttagtggagcggaat

SEQ ID NO: 50709 - DNA, 274 bp, Glycine max
  unsure (1)..(274): unsure at all n locations; Clone ID: 701138945H1
gcacctcagcacagtttcccatcgaaaactagcccatctttttccctcgtaccttttgcttcagcaacaacaacatcgtcgtcacnnnnnnnnnnnnnnnnnnnnnnnnnnnnnnnnncggttgaattgaagatgaaaatcactgtcatgactgctgatgaacaaatcatcacgttagatgtggatccccacgaatctgtggaaaacgtcaaagcattgctcgaggttgagacaagtgtgcctcttcaacaacagcagcttctgtttaatggga

SEQ ID NO: 50710 - DNA, 247 bp, Glycine max
  unsure (1)..(247): unsure at all n locations; Clone ID: 701138946H1
tgcaaaatccgttcccctatctttctgcgtntcgagttgttgctaaagagtgatggactcaccgcccagtaatcaccacgccgtcgacggagacgccaacgacctcgttagacccttttcccaccgcgacgacgacggcaaaccccaacccctcaccggcgacggcgccagtcccggaaagatattcatagggggtttagcgagagaaacgacgattgcgcaattcatcaagcactttggtaaatac

SEQ ID NO: 50711 - DNA, 274 bp, Glycine max
  unsure (1)..(274): unsure at all n locations; Clone ID: 701138949H1
catccccaacttcctcanaaggttacaagtcnctaaagagttgtgccaccatgtgcggacgatgaaagggaggagaaagagttggatctctcttctgccgaagttgtcaccaaatacaaaaccgctgctgagatcgttaacaaggccttgaagctagttatttcagaatgtaaaccaaaggcgaagattgtggatatttgtgagaaaggggattcatanattagagagcnaactggaaatgtgtacaagcatgtgnagangaagttganagang

SEQ ID NO: 50712 - DNA, 272 bp, Glycine max
  unsure (1)..(272): unsure at all n locations; Clone ID: 701138950H1
ctttctcagtgtgcccccatttctccaatctcaataatgtttnagggttttccctcctntctcagagcttgcatttcccaggatcaatggcaaagctccattttgcgtncagtttctcacttttgtttctactcagcaatgcctccgctgcaccatccancactttacccgccaagattgtnagtgggtttctctcaaatgccgttcctgcgttcancaaatgggtctggtcactgcaaagcacccaccaaaancgcgattggtgcgaagtc

SEQ ID NO: 50713 - DNA, 270 bp, Glycine max
  Clone ID: 701138951H1
cacgatccttggtaatggcttcttcatcaatgtcatgtccgaagctggggaattgtgcagtgtcacatacaaagttccaagcttttcatctctcttcaatgttctctccactggatcgaggccttttctcaccttggagtggtttaaagcatctgggtatctcagctaaaccaaaacctcttcttcacatagatagaaagggagggtgtaagggtaaagtggtatatgcttctctctttggggttggagctcctgaggctttggtaattg

SEQ ID NO: 50714 - DNA, 274 bp, Glycine max
  unsure (1)..(274): unsure at all n locations; Clone ID: 701138952H1
atggaggaggaagacaaccactcccanctccaaccactcataccctnttattccactactctccttctcctcnccattcactccagcaacactttgccgncaaaaatgcaaaacacttcacctccgacagcaacaacatcgttctccgaatcctctcaattctcttactagctctcatctcactatgggccaactacgaggcatccaaaaccttccacatcaccgtggtaatccgacgccaaggactcccccgcgggacgccgtttcgccctct

SEQ ID NO: 50715 - DNA, 272 bp, Glycine max
  unsure (1)..(272): unsure at all n locations; Clone ID: 701138954H1
gcacttcgttgcttggtgatgtccctttctgttctcttcactcttggtcttgcgagagaaagccatgccagagacgaagatttttggcatgctgtttggccanacactcccattccaagttcattncgagatccttctaaagcctggccctgcaagtgttgaaatcgatgatcaccctatgcaaattgaagaaacacagtacccgaaaaccttcttctataaagaagaccttcatccaggcaaaacaatgaaagtacaattcagcaagcctc

SEQ ID NO: 50716 - DNA, 270 bp, Glycine max
  Clone ID: 701138955H1
cagtgtgatgaaaatgaaggtccttgttttcttcgttgctacaattttggtagcatggcaatgccatgcgtacgatatgttccctctccgaatgaacactggctatggtgcccgtactccggaggtgaaatgcgcaagttggaggcttgctgtggaagcacacaacatctttggctttgagaccattcctgaagagtgcgttgaagcaacaaaggaatacatccatggcgaacaatatagatcagactccaaaacagttaaccaacaagc

SEQ ID NO: 50717 - DNA, 271 bp, Glycine max
  unsure (1)..(271): unsure at all n locations; Clone ID: 701138956H1
gcaaacaccatggtgattaagtctgtgttgttcagcttcattttccccccgccaccttctactggtggtttgggggttgactgtgacaagcttcctgatactggctaatgctttcttgtcagaaattagagggaagcatttgaactattcaaagttttggaatgctaatccctctgcngaaaagcaggtcaagttgtctagcaaagctggcatgcttttgctgtacactcctgcttttcttgctggccttgcatccttctgggtctttcct

SEQ ID NO: 50718 - DNA, 270 bp, Glycine max
  Clone ID: 701138958H1
cttcaccatgtcacttgctgggaaaatcaccactgaaatcggggttcatgcaaccgctacaaagtggttcaacctcttcgcaacacaactccatcatgttcaaaacctaactgatagagtgcatggaaccaagctgcatcaaggtgaagactggctcacaacgagacagtcaagcactggacttataccatagatggtaaggtacaacatgtctggagagtattgatccattgatgaacagagcaaacatcactacaagctcttcagtgg

SEQ ID NO: 50719 - DNA, 271 bp, Glycine max
  unsure (1)..(271): unsure at all n locations; Clone ID: 701138959H1
cgaagtccactatgccgaagcaaattcacgagattaaggncttcctcctcactgctaggaggaaggatgcacgctctgtgaaaatcaagcggagaaggatgtggtgaagttcaaggtccgttgctccaagtacctttacaccctctgtgtgtttgnttctgagaaggctgataagttgaagcaatcacttcctccaggtttaagcgtgcaggatgtgtgattctactgctgtatgaagatcaggtttttctctggattttggggatcatag

SEQ ID NO: 50720 - DNA, 270 bp, Glycine max
  unsure (1)..(270): unsure at all n locations; Clone ID: 701138960H1
gttagtagagtgaggcggaagcagaaaccaaacacaactcaatcacgaaaatgtcgaatttgccccaatcgctgtcgatgggcgccgccttcggcggcggtggcgctccaacgccgtcttccagtggcggcnccggagcacagggctccggcgtggcaaggatcggaagatggcgtccgcggagagctcgtgctcgaatcagcaaccctgaactccgtgaaaacgcgcttctcgaactctccaanaagagggagctatttcaagatcttg

SEQ ID NO: 50721 - DNA, 273 bp, Glycine max
  unsure (1)..(273): unsure at all n locations; Clone ID: 701138962H1
tcaaaccttacctagtatnttcgtttctgaacccaattnattaagcacacaaggaccataacatacctatacctcaatatcacaagtcttatggaggcagagcgagacaagtacaagatgatcaactttgaagaaaccgagttacgactcggnctcccactcagtggaaacgagacgctcaaaaccacttgcagcactgggaagagggttttttcggatactgccgtggatttgaagcttaacctttcctcaacctccaacagtgttcttctg

SEQ ID NO: 50722 - DNA, 276 bp, Glycine max
  unsure (1)..(276): unsure at all n locations; Clone ID: 701138963H1
ggaagaagctactgggttggcttttaggtttatcattggtagaacaagtgacagagcaaagatgtcagcgcttcagaaggaagtagcagaatatgatgatttcattttgttggatatccaagaggagtacagtaagctcccatacaaaacgttagctttcttcaaagctgcttatgcactttttgatgctgaattttatgtcaaagctgatgacgacatatatttanggccagatcgtctatcattactactggccaaagagcgatctcatcctca

SEQ ID NO: 50723 - DNA, 265 bp, Glycine max
  unsure (1)..(265): unsure at all n locations; Clone ID: 701138964H1
gctgcaatggcttcaagtcangaggaggtgacccnnttnggagctactggaagcccanttgtntgcacggtncatattgccctcaagttgaagggagttcaatacaaatatgtcgaagaaaatttgaggaacnagagtgaatgctctcaaatccaacccagttcancagaagatccagtgtttattcacaatnagaagtccatagcagagtctctgaggatgtngatacttgatgagacatggaagancaatcccatctngcctt

SEQ ID NO: 50724 - DNA, 271 bp, Glycine max
  unsure (1)..(271): unsure at all n locations; Clone ID: 701138965H1
agaagcgctataccagcagcagcattttcttttccatttccaacatcaacagcgantcnaaaggatcatcgatcatcatgtcgttttcgtttttcaaggctttgaggcctaaaacgccgcaagaggtggccaagtccatcaaggagagtctcatggccctcgataccaaaaccgttgttgaagttaaagcccttgagaaggctttagaggaagttgaaaagattttgtaacaatgagaaccatgctttctggagacggagagtcagaacca

SEQ ID NO: 50725 - DNA, 267 bp, Glycine max
  unsure (1)..(267): unsure at all n locations; Clone ID: 701138967H1
ctctgccttccatcaccctcgccatttcccttcccaagatagtngaagatggcagacgctgaggatattcaacctcttgtttgtgacaatggaacaggaatggttaaggctggttttgctggagatgatgccccacgtgctgtgtttcccagcattgtaggtcgtcctcgtcacactggtgtgatggttggcatgggccaaaaagatgcatatgttggtgatgaggcacagtctaagaggggtattttgactctcaagtaccccatg

SEQ ID NO: 50726 - DNA, 248 bp, Glycine max
  unsure (1)..(248): unsure at all n locations; Clone ID: 701138968H1
attcaaaaagcttttcgtggatacttggcaagaagagcattncgggcttacagggggttggtcaggttgagatcactgatggaagggccagtggtgaaacgtcaagccattagtaccctccgttctatgcagacttttgctcatttgcaaactcagattcgttctaggaggctcaggatgttagaggagaatcaagcatacaaaaacagctcttacagaagcacgcaaaagagctagagagcatgcgg

SEQ ID NO: 50727 - DNA, 266 bp, Glycine max
  unsure (1)..(266): unsure at all n locations; Clone ID: 701138969H1
tagctcatagtttttnttggaagagttgtgaaaatgggacttgtggagctttttggggtggcatctatgcccgtgatcaaagtactactaatcactgctgttggcttgcttcttgcactggacaacgtaaatttgttgggaaaagatgcaaggatacaagtgaatcatcttgtgcattatgtgttcaatcctgcactggtgggtggcaatttggccgacacgattacttttgagaatgttgttttattgtggttcatgccggtcaa

SEQ ID NO: 50728 - DNA, 260 bp, Glycine max
  Clone ID: 701138970H1
gctcgggactcatctgggcttctctccccattcaacttctccagaagagaaacgggggagacagatttggtattcaaagtgcaatactgtggaatatgccactcagatctacatatgttaaagaacgagtggggcaacacaacctatcctctggttcctgggcacgagattgctggtgtggtaacagaagttggaagcaaggtgcaaaagttcaaagttggagaccgggtaggtgtggggtgcatgattggatcctgtcg

SEQ ID NO: 50729 - DNA, 268 bp, Glycine max
  Clone ID: 701138971H1
ttccacatctcatcagggcagtgcgcagagcaggccaaattgtcacttgggtcagtgatcctatgcatggaaacaccattaaggctccctgtggtcttaaaactcgccccttcgattccatcagggccgaagtgagagcattcttcgacgtacacgagcaagaaggaagccacccaggaggggttcatctagagatgacgggtcagaatgtgaccgagtgcattggtgggtcaaggacggtcacatttgatgacttgagctcagttac

SEQ ID NO: 50730 - DNA, 259 bp, Glycine max
  unsure (1)..(259): unsure at all n locations; Clone ID: 701138972H1
gagggttgagtactccccattgtttgagacaagaaggtgcagaggaaggttcatctacaggtccttaggaggcatttggtgatataagtttgtttggatatatatgattttattattcttttctatcatttcatcacttggcacttcttttttctagtattttagatgctaatataactagttatgtctttatttatgtagtgaatcttttttctgttttgcaaacnagatttgtgtcgtcaaccagtttgatatcagg

SEQ ID NO: 50731 - DNA, 267 bp, Glycine max
  unsure (1)..(267): unsure at all n locations; Clone ID: 701138973H1
gttacattacaccttagtttggttttgtagcattattatccccaacccatcaaaagcaacaatcattgaattaattgcaccaaatattgttttgctgtaatcaatactccaatggggaatgccttggggggaaagaaaaccacaaaggtgatgaagattgatggggaaaccttcaagcttaaaaccccaataaaagtttgtgatgtgctaaaagaccaccctggccttgttctgttagaatccgaggctgtgaagcntatggtataa

SEQ ID NO: 50732 - DNA, 275 bp, Glycine max
  unsure (1)..(275): unsure at all n locations; Clone ID: 701138975H1
cagcaaacaccaacaacagtncccaganaatgaaacaanccnaggtaagcaagacccaggaaacaaccccagtcactgaggctcctgcaacagaacaaccagcagctgaggttcctgcaacagaacaaccagccgctgaggctcctgccccagaatcaaccaccgaagcaccaaaggaagaaaccaccgaggcaccaacagaaacagtagaaaaaacaactacagaagtagccccagaggagcctaaagaagttccagttgagaccgaggaggtg

SEQ ID NO: 50733 - DNA, 268 bp, Glycine max
  unsure (1)..(268): unsure at all n locations; Clone ID: 701138976H1
acactgaggagggagatagtggaaggnacactcaaatgactcaaccagccatggctaccttctccaaggaacgcgagaactttgtctatgttgccaagttagctgaacaagctgaacgctatgatgaaatggtggatgccatgaagaaggtggcgaactggacgttgaattgagtgtggaagagaggnacctgttctctgttgggtncaagaatgtggtggggtcacggagagcttcatggaggatctgtcatcgatagagcagaaag

SEQ ID NO: 50734 - DNA, 268 bp, Glycine max
  Clone ID: 701138977H1
catagcctcagtaatctgagagagaaacaaaaacaatgaaggtttccattgccaagttccactcccttcccctatgttttttccttctcttggccttcaacacaaaacccctcctagcagcagaaccagagccagtggttgataagcaagggaaccctttggagccaggagtagggtactacgtgtggccatttgggctgatgaaggaggcctcacataggccaaacaaggaacaagacatgccctctttatgttatccgtgaccttc

SEQ ID NO: 50735 - DNA, 263 bp, Glycine max
  unsure (1)..(263): unsure at all n locations; Clone ID: 701138980H1
cactcctgtagttaagcctatccgggagccacgggttnctgtacaaactctgnntgaggttgatatcttncgatgatggctaccgctggcgcaagtatgggcagaaggtggtgagaggcaatcctaaccctaggagttattacaaatgcacgaacannggttgccctgttagaaaacatgtngagngntctcatgatccaaaagctgtgattaccacatatgggggagcacatctngngtttcccaatgcaaggatagttgcc

SEQ ID NO: 50736 - DNA, 269 bp, Glycine max
  unsure (1)..(269): unsure at all n locations; Clone ID: 701138983H1
gntcgacctagaactgtncttngggntttacgnaaccancgaagttgcagaaaaaggangaaagaagaaaaaatggtngctgacaggagccagaagccgaaggtctccgagaagggcganaacctcgntganatcgnncggagaactcgtcctctctatcgaaaagttgcaggagatccaagacgagctcgaaaagatcgatgaggaagccagtgacaaagtgctcganatagagcagaagtccaatgagatacggaagcccgnctatc

SEQ ID NO: 50737 - DNA, 256 bp, Glycine max
  unsure (1)..(256): unsure at all n locations; Clone ID: 701138984H1
gttcaanagactatggatttcgaaaagaagatacgancacaaatgtagcantatacaattattcttgccacagaccaatgtagtattactcaattaaacaaaagatcattcattactcggactaagatacgaccacagatgtattgctctgttgcatttaaatgatatgcatactatggaattcgaaaagaagatctaacttaaagttactaccnttttttatggatccacacataaatttacccctgacaattca

SEQ ID NO: 50738 - DNA, 264 bp, Glycine max
  unsure (1)..(264): unsure at all n locations; Clone ID: 701138987H1
ggcaccttcatatcctgattggtcaagctcgatgcaggcttactatgctcctggagccactccacctgcatnttttgcctcaaatattgcntctccaactcccnattcttatatgtggggaagccagcancctctaattccaccatatagtactccngntccatatccagctanatatcctcctgggaatgtctatgctcancctagcaggcaatgaccctgagcancacacagaatggtacagagttgtaggaaagggntctc

SEQ ID NO: 50739 - DNA, 266 bp, Glycine max
  unsure (1)..(266): unsure at all n locations; Clone ID: 701138988H1
ggctatccgctgagtntaagcatatcaataagcggaggaaaagacactaacaaggattcccttagtaacagcgagcccccacagaagcgtactaaaagatcgtcagcttcacaaaaggaaacttccctggaagaaaaagaagaggngacaaaggangcggaaatgcnagangctgatgacaccactaaggatgataatgttatagagaaggnaaaggnttttgnaaaggnaaatcaagatgacaagagtgtggaaaatncagatgt

SEQ ID NO: 50740 - DNA, 268 bp, Glycine max
  unsure (1)..(268): unsure at all n locations; Clone ID: 701138990H1
attcacacatccaccgttcagntaaaaaccacccaaatccgatggcggcgtcgcggcgtctccgggacctccaatcccaaccggcgaacaagatctgcgtggactgttcccagaagaacccgcaatgggcctccgtatcgtacggcgtcttcatgtgcctagagtgctcaggcaagcaccgcggcctgggcgtgcacatctccttcgtgcgatccgtgacgatggattcgtggtccgaaatccagatcaagaaaatggaagcggagna

SEQ ID NO: 50741 - DNA, 266 bp, Glycine max
  Clone ID: 701138991H1
gctggcaaagctgtttactctgcggtatggatagctgccttttccactgtttatggaattgctgggcttctctacccagaaatgggttactgcaggaggtcttgggacagttttgttgacccttgctggtcgtgagatatttacaaacttcctttcaagtgtgatgattcatgcaacccgaccttttgtggttaatgaatggattcaaacaaagattgaaggatatgaggtttctggtacagtcgagcatgttggctggtggtcac

SEQ ID NO: 50742 - DNA, 261 bp, Glycine max
  unsure (1)..(261): unsure at all n locations; Clone ID: 701138992H1
tagccgttcacagcctagcctctgctctagaagatggctcctcccagaggtggtgggttcaggggtggtaggggtgacagaggtagaggaaggggcggtggtggaggaagaggaggagacaggggcacgccttcaaagctagaggcggtggccgtggaggaggcagaggcggcggtggcctggaggaggcaggggcggcggccgaggtggaatgaagggaggtagcaaggttgtggtgcagcctctagacatgatggtntt

SEQ ID NO: 50743 - DNA, 268 bp, Glycine max
  unsure (1)..(268): unsure at all n locations; Clone ID: 701138993H1
ggagcaaagcatcaatgatttaagatcagagatgggagtggagagcactccatgcacctgtggcccctgctaagccaaaggaagaagagtcaaacaaagaagngggttctgcttgagtaatgttacgtgttcaactgccttgtcttttatttttgggtctcgtgtgattcattcaggattttgttactgtatatctagtgaactctctttgctagctaaaacatactgttcaaactatgtaaaaatcacagcactgttggtttattgt

SEQ ID NO: 50744 - DNA, 266 bp, Glycine max
  unsure (1)..(266): unsure at all n locations; Clone ID: 701138995H1
taacattggaggctcgtttggattgctgcaagtaaatcccttaaccgacatatncactccaaatttcgaagncaccagctgggtctatgagtgtaatcatgatatttacaatatttatttggatagctctttatgatcgtgtcattattcctcttgcatcaaagcttganggaaancggttaaggntcgtgcnaagagaagaatgggacttgggttgcttntctcttntctccacttggtaatgcagcaatgttgagatacaaggc

SEQ ID NO: 50745 - DNA, 258 bp, Glycine max
  unsure (1)..(258): unsure at all n locations; Clone ID: 701138996H1
accaccctcaggtggtggtggaagttacaatccaactccatcaagtcctccagacggtggaagccatgatccaactccttcaccaccctcaggtggtggtggaagttacaatccaactccatcaantcccccaggtggtggaagctatgatccaaccccatcancacccacagatggtggaagttacaatccaanccnatcaccaccctcaggcagcaatgtggcanancaaccanatgaaccctctattccaacacc

SEQ ID NO: 50746 - DNA, 286 bp, Glycine max
  unsure (1)..(286): unsure at all n locations; Clone ID: 701139001H1
atctnccccaaccccacccacccttcttgaaaaaagatcccatcttcgtgctcggtttcctaatgggtgcaaccaatggcgaatgggtcgtgaccctnnnnnnnnnnnnnnnnnnnnnnnnnnnnnnnnnnnnnaatgggaaagtccnaggaagaacagcagcaacctctgcccctgtacgaggatccgccgcggaatgcggcgtgtcggtgccgttgttttcggattcggaaacttgtcggcgtcagatgcgtactcgtactggttgtgtcggtggcagtgtttt

SEQ ID NO: 50747 - DNA, 275 bp, Glycine max
  unsure (1)..(275): unsure at all n locations; Clone ID: 701139003H1
ctccgcctcccttcccttcaactccacgnctaagatccgaggagtttggnnaaccctaattcattcctctttgcttcttctatctctattcctctaacaccagtgatcgcaggtttggctacagaaggatcgcagtttgatgctcggcaatatgattctaagatgaatgaattgctttccgccgatggacaagaatttttcacttcatatgacgaagtctatgatagttttgatgcaatgggccttcaagaaaatcttctgagaggcatatatgc

SEQ ID NO: 50748 - DNA, 264 bp, Glycine max
  unsure (1)..(264): unsure at all n locations; Clone ID: 701139004H1
ctggatcccatcgaatacagctactcatgaagaccagcctcttgagaaaatcgaanagtccagcattcctgataagacagcgcttgagtatttatcaacctcagtctctggtgaggagcttacagactacactgttccggattctcctgtcgcaaatgatgttgatgtgagtgttgaatctcattcctcattccggaataatatgaattcagtaacccatcaaatatttgatctgactcacaatacgagtctcgaagataatac

SEQ ID NO: 50749 - DNA, 270 bp, Glycine max
  unsure (1)..(270): unsure at all n locations; Clone ID: 701139005H1
tttttnttgnncaacggcattatgtattgacgtgtttttacgtgaagcacgnctcccagggttgttgnccattcaatgcctatatagancccatcantctggacacgtgccaagggcgcattaaaagggcaaaaagctgacaaagaaaaacactacagattcaaccaatatatgatatntctaattgaaaatntcgtattcgtttagatccncagctacatcacaattttgggctaactaaccaccattgaggtccatccagtgggttgg

SEQ ID NO: 50750 - DNA, 270 bp, Glycine max
  unsure (1)..(270): unsure at all n locations; Clone ID: 701139007H1
ctgtctctctctacgctttctcgttcganatccctcaagggatccactaactgaaggagaaatggggttgacattcaccaagcttttcagccggcttttcgccaagaaggaaatgcgaattctgatggtgggtctcgatgcagctggtaagaccaccatcctgtacaagctcaaacttggagagatcgttaccacaattcccaccattgggttcaatgtggagactgtggaatacaagaacattagtttcactgtctgggatgttggtgg

SEQ ID NO: 50751 - DNA, 271 bp, Glycine max
  unsure (1)..(271): unsure at all n locations; Clone ID: 701139008H1
cccgttacatcataattatgtatcacatgtacacatttttctcttctatctctctaggnatatagatgagcacatggatttccaaggatcatttctattaagattgagaacatggtgcatcagttgttctaaactctttgcatttatctttgattcctacgaataaaaaaaatgcaaaatgngaaccantaatagctacctaacctggtgaagcaaaaggggaaggactactgggaagtggcggcggcgtcaccgaaccacccctgatttg

SEQ ID NO: 50752 - DNA, 270 bp, Glycine max
  unsure (1)..(270): unsure at all n locations; Clone ID: 701139009H1
ggcccttcgtgaagccatgtgcttcatgatggatcctacatcagggaaaaaaatatgctatgtacagtttcctcaaagatttgatgggattgancgncatgatagatactcgaatcgcaatgttgtattctttgatatcaatatgaaaggnttagatggcatccaaggaccaatatatgtgggaactgggtgtgtcttcaggaggcaggcattttatggatgtgatgcccctacttcgaagaaagcaccaaggaagacatgtaactgttg

SEQ ID NO: 50753 - DNA, 136 bp, Glycine max
  Clone ID: 701139010H1
ccattatcatccggtgcattccacgtgtgtccgtgagtccccaccggcgccgtaaccactctccgccgtggcctccaccattaatggaccaaatcccctaaacatccttctcccaattccgaatccatggctcgct

SEQ ID NO: 50754 - DNA, 272 bp, Glycine max
  unsure (1)..(272): unsure at all n locations; Clone ID: 701139011H1
aatatggctgacttgttggaatggtcaaagcaagataaganacgaatgcttcatgtcgtctaccgtgttggtgaccttgatcgcaccatcaaattttacacagaatgtttaggaatgaagcttttgaggcaaagagatatcccagaggagaaatatgctaatgcttttcttggatttggccctgaagaatcccattttgttgttgaattaacatctaattatggggttacctcgtatgacattggcgatggctttggacattttgcaattgc

SEQ ID NO: 50755 - DNA, 104 bp, Glycine max
  Clone ID: 701139012H1
gcaatcttacttttgatttctgaaatctgattatcattggaggatctgatttctgacatctgattctgattatcattggagggaatctcaacccaaagtttagt

SEQ ID NO: 50756 - DNA, 176 bp, Glycine max
  Clone ID: 701139013H1
cacaaataaggttgaagaggtcactgccggaagaagggagcaacaccatctttcattttccggcgatctcttgtttcttccatcatcaccgttttccggcgatccctaatcctcgcaaacagaaatgacgacatcaaggcgccttgatgtcgtcatttctgtttgcgaggattagg

SEQ ID NO: 50757 - DNA, 273 bp, Glycine max
  Clone ID: 701139014H1
tattccagtgaagtggagtcgttgcgatatctccatccaaattccacaatcggtttctgaaaatcgaagcaacttcactacttagttaccgtccaattccataacacagatccacagtttttattttcccgagaaagtgtggggaagcaatggaaaagatgaacaaagccttcgagaaagtgaagattatggtgggaatggatgtcgaagacgaagagcaacaagctgcggcattggacaacagcaactccttcgccttcatggacgacttca

SEQ ID NO: 50758 - DNA, 128 bp, Glycine max
  unsure (1)..(128): unsure at all n locations; Clone ID: 701139015H1
caccacaccntggcctcaaccaacgctctctcttcagcctccattctacgntnctcccaaccgncagtctctgacccgaagagcgaaccataatggaagagtaaattaccggaaaccgaataaccgtt

SEQ ID NO: 50759 - DNA, 273 bp, Glycine max
  unsure (1)..(273): unsure at all n locations; Clone ID: 701139016H1
cttgatcggtctcttaaacttcctaacattcctgctgtcgattccgatcctaggaggcgggatatggctgagcagcagggcgaacaacaccgactgcctcaagttcctgcagtggccgcnnnnnnnnnnnnnnnnnnnnnnnatggtcgtgtccctggcggggttcgccggcgcgtgttaccgcaacaccttcctcatgcggctctacctcgtcgtcatgttcctggtcattgccgttctgatcgggttcatcatattcgcctacgttgtcac

SEQ ID NO: 50760 - DNA, 282 bp, Glycine max
  unsure (1)..(282): unsure at all n locations; Clone ID: 701139017H1
tcagnatncananaagtnnngcnggnntcnaggtacggaaactcctnatgangaacttctantgcctcgaacatgggcatccagcccgacggcatgatgccttctgactccaccttcggtgtagcccacgacgccttcaacaccttcttcagcgaaaccggatctggcaagcacgtcccccgtgctgtcttcgtcgacctcgaacccaccgtcatcgacgaggtccgctgcggcacctaccgtcaactcttccaccccgaacaactcatctccggcaaggaa

SEQ ID NO: 50761 - DNA, 274 bp, Glycine max
  unsure (1)..(274): unsure at all n locations; Clone ID: 701139018H1
gtgggggcattttcttttcagccaagaagggattcggtgttgatgagcaatattgatctgttgctgcagtaggggaccgagtaagaatgccaaaccagctatggtttgcactgccaatgatttacaaggatggaaagatttcccaaagggacttagagttcttctgcttgaaggagatagtagttctgctgctgagataagagaacaacttgaggccatggactataaggtttccactttctacnanannngnaaaagccttgtcagcactctc

SEQ ID NO: 50762 - DNA, 270 bp, Glycine max
  Clone ID: 701139019H1
gctaccctgaggcttctcttctcttctcttctctgtcgtgagtcaccatggtgagggttagtgtgctgaacgatgctctgaagagcatgtacaatgctgagaaaaggggaaagcgccaagtcatgattaggccatcctccaaagtcattatcaaattccttttggtgatgcaaaagcacggatacatcggagagtttgagtatgttgatgaccacagggctggtaaaatcgtggttgaattgaacggtagactgaacaagtgtggggttt

SEQ ID NO: 50763 - DNA, 263 bp, Glycine max
  unsure (1)..(263): unsure at all n locations; Clone ID: 701139020H1
cntctgatttgatctttgtntcttctctttctctcgtttganatttttcagtaactccaccaaggttttgtcagaaaagcttgaatttttcgcctaccctttacaatgatctcttcgttgagacagcctgttgtagggatcagtggttctgatcttcttttgaggcaaagacatgcaactccaattaaggcaaggtcgtttttaccctctttgtcaagagaaaagggtcaaggatctcttgtttcagttcaaaagccactcca

SEQ ID NO: 50764 - DNA, 267 bp, Glycine max
  unsure (1)..(267): unsure at all n locations; Clone ID: 701139022H1
cttcgctccgtgccatgtcttcctctctcgctcttccttccacaccctncttcgcanctggaacaagaatcttcgctctcaagcactctctccctcgctctagggtttccatgagcgtctccgctggatctcaggcttccgttcaccaggctttgttcgccgattacaaggcctccacttcattcctcttcccgggccagggtgctcaagctgttggaatggggaaagaagctcaaaatgtgcctgctgctgcggttttnttcaaca

SEQ ID NO: 50765 - DNA, 239 bp, Glycine max
  unsure (1)..(239): unsure at all n locations; Clone ID: 701139023H1
aaagggagtagtgaccgcacgtgctcctagacnagttcaaggacgacgtcactccagagnggattgaagagctcatcaaggactatgccaatctggtcaatctcatcccacccatgaagtcattccattggggcaaggatgtaagtgctgaaaacctgcatcaaggcttcactcatgtctttgaatcaacctttgagagtccagaaggcgttgcagagtatgtagctcatcctgcccat

SEQ ID NO: 50766 - DNA, 267 bp, Glycine max
  unsure (1)..(267): unsure at all n locations; Clone ID: 701139024H1
anataacctaggggcaacccggtctattcggttttcttctgatggtcaatatatggtggttgctgagcctgcagattttgtgcatgtttatagcacaaaggcagactacagaaaacgtcaagaaattgatttctttggggaaatttctggggtttctctgagccctgatgatgagtgtatatatattggaatctgggaccggacttatgcaagcttgcttcagtatnatagggaagcccatataaatatcttgatgcatactgatga

SEQ ID NO: 50767 - DNA, 273 bp, Glycine max
  unsure (1)..(273): unsure at all n locations; Clone ID: 701139026H1
gttcaaggttcacgagttacttctgactcctgaaattttccaaacaaacacatntnttancactggaagagataaaacatggctctgctggcattgaacatctcagtgtgttgtttccaacagcagcgttcccccactctcttcaaacccaccattaccaaacaaaccctctccctccccaccgcttccgctttctcttncctcttccttaactcaactcagcgtgggccaatatttacccgccaactacggcgattgggttcccaaccccga

SEQ ID NO: 50768 - DNA, 134 bp, Glycine max
  unsure (1)..(134): unsure at all n locations; Clone ID: 701139028H1
tgcaacantaaccaaaacaccccaacaccaaacccagaagaagaaaaaccatcgtcatacaacattctaggaaaacataggagngatattctccttggcattgggggcctttacggtgcttctgcnccttagca

SEQ ID NO: 50769 - DNA, 133 bp, Glycine max
  Clone ID: 701139030H1
cgacatggacaatgaattggcagcagccgagtacatcgatgatatctacaaattttacaaagagactgaagaagatggttgtgtgcatgactacatgggttcgcagccagatattaatgccaagatgaggtca

SEQ ID NO: 50770 - DNA, 272 bp, Glycine max
  unsure (1)..(272): unsure at all n locations; Clone ID: 701139031H1
acttcctctccgtctctaagctactcaagcaaacaaacccattccgcatagacagtgaagnaggctttctctagcagctagagatggcagacggaagagggtccactctcgtgcatctcttggtcgtggttctgtgcttggtcgcatttgggtttgccgttgccgccgagagaagaagaagcgtcggaaccatgcaaaaaatagaaggaacaaatgaaacattttgtagctacagttctgatgttgcgactggttatggagtgggtgctttc

SEQ ID NO: 50771 - DNA, 272 bp, Glycine max
  Clone ID: 701139032H1
cactcttttagtgtgtcgtattttttcctctctttctccacaattaggtcttggaccgacccttttgtgtaagtgcaatggccatggctaagcttgtatgtgttctgcttctggcattccttggcatttccatgatcacaactcaagttatggcaacagattctgcctatcacttggatggaaggagttatggacctgggagtctaaagacctcacagtgcccttctgaatgcacaagaagatgtagccagacacagtaccacaagccgtgc

SEQ ID NO: 50772 - DNA, 274 bp, Glycine max
  Clone ID: 701139034H1
gcatctccaaggggaagaagggtggcaagaagaaggcagctgatccctttgccaagaaggattggtatgacattaaggctccttctgtttttcaagtgaaaaatgttggcaaaaccctcgtctctcgtactcagggtaccaagattgcttctgaaggactcaagcatagagtgtttgaggtctccttggctgatcttcaaggggatgaggatcatgcattcaagaagattaggttgagagctgaagatgtgcaagggaagaatgttctgacaaa

SEQ ID NO: 50773 - DNA, 269 bp, Glycine max
  Clone ID: 701139035H1
gtgaatatgtcatgtttctcaagccaaacttcttcagaaaattattattcaaggattcctgttgttgatgagggttctacctcagcaaagaaatcaggtggctatatgccatcacttcttttagctccaagaatggatagcgctgaaagttcagtgcagacacaagaatttattgttggaagtaaacctcaaccgtgcccagaaccatccaatggtgtagattactcacttggcactgtatctgggccccaggatacagggataactcc

SEQ ID NO: 50774 - DNA, 266 bp, Glycine max
  Clone ID: 701139036H1
agccttcctctctgcagagtgcagagctttctctccccgttgcttcattcattctcaacaacaaaccaatctttcttagaaaatgagggggggcttgtggcaacttgggcaatcgatcactcgccgtcttgcccatggagataagaaggctgttgctcgtcgatgttttgcctcagaagctgagctgaaaaagacagtgtttcatgacttccatgttgctcatggtgggaagatggttccatttgctgggtggagcatgccaatcc

SEQ ID NO: 50775 - DNA, 247 bp, Glycine max
  unsure (1)..(247): unsure at all n locations; Clone ID: 701139038H1
gtttgttctcactaactattanctcatcatgtcgtcganncnncagttggtcaagtcatcaaatgcaaagctgcggtttcatgggaggcagggaagccacttgtgattgaagaagtagaggtggcaccaccacaagctggtgaagtgcgtttgaagatcctctacacctcncctttgccacactgatgtttacttctgggaagccaagggccaaactccattgtttcctcgtatatttggtcatgaa

SEQ ID NO: 50776 - DNA, 266 bp, Glycine max
  unsure (1)..(266): unsure at all n locations; Clone ID: 701139039H1
ccaaggaccacatcaagggtcttgttgtcgactttttctcggcaggnacagactccacagcggtggcaacagagtgggcattggcagaactcatcaacaatcctaaggtgttggaaaaggctcgtgaggnggtctacagtgttgtggganaggacagacttgtggacgaagttgacactcaaaaccttccttacattagagcaatcgtgaaggagacattccgcatgcacccgccactcccagtggtcaaaagaaagtgcacagaa

SEQ ID NO: 50777 - DNA, 267 bp, Glycine max
  unsure (1)..(267): unsure at all n locations; Clone ID: 701139041H1
ttngtgtgtgtcaccggtgctgccggttatattgcttcatggattgtcaagttcctacttgaacgtggttacactgttcngggccactgttcgaaacccaaatgatcacacgaaggtagaacatttgctaaaacttgaaggtgcaaaggagagactgcacctttttaaggcagatcttttgggtgaaaattcttttgactccattgttgagggctgtgatggcgtctttcatactgcttctccttttattatcaacgtcaaagaccc

SEQ ID NO: 50778 - DNA, 268 bp, Glycine max
  unsure (1)..(268): unsure at all n locations; Clone ID: 701139042H1
ctttctctatctctatcggtcatgggtgcttttgcttttgatgangaaaactcctccaccgtggctccggcaacactctacaaagctctgacaaaagatgctgacactatcatcccaaagattattggggccatccaaactattgaaatcgttgaaggaaatggaggacccggaaccgtcaagaagataacagctagtgaaggtgaccaaaccagtttcgtgctgcaaaaagtggatgcaattgacgaggctaacttggtatacgact

SEQ ID NO: 50779 - DNA, 269 bp, Glycine max
  Clone ID: 701139043H1
ggcttctgtgcctcaaccaaaaatctcccttctaaccttattcttcttctcgtccttcaccatcattgcgcatgcaattgttcctcaaaacgaaaccttcaaatttgagaactcaggtgaacttggaccctacatcgttgagtacggtgcagattacagaatgataagcatcttcaactctccattccaagttggtttctacaacaccaccccaaatgccttcactctagctttgcgtgtagggctccaacgctcggagcagctatttc

SEQ ID NO: 50780 - DNA, 267 bp, Glycine max
  Clone ID: 701139044H1
ctctctcttccttccttctccataactcacaccatttctgcatacatacacccaccattaccaattccttccataaaagcttccaaaaaaataaatgggtcactcatcacgttttctcgtgctgcttcttcttacctccctcctctttctctcttttgattatggtatttatggtttctctaactaactctctactggtgttgccacatgcatgaacttaccatcttttaagtttttcttttttcgtttggttttgtcttttgtttg

SEQ ID NO: 50781 - DNA, 71 bp, Glycine max
  Clone ID: 701139046H1
tcaaatatccttgagccagacatgtacaggaacgctgcttcacgtcttagggtcatcagtgcccgttcgtg

SEQ ID NO: 50782 - DNA, 266 bp, Glycine max
  unsure (1)..(266): unsure at all n locations; Clone ID: 701139047H1
cttgcttcttgcttctattacttgcttctttcttcaccatgtcacttgctgggaaaatcaccactgaaattggggttcatgcaaccgctgcaaagtggttcaacctctttgcaacacaacttcatcatgttcaaaaccttactgatagagtacatggaaccaagctgcatcaaggtgaagactggcntcacaacgagacagtcaaacactggacttataccatagntggtaaggctacaacatgtctggagagnattgatccntga

SEQ ID NO: 50783 - DNA, 268 bp, Glycine max
  unsure (1)..(268): unsure at all n locations; Clone ID: 701139048H1
gttgatcacagtggtgtggtgcgcggtggcggtgctactgtgcgccgcggcgggcgcgtcgtgggtggaggaggcggcgaacccgatacgaatggtggcgggggtggaacnccgaggtggttcgggtgatagggcagtgccggcgcgcgctgaagtttgctaggttcatgagcaggttcgggaagagttaccgaagcgaggaagagatgagggagaggtacgagatattctcgcaaaacctcaggttcatccgctcccacaacaagaa

SEQ ID NO: 50784 - DNA, 266 bp, Glycine max
  unsure (1)..(266): unsure at all n locations; Clone ID: 701139050H1
gaatatgccaacacattccgtacggagtcatacactgagttttggacacgtgtccttgcatattccaaggatgaatcctctacttgtttgtctagagagtccaccacttcggccaggcttccctcttaccgtttgtttgcggagatctcttggacccagatcagtccacggttactcgggccctatcagaagcccaatgtcggcccataatccattctctcttgtctgactattttgcacacacngctaatgcttctcttctttgt

SEQ ID NO: 50785 - DNA, 247 bp, Glycine max
  unsure (1)..(247): unsure at all n locations; Clone ID: 701139051H1
ctcggttataaatacgacacagaacacaacttggaggcattncnaactggccatgatgctaannatgtgaatgacttcgcttttccctcagagtctgaattctgcaaagcacttggatcagtttcatatggagagacaggcaaatttatgtcaaaatgtatctctgttgaggaaacatacagtaactcaactcttgtaatcaacaaaaaagagcatgatcatattaaaggtttggagtttcccaaag

SEQ ID NO: 50786 - DNA, 264 bp, Glycine max
  Clone ID: 701139054H1
gtttcacccttggcattttccattctctttttggccttcaccatagaaccctttattggcattgctgcagcagcaccagaagcagtgcttgacacctcaggccagaagctgagaacaggtgtcaagtactacattctgccagtgttcagaggcaaaggtggaggcctaacagtttcaagcagtggcaacaacacatgccccctctttgtggtgcaagagaagcttgaagtctcaaagggcaccccagttaccttcacaccctac

SEQ ID NO: 50787 - DNA, 264 bp, Glycine max
  unsure (1)..(264): unsure at all n locations; Clone ID: 701139055H1
gcagcctccaattcgtgccactctcttcaaaatggccgttaccttctcaaatctccacacagaatcannaacgaantccctcgacgacttcctctctgggaaggtctacgtttctggggatcagttcacaaaggacgacatcaaagtgtatggtgctgttttggagaagccaggtgactcttttcccaatgctgccaagtggtacgaggttgtctcatctcagcttgctgcaagttccccggcaatgctcaaggggtggagatt

SEQ ID NO: 50788 - DNA, 130 bp, Glycine max
  unsure (1)..(130): unsure at all n locations; Clone ID: 701139056H1
cgnaatggtattacggtgncgcatcggcaattttccaattctagcactgttggctggggcaaattcctgcacccaaaacgacacatgtttggggggccattttgatttgaggtgcgttgagacagaaaac

SEQ ID NO: 50789 - DNA, 261 bp, Glycine max
  Clone ID: 701139057H1
aagccactttggtttctttgcctttctcaatacattttcttttccatggaggtaggaagtgttcttaactttcttcaggacaagaccattttaattgttggagccactggctttctagccaaaatttttctggagaaaatattgagggttcaaccaaatgttaagaagctttttcttcttttaagagcttcggatgccaaatcagctaattatcgattgcaaaatgagatcatagcgaagacttatttattgtgctaaagg

SEQ ID NO: 50790 - DNA, 265 bp, Glycine max
  Clone ID: 701139058H1
ctcagccatattctatctctacgccgctaactctctctcactctcgcgctctctctttcacaaccttcactttactctctctgacagctaaaatgcaaggaggatttcaatcatttttgtcacacgggaatgtcattagaaatgctgttctacaacgggtgcgcatggtgaaccccctgttacagccaattgtctcttcgcggtttgaatctgttacacctgctcgcattgaggagcatggttttgagagcaccacaatttcaga

SEQ ID NO: 50791 - DNA, 268 bp, Glycine max
  unsure (1)..(268): unsure at all n locations; Clone ID: 701139059H1
gttcgccgccactgaacactgaacactgattactcactccttcatgncccacttcgctgctatctttctccatttcgcccacaacctcagccttcagattcaaagcctccgccatggctaccaccatcgccgcccctgctaccaaggtggctcccgccgtcattgtcggcggcggaagagtgggcagggccttgcaggacatgggcaccggccaagacctcctcgttcgccgaggagagtccgtaccactcaatttcgagggccccat

SEQ ID NO: 50792 - DNA, 267 bp, Glycine max
  unsure (1)..(267): unsure at all n locations; Clone ID: 701139062H1
gaaaacccaaagtgcttctctcctctgtctttttctctctcttgctatccttttggctagtngcactgctgcaagtgcaacttccaagaagcgcagtgccaagccaccatgtttcaacattcaacagaagcctttttccttccacttttctctttgganttggttcttctgcttaccaggcagaaggagcagcaagtgtagatgggagaggaccaagcatatggncacctncantagacagcatactgaaaagatttggggatcatc

SEQ ID NO: 50793 - DNA, 273 bp, Glycine max
  unsure (1)..(273): unsure at all n locations; Clone ID: 701139064H1
tcgagngtngcanagatgtttcctttcgggcaanagnntcccaagataaacgggactatggtggttatgccgaanantgtgttggatatcaacagcatcaccagtgttggagggatcgttgaccaaggcttaggcttcataggcagtgcagtcgatgcacttacttttgcanccaccaaaatctccatccagttgattagtgctaccaaggctgatggtgggaaaggaaaaattggaaagagtacaaatttaagaggaaagataacattacca

SEQ ID NO: 50794 - DNA, 269 bp, Glycine max
  unsure (1)..(269): unsure at all n locations; Clone ID: 701139065H1
tttcctagctcctcaggacaaaggctactttgttttgaatgatgttttcagatatgttgatgagtataagtcagttgatattgaatctgtgccagcaaatgatgctgctaccgctgatgaaagtgctccaacagatgcttttgtcccagagcctgaggtcattcatgttgctgaagatgttcctcctagtcaaactgctgttgttgangctgacattagtgtcagcaaagaagtgagtcaaccactggagaatggaaatgtatcagtta

SEQ ID NO: 50795 - DNA, 270 bp, Glycine max
  unsure (1)..(270): unsure at all n locations; Clone ID: 701139066H1
ctgagtttccctccttcatccccttccatggcagcaccttcactctcctccgctctcaactctctctcnnnnnnnnnnnnnnnnnnnnnnnnnnncacctcctcccgccgcttctctctcctccctccaccctcacaccaaccctccaaacccctcttcctcaccctcaaatccaaaccctccgacgacattgacacatcgttcttcgacaacatcaacccgcaagacgacatcacattcaatcccccggagcccccggaagggttcgtg

SEQ ID NO: 50796 - DNA, 267 bp, Glycine max
  unsure (1)..(267): unsure at all n locations; Clone ID: 701139068H1
cctaaatcccantttccccccantncnggtttctctcncctccaattcatngncctctntttcntaattcattgctcttctattcgattcgattcttnctatggaancgcngcttcagcccaagctggagcccgcgccagagcttgtgagcgctggcgctgaggattccgagaagtcgcatgtcagtgatgtcacggaggttcgccacgttgccatggctgaggcaaacgccggttgttgcgcttccgttttgaaacggaagcgtgg

SEQ ID NO: 50797 - DNA, 258 bp, Glycine max
  unsure (1)..(258): unsure at all n locations; Clone ID: 701139069H1
tccctagctctgtcgttccgtcgttgacgatggcgtttcgggtgcgaancctgacctccgctctctctttcttctctctctcttgtccatcgcttccgccaatgtctcttcgaagagcgtttcgatgacgggtgggaaaatcgatgggttaaatcagattggaaaaaagatgagaacgtggctggggagtggaaccacacctctggtcaatggaatggagacgctaatgacaaaggtattcaaaccagtgaggattac

SEQ ID NO: 50798 - DNA, 251 bp, Glycine max
  unsure (1)..(251): unsure at all n locations; Clone ID: 701139070H1
cgccggtggtggtgcaggagttcgtgaaccacggcggggtgatcttcaaggtacncgtcgtcggcgagcgcgtgaggtgcgtgaagcggaagtcactgccggacgtccgagaagacgagctggtgagggtttcggaggatttgcggaggttttcgcaggtgtcgaatttggccacagatgagagaattgacgataggtattataagatgatgcatttggatgacaccgaaatgcctcccctgagcttcatt

SEQ ID NO: 50799 - DNA, 260 bp, Glycine max
  Clone ID: 701139071H1
aaaccaaaagcaaacaacaatggcgaaccctgaaggcagtagcagaggctctagatggtcccttaagggaaccactgctctcgttactccgaggaacgcgtggaattgggcacgctgtggtggaggaactagcggagtttggtgccacagtgtacacttgttcgaggaatgaagaagagctgaatgcatgcttgaaggagtggaaagagaagggattttcggtttctgggttggtttgtgatgcgtcttctccaccccat

SEQ ID NO: 50800 - DNA, 261 bp, Glycine max
  unsure (1)..(261): unsure at all n locations; Clone ID: 701139072H1
agacttctctcatctatcgtnataatttactttgatacgnngntctctcgatctaattttccgnctancactaacaatgacggntgcagctgaanacgctacacgangccgtaatgcngtggccgantaccgcaagnnacttcttcancacaaggnattggantccagnntncgatccgncaganaaaatttgcntncctcgaagaangtgttcaacaaaactggagangntttgaagtctcttcaaagcgttggncannt

SEQ ID NO: 50801 - DNA, 261 bp, Glycine max
  Clone ID: 701139073H1
tttctcactctctctcatgttcactcaacaacaacgacgcactcactgacatcaacactagtttcaggtgctatctcatccaccaaatgcagcaaatacactccatgcccggagggaggtttttctccggctccggatccgccgaccggaggctccgaccccaccatcagaaccagcaggccttaaagtgcccccgctgcgactctctcaacaccaagttctgctactacaacaactacaacctctcccagccccgccatt

SEQ ID NO: 50802 - DNA, 263 bp, Glycine max
  Clone ID: 701139074H1
cacatagctagttgtttaaagtgagagacaaagaaagaagaaaatggcaaactttccagttgttgacatggggaaacttaacaccgaagagagagcagcagccatggagattataaaagatgcctgtgagaactggggtttctttgagttggtgaaccatgggatatccattgagttgatggacactgtggagaggctcacaaaagagcactacaagaagactatggagcaaaggttcaaagaaatggtggccagcaaagggc

SEQ ID NO: 50803 - DNA, 261 bp, Glycine max
  unsure (1)..(261): unsure at all n locations; Clone ID: 701139075H1
gtcctagttgtggggatcaggtctaccatttttaaacttgtttntctcactcacactgtccataggtctaagcttcagtcttctcaacaggaacctctactggggtttcaactgactcagctggtttgttctcttcctctgtgnnnnnnnnnnnnnnnnnnnnnnnnnnnnnnnnnnnagtagtttctttaggctcctctgcttcttctttcacttcttcagttttctcctctgatttctcttctgctggcttctcttcct

SEQ ID NO: 50804 - DNA, 264 bp, Glycine max
  unsure (1)..(264): unsure at all n locations; Clone ID: 701139077H1
ttacagcctgtgagttcagaacttgtgcganatcgcatatcatcctgttgccannttcagatccttcctgatgtgcatgtcttgagggttttatgcagaatgatgaacattctctaaccaacccattaatgatttatttctatttattttgcaaagggaactatttttgcaagtgaaacttgttcctttgaggattttgtntgatatanatgctgtgcttatggacggtcntgtactggatncgttatntcnccagcacaanac

SEQ ID NO: 50805 - DNA, 261 bp, Glycine max
  unsure (1)..(261): unsure at all n locations; Clone ID: 701139078H1
cggccgctcagatgatccttatgaaatgagcggtgatcactgctttcttgctggaggaaatatggggttgataaaagctttatgtgaaggagttcctgttttttatggaaagaccgtcaatactatcagatatggaaatgagggtgttgaggttattgctggggaacatgtctttcaagcagatatcgccntatgcactgtgcctctnggnnctcttaaaaagaaggccatcagttttgaacctgaattgcctgcaaggaa

SEQ ID NO: 50806 - DNA, 265 bp, Glycine max
  unsure (1)..(265): unsure at all n locations; Clone ID: 701139079H1
aacaatttctctctgtttccttcttcaccgcatcaatgntganggacggcgttctcctcggcatgtgcaaccctctcctcgacatctctgccgtcgtcgacgacgctttcttgcaaaaatacggtatcaagttgaacgatgcgattcnccgcngaggataagcacaaacctatgtatnaagaattggctaacaatcctaatgtggagtacatnncngnaggngntactcagaattcanncagngcngctnnnnnnnnncancanc

SEQ ID NO: 50807 - DNA, 264 bp, Glycine max
  Clone ID: 701139080H1
gacattgctgcaccgcgaatcaacgcgtggaacagcgaccacctcccgatatatgagcctggccttgatgatgtggtgaagcagtgcagggggaagaatctcttcttcagcactgatgtagagaagcatgttgccgaggctgacattgtctttgcctcggtgaacaccccaacgaagactcagggtcttggagccggcaaggcagctgatctcacatattgggagagtgctgccaggatgattgctgatgtatcgaaatcagac

SEQ ID NO: 50808 - DNA, 270 bp, Glycine max; identical to SEQ ID NO: 50795
  unsure (1)..(270): unsure at all n locations; Clone ID: 701139081H1

SEQ ID NO: 50809 - DNA, 262 bp, Glycine max
  Clone ID: 701139083H1
tattgaggtagcgctgattcgatcgcatcagaacattcattcacattcatatcctctctctccgatcccaatggcggatgagagccccaaaccagagaccttcgaactcaacaatggaagcatgcaggtcctcctcaccaatctcggctgcaccatcatctccttatccgtacctggaaaagatggtgtgttatctgacgttgttcttggccttgaatctgttgaatcctatcagaaaggtcttgctccttattttggctgc

SEQ ID NO: 50810 - DNA, 107 bp, Glycine max
  unsure (1)..(107): unsure at all n locations; Clone ID: 701139085H1
cgggctcnaggaaggtataagcagcanttttttctgttggtatatgaaggtncgtgaaggaagnagnagaagaatggtgacggaccaagatatagcgaaaggggtgg

SEQ ID NO: 50811 - DNA, 264 bp, Glycine max
  unsure (1)..(264): unsure at all n locations; Clone ID: 701139088H1
cgccactcagcacttcgctccctctgtgcttcaccaaccatggccgaaatcgnaggctaccgntcccagatccctctcaaatcgacgtcaaacttttcaaccgctggagcttcgacgacgttgaggttactgatatgtctctggctgattacattggagtgtccccgtcaaagcatgctacatatgttcctcacactgctggtaggtactcagtgaagaggttcaggnangcggcatgccccattgttgagngactcaccaatt

SEQ ID NO: 50812 - DNA, 195 bp, Glycine max
  unsure (1)..(195): unsure at all n locations; Clone ID: 701139089H1
tagctttgcttgtnaagtnggcttcgttttctgcaattcccattccacaaagccacaccattcatcacccccaaaaaactaacacaaaagcaaaaaagaaaagaaaagagaagaaaacattataagaacatatcattattaatattgttgtaattattgttacagttttcatttgtcttgcccctttatttttcg

SEQ ID NO: 50813 - DNA, 115 bp, Glycine max
  Clone ID: 701139090H1
caactcacaattcatgagtgatgacaaattgaagaagcacttccgtgagtcttaattaaagagattaaagagacacaccattcattcgctcactcatttcatttcaaacaatgtc

SEQ ID NO: 50814 - DNA, 126 bp, Glycine max
  Clone ID: 701139091H1
tgaaattgctcaggacttcaagactgatctgcgtttccagagccacgccgtgcttgcattgcaagaagctgctgaggcataccttgttgggctctttgaggacactaacctgtgtgccattcacgc

SEQ ID NO: 50815 - DNA, 261 bp, Glycine max
  Clone ID: 701139092H1
tgacgttggagttcttcctaactcaggaagattaatactaaaggcaacgagtcaagcctgcaagattttctatttttttttctttttctatagttttgtgcagtgtagagaaaaaaatgtcattttacacgagaaaagcaggagtgagagagaaatatgatgcttgccccatggaccttcaacattttaagaggagattgaccatggtagcagctagtaagaggacgtgcgcacgagatatatagtccacatcatattcat

SEQ ID NO: 50816 - DNA, 263 bp, Glycine max
  unsure (1)..(263): unsure at all n locations; Clone ID: 701139093H1
cttctatcccttctcattctttcactctttgtggctgaaatatatggnaatagacaagttcaagctcttaacaaactgcacaagtccaccaagttcagaggaaattcacaaattgataggagtgagtttgaggtagaggagcttgcttatgatggcattgttcactctcaagagggtctcaaagagaaagatagaattgagagtcttccaggacaaccccctgtgagtttttctcactatggagggtatgtcactgtggataa

SEQ ID NO: 50817 - DNA, 190 bp, Glycine max
  Clone ID: 701139095H1
gtggtggcgccgatcagcgtggtggaccacggcctcccctacgacacccacaacctctacgacgtctccttcaacaacacccacaccatctacaccctcctcacctccgacccctccctcgtcgactcctggatctccaccgtcctccgcgaccaccagcaccagcaccagcagcgcgtcctcaccgtgg

SEQ ID NO: 50818 - DNA, 264 bp, Glycine max
  Clone ID: 701139096H1
taggagggtttcaaaagatggagaacatgcagagcttctggcaattgggcgatgaactccgtggacactcaaaagcatcggaggatcacaaatggttaatggttgcttcgaaattggcggaacagacaagattgaagggggagcgtgtgaacaaccttgatctttcaaagggccccattgaaacaaggtcaagggataaatttgggttccaggaagagaacaaatttgattctcttaacttaagcatgttgaacctggactcta

SEQ ID NO: 50819 - DNA, 194 bp, Glycine max
  unsure (1)..(194): unsure at all n locations; Clone ID: 701139101H1
ctcgctttgtgttggaagaggggaatcgtagatctgatttctttctttctnttaataataattttgtgnatcagaattattgagctgaagaaaagacaatgggattgtgggaagcttttctcaattggctacggnagcctttncttnaagnaggaannggngtaatctcnaataggacttcagaatgcngggaa

SEQ ID NO: 50820 - DNA, 278 bp, Glycine max
  unsure (1)..(278): unsure at all n locations; Clone ID: 701139103H1
cttgantngngtggcantnnangacaggggcacagcncaagtcacccatcatgaaccaccctggtcagattggaaatggctntgcccctgtcctcgactgccacacttctcacattgctgtcaagtttgctgaactcatgaccaagattgacaggcgatccggcaaagagcttgagaagnagcccaagtttttgaagaacggtgatgctggttttgttaagatgattccaaccaaacccatggttgttgaaactttctccgagtatcctccacttggt

SEQ ID NO: 50821 - DNA, 273 bp, Glycine max
  unsure (1)..(273): unsure at all n locations; Clone ID: 701139104H1
ttcgcatttnatggacctttggtttgtcggtaatgaaaagttcaagatggatgatgactatctntgataaggtcattaatcactgccagctttggtttgtttacatgagtatattgtaaacattccaatgtgcttatcagcccaagactttgagcttcttttagctgggatgggagtggagaatcacccaatggggaagcgaaatggcacaatttcattgcatttagaagttgntttctgaactgtacattagagtggtaattagcaaatggg

SEQ ID NO: 50822 - DNA, 181 bp, Glycine max
  unsure (1)..(181): unsure at all n locations; Clone ID: 701139106H1
aaaatcaaagagcataatgtcagggatcattcacaagnttggggagacccttcatgtgggagggcacaanaaggaggaggagcataagggtgagcaccatgctggagaatacaaaggggagcaccatggtgaacacagtagtgagtacaaaggagagcatcatggtgaacacaaacctgga

SEQ ID NO: 50823 - DNA, 277 bp, Glycine max
  unsure (1)..(277): unsure at all n locations; Clone ID: 701139108H1
agatcaaataggcagtgaaaaccagaaaccaaaccaancaagcctcaattgtagcaaagcaggaacgtgcagagaatggtatacagaatagtccaacattaccgagttacatggcagcaactgattnngaaanggnaagttgagggcacaaggatccccaagatttggacaggatggaagtgaaagaaacaaccatactcggcgacattctctgccatcctcanctancagcaaanttaattcaccttcacctaggacancgagaccagttcaatca

SEQ ID NO: 50824 - DNA, 269 bp, Glycine max
  unsure (1)..(269): unsure at all n locations; Clone ID: 701139111H1
aactcctgtgggacaacggcactgcatttcccgaaccgtgtatagatcgtattgctgacactgtcggaaagtatgaagcattggcctggctgtgtgggggattgagttttttcgcgtcgctgggattgttggctgtgtggaatgacaaagcctccangacaccgtttgcacccaaagtatatccatatgacannctgncnattggagttggtggtgaaccataggtagatccaagcaacgatcggatgagaagtcctggtttgatgtnt

SEQ ID NO: 50825 - DNA, 279 bp, Glycine max
  unsure (1)..(279): unsure at all n locations; Clone ID: 701139113H1
ggaagctactagaacactagtttgttgagcactgcgatgaggaagtggacggttgcttccgctctccttctttctctctctgcctctttctctttgcagatcaaggtcgaaagtttcaggcgaatgccgagggagattccgacgaccttgtagatcctccgaagtggaggacaagatcggtgctgtgcctcatggcctttccaccgattcagatgtcnntnaggagggagtcggagtcgatctcgaagagatctgctccggagcaatgcggagaagttt

SEQ ID NO: 50826 - DNA, 277 bp, Glycine max
  unsure (1)..(277): unsure at all n locations; Clone ID: 701139114H1
cgatgctggtcacgggaagccgtgtacatgtctatcgttttaaccaacaattagatctccttcgcattggccaagaccttgagttgtttgttcaagactatgccaggtttaagtgcttacgctganaatccacaagatgctgcagaatctcttattccacttttngaggaagcagaagctgctgttcctcaggagtttcaccccaggacgccagttaaacttggagcaactgcaggtttaaggcaatggaaggggtgnttctcgaagggttgtcagg

SEQ ID NO: 50827 - DNA, 278 bp, Glycine max
  Clone ID: 701139115H1
cgttcacttcccatgcttctgtcaatgatttctgtgtagcagacctaaaaggtccagatagcccttcaggctatcagtgcaagccacctaacacagtcacagtggatgactttgtgttctctggctttgtagctggaaacaccacaaacactttcaatgctgcattaacctccgcatttgttactgattttccaggtgtgaatggtcttggtgtatctgtggcacggttagacatagccaaaggtggatcaatcccaatgcacacacaccctgctgcc

SEQ ID NO: 50828 - DNA, 281 bp, Glycine max
  unsure (1)..(281): unsure at all n locations; Clone ID: 701139116H1
ggcactgncgttgtctagctctgcaaccacttctatgtccttgataataacttgcagatctgaattaacctctgttgatgtatattgtctcatatttgttcgtgtatgagttcttgatttgtagatcagtcataccgtgacagagagattggtggtgcgaactcggacaacccactaacagagcattagtcttgcgatggnataacngaaggcagagtacgtctgcaacgacagaagccattgncggtganacgtgtgcagtggcatcactatcagtggtg

SEQ ID NO: 50829 - DNA, 274 bp, Glycine max
  unsure (1)..(274): unsure at all n locations; Clone ID: 701139117H1
tttttctataacaaccccttgctttctttcatccaatatgttattggaccttacacagatgatcttgganatgtattacccttatgcagtggaaggtgttggagttcctgttgatccacttgcatttgctgggcttntagggatggtggtgacttctttgannatgtnnccgtttggnangctagaaggaggtcgcattgctcaagccatgtttggaagaagcactgccatgctgttatcgtttgccacttcattgttactcggtgttggtggg

SEQ ID NO: 50830 - DNA, 274 bp, Glycine max
  Clone ID: 701139118H1
gaggaaatatgggggtgaactctctccaattgttaccctctctgttcctgatggtagtgtctggcatgtaggattgaaaaaagcagacaacaagtattgtttccttgatggttggaaagagtttgttcaacgctattccattggtgttggatacttgttggtattcagatacgaaggaaagtcatctttcaatgtccatatttttaatttggctacttctgagataaactatcaatcagtcacacgaagcagtaatgaagggcttcacttcaca

SEQ ID NO: 50831 - DNA, 280 bp, Glycine max
  unsure (1)..(280): unsure at all n locations; Clone ID: 701139119H1
ggcgtaatctagtcacgcttctccaagagagcnctaagaagcgcacangncgctngnaagngccaaacgtcgcagactcatctnctgacagcngaacgcgcttntncgacggatgcnacnacatacgattaccncgtcggnggattgcntgaagtgggactancgtgggcanaggaagataatcccgtnggggncantngctccccanagtttccgtggatgcttacgtggcaaccaagtggtcctcgccgggncaagtcancgtctgggacngagcctc

SEQ ID NO: 50832 - DNA, 272 bp, Glycine max
  unsure (1)..(272): unsure at all n locations; Clone ID: 701139121H1
caaccaccggccatactcactgttgttctcaagggattcgattctctnctgcactacacttctagggttttcctctgcgctataagcaatcatggcggatgaaacaccaaatgagatgaangaggaggttccagaaattgttccttttgatcctaccnnnnnnnnnnnnnnnnnnnnnnttacaattgtagatcctgctgatgaacctgtggagaaattggctgagaagacagaaaacctctcagtttccgagggggtagatgnaattnact

SEQ ID NO: 50833 - DNA, 186 bp, Glycine max
  unsure (1)..(186): unsure at all n locations; Clone ID: 701139123H1
caaacttctgcttcaagacctttggagacagagtcaaatattgggtcactttgaatgaaccctatcatttagtcctcaatggctacaatggtggcacctttgcaccaggtagatgttctaaataacgttgccaattgtagtgctggcgattcatccactganccctanntnnttggacactactta

SEQ ID NO: 50834 - DNA, 276 bp, Glycine max
  unsure (1)..(276): unsure at all n locations; Clone ID: 701139125H1
ggcaatggtgtacgtcaaggctcagaaatcaaaagcctacttcaagagatatcaagtcaagttcaagagaagaagagagggaaaaaccgattaccgtgccaggattcggttgattaatcaggacaagaacaaatataacactccgaaataccgatttgtggttcgctttagcaacaaggacattgttgcacaataatanctgcctagcattgccggcgatttagttcttgctacagcattttcacntgagctgccacgatatggtctttgaagtag

SEQ ID NO: 50835 - DNA, 272 bp, Glycine max
  unsure (1)..(272): unsure at all n locations; Clone ID: 701139126H1
attccggtcactcctctcgccggcgatcccttattcctccgtcctccgtcnagtcctttccgattcgaatcgttcccagccttgtgccaccatgaatcccgaatacgattatttgttcaagcttttgctgattggagattctggtgtaggcaagtcatgtcttctcctgaggtttgctgatgatnnanacctngagntntatcagnnccnattgagttggnnttaaaaantccgcactgtggagcaggatgggaagactattaaacttcaaa

SEQ ID NO: 50836 - DNA, 278 bp, Glycine max
  unsure (1)..(278): unsure at all n locations; Clone ID: 701139127H1
gtcatatgcttgtctcanagattaagccncccatgtgnaagtatnaactaattcagactgtgaaactgccgaatngctcattagatcagttatagtttgtntgatggtatctactantcggataaccgtagtaattctagagccaatacgtgcaacaaaccccgacttctggaagggatgcatttattagataaaaggtcaacacaggctcngccngnngcnttgganggtnccnnnaaancctcggatnnaggcctttgtgccggagacgcatcatt

SEQ ID NO: 50837 - DNA, 129 bp, Glycine max
  unsure (1)..(129): unsure at all n locations; Clone ID: 701139128H1
ccacggcttctcagaaggggtaatcttatattnaacnatgtctaaatatctaatttgtacattggtagcctcttgttccagttgttggtgcagaagaaggccagtggctggtcaccaaaccattcagtc

SEQ ID NO: 50838 - DNA, 140 bp, Glycine max
  unsure (1)..(140): unsure at all n locations; Clone ID: 701139130H1
aacgaatcgaaaaaagaaanatcatggagatggcaaacttggctgcgaccggaagggttacnccgtcgttttgtcgtccgaggtncgtangctntgtangacaaggtncnanggggttcaccgtcncggattcnnagcga

SEQ ID NO: 50839 - DNA, 281 bp, Glycine max
  unsure (1)..(281): unsure at all n locations; Clone ID: 701139133H1
caagttttgtgtcgtgagcgagttgaggaactagaacctagtatccggtactgccttgcacaanattggnccagtcagatttacaggcctctgaacttttgcaaatcagtgatgtggaaggtcccgcattagacctttttaaagctaaattagaggctgccatggctgaggcaagatctcaacaagctgcttccatgacagaattnccttggcttggccacagatttccnatatcaaatgccaaaacaagggttccatcctgnaagctcaggaggctggag

SEQ ID NO: 50840 - DNA, 267 bp, Glycine max
  unsure (1)..(267): unsure at all n locations; Clone ID: 701139135H1
ggacacataaacccggcggtgacattcgggctgttcctaggacgcaaggtttcgttgntaagggcgttgttgtacatggtagcacagtgtgccggtgctatctgtggcactggattggccaaggggttccaaaaatcatactacaacaggtatggaggtggtgccaactctgttgctgatggctacaacaatggtactgctttgggtgctgagattattggtacctcgtncttgtctacactgtcttctctgccactgaccctaaga

SEQ ID NO: 50841 - DNA, 265 bp, Glycine max
  unsure (1)..(265): unsure at all n locations; Clone ID: 701139137H1
gttgtcccaaagaaagagcatctttctcctttctttcatcaccgttggaaganactgagatgggttcaaaaaccaagacttttacctttgaggaggtggctaagcacaatcacaggaaggattgctggattatagtcaaagggaaggtgtatgatgtcaccccatttttggatgatcatccaggaggtgatgaagttttagtgactgcaacagagaaggatgccaccactgattttgaagatattgggcacagtgattcagcaac

SEQ ID NO: 50842 - DNA, 270 bp, Glycine max
  Clone ID: 701139141H1
agggtttaacctttctggctgtgttaatatgcgtttcagcactgtcactgagtccttctgttgcgggggaagggcaaaataatggccttgttatgaacttctacaaggaatcatgccctcaggctgaagacatcatcaacagaacaagtcaagcttctctacaagcgccacaagaacactggctttctctggctcaggaacatcttccatgactgtgctgttcagagttgtgatgcttcactgttgctggactccacaagaaggagcttg

SEQ ID NO: 50843 - DNA, 159 bp, Glycine max
  unsure (1)..(159): unsure at all n locations; Clone ID: 701139142H1
gcgttgcgctccgctgacgatgacccaaaccacagatcaaanannaaaaangntgctctgaatgtagaaaattcagaaaccttacctacaggccaaggagtaactactancaaggtatctctctatcactgcnattattgtaacaaagatatttcnggg

SEQ ID NO: 50844 - DNA, 229 bp, Glycine max
  unsure (1)..(229): unsure at all n locations; Clone ID: 701139143H1
tctgcactcacttctagggttttctctgcgctataagcaatcatggcggatgaaacaccaaatgagatgaaggaggaggttccagaaattgttccttttgatcctaccnnnnnnnnnnnnnnnnnnnnnnttacaattgtagatcctgctgatgaacctgtggaganattggctgagaagacagaaaacctctcagtttccgagggggttgagactgcattactggttt

SEQ ID NO: 50845 - DNA, 158 bp, Glycine max
  Clone ID: 701139144H1
gcaattcaacaagaccccgaactccaagcttggtggaaagaacttgtccaagtgggtcatggtgatttgaaagataagccatggtggcaaaagatgcaaacttgtgaagagttgattgaagcctcggccaccctcatatggatcgcttcagcccttca

SEQ ID NO: 50846 - DNA, 127 bp, Glycine max
  unsure (1)..(127): unsure at all n locations; Clone ID: 701139145H1
caaaaatngtgacgtntctgaaaccaaacaaagccgtcatcgtgcttccagggacgctacgccggcaaaaaagccgtaatagtncgaaccttcgatgaaggcacgcgcgagnccccttacgggaact

SEQ ID NO: 50847 - DNA, 274 bp, Glycine max
  unsure (1)..(274): unsure at all n locations; Clone ID: 701139146H1
ggctttttcctcactgtatctcctgattccatacaattagttgctncaacatgcagctgcaaataacaagttcttcatgatgaacctttctgccccatttatctgtgagttcttcaaggatgcactgaataaagttctgccatatatggactacgtttttggtaatgagactgaagcaagaacattttctaaagctcaaggctgggagactgtaatgttgaggnaatagccttnggnactcagntnnctangcatcggaaacacataaaaggnt

SEQ ID NO: 50848 - DNA, 271 bp, Glycine max
  Clone ID: 701139147H1
cacagtgcttgtttagactagtgatcttccatggctgtgaaggatagaatcctggtcttgggacccacaggagccattggaaggcacatagtttgggcaagtttaaaggcagggaatcccacttttatattggttagggacacccctgcctctgttaacaagccaaggcttgtcactgctgctaatcctgaaaccagggaagaactcattcagagcttccaaaattctggagttactctaatccagggagatctgaatgatcatgaaagtc

SEQ ID NO: 50849 - DNA, 272 bp, Glycine max
  unsure (1)..(272): unsure at all n locations; Clone ID: 701139149H1
ccctagttcgcttgcagtcacacaagaggccaatcctattcatagctcgagatgggtnaagaantgaaggtagttgttccagaatcagtgttgaagaagcgcaagagggangaggaatgggcgttggccaagaagcaagaactcgatgctgccaagaagaagagagccgagagccgccaaactcatnncanacagggcnanagccnttcgntnaaggggtanngatcaccaggagnaggattggattcggttgaaacgcgaggccaactgaa

SEQ ID NO: 50850 - DNA, 267 bp, Glycine max
  Clone ID: 701139150H1
ggcacttcgttgcttggtgatctccctttctgttctcttcactcttggtcttgcgagagaaagccatgccagagacgaagatttttggcatgctgtttggccaaacactcccattccaagttcattgcgagatcttctaaagcctggccctgcaagtgttgaaatcgatgatcaccctatgcaaattgaagaaacacagtacccgaaaaccttcttctataaagaagaccttcatccaggcaaaacaatgaaagtacaattcagcaa

SEQ ID NO: 50851 - DNA, 246 bp, Glycine max
  unsure (1)..(246): unsure at all n locations; Clone ID: 701139151H1
tcgttcttttggagtgtgtgtgcacccattgatgacaagcaaccccattngcatggaagcctaagaggaggagaagacgaagaggacaagggtaactgaatcgccgcttctgcagcttcgttctttcgtttttgtttcatctttttagcttcagagggtaaataaaaaatggaggttttggtgggtcccgctttcaccatcgacgttccctcgtctccgccgcagcatgccggttccgatgatcgg

SEQ ID NO: 50852 - DNA, 279 bp, Glycine max
  unsure (1)..(279): unsure at all n locations; Clone ID: 701139154H1
cacaggtgtcacattcaatcggcncagactcgagtattggaccanaagttcctgaatgccagtnttggttttgngaggntcatagcttcccagaaggacatancgaacttggtctatatctgtgagtgcaatggcccttcctgaangtggccaattaactgggaaacngggtcatcnanggtgaattgnnnancaaaaaannccnggtttgtggaaccgcgtgnnggtcgtcnaatgttccacaanantntcnanggaagaggnttgcntattttgggg

SEQ ID NO: 50853 - DNA, 126 bp, Glycine max
  Clone ID: 701139155H1
ggcaacaacaaacaaaccctttctttctgggcttcagtttttgcagtgaaaatggcggtgactttaacatcaaccctctttatgggctttgctatttgctgcttcagcttttgctgctcttcagcc

SEQ ID NO: 50854 - DNA, 272 bp, Glycine max
  unsure (1)..(272): unsure at all n locations; Clone ID: 701139157H1
caacattcttcaatcaaatcagccatggcagcagaacccacccgccccgtaaaaatcatncgccgccgccgatgacttcggcactcctctcaaagacgccctgcgtcgctcacttgcgcactctcaacatccaagtcgaagatctcggaacctcttcctactactccgccggagccgaggtcggtcgccgagtctcccaatcctcctctccgacnatccgtggccttcgtcgccngcggaacggggnccgggggtcnccatcttcggcaaaa

SEQ ID NO: 50855 - DNA, 269 bp, Glycine max
  unsure (1)..(269): unsure at all n locations; Clone ID: 701139159H1
gcagaagcagtttccggtgcatctcatcgtcttccaaaatgaacgacgcagatgtctcgaagcaaatccagcagatggtgcgtttcatccgccaggaagctgaggagaaagccaacgagatctctgtatctgccgaaanggaattcaatatcgagaagctgcagttggttgaagccgaaaagnagaagatcaggcaagaatacgaacgcnaagagcgccaagtncaaatcgcnnnaagattgggtnctcaanntnacttgatggcntnt

SEQ ID NO: 50856 - DNA, 271 bp, Glycine max
  unsure (1)..(271): unsure at all n locations; Clone ID: 701139162H1
gggtcatgagagaggaagaagagagtgaaagagtgaagaataagagattaaagggtgtagaagaagaagatggtagtgatggtgttcccacnnnnnnnnnnnnnnnnnnnttttttgccatactaagaaggatgaggatggccgtcaagtactttgacgacaaagggaggggcggcagggagtggagggaggccctccgagacggcggagcttcacggtggaccaccgccacgacgtcgccgccggcgaagaggatgacaagccaaagaaa

SEQ ID NO: 50857 - DNA, 272 bp, Glycine max
  unsure (1)..(272): unsure at all n locations; Clone ID: 701139163H1
caaacattcaattcatggcagctgcaaagcttcaagctttatggaatcacccagctgggcctaaaaccattncacttctgggcacctacctttaagtggggcatcagcattgccaacattgctgatttctcaaaaccacccgagaaactttcctatcctcagcaaatagcggtcacagctactggaattatctggtctcgttacagcactgtaatcaccccaaaaaattggaacctgtttagtgtaaacattgcaatggcagggacaggctt

SEQ ID NO: 50858 - DNA, 269 bp, Glycine max
  Clone ID: 701139165H1
gttcttatcagtgacagagtaaaggaggcataccgatgacgatggcgatgaacggcgtcgcagttgcggtgcggttgggggtggaggccaacgccgaatcagcagcagcaacgacgtcgtatggttccggtggtgtgttccatcgctatagagaacgcgaagaacaaagagagagcgaaactgaagaagctcttcgatgaagcgtacgagaggtgccgcatgctcccaccgaagcgtttccttcatctccaacaattcaccgacgtctc

SEQ ID NO: 50859 - DNA, 280 bp, Glycine max
  unsure (1)..(280): unsure at all n locations; Clone ID: 701139166H1
gattaatcantcatagatanatccattattcatagttaaacataataactgttgtgttacatctcgtgaattgttacaactgcttaaccattttctattgcagatngcttcgtcggttctctccgcagcttcgcactctgtctcaccctcatgttctctgtccaccacgcacaagggaaagcccatgattagagacaacactttgggattccacagaggagccaatttcttntctagttcaaggtctagagtcgggntcncangggtgntgcaagttaac

SEQ ID NO: 50860 - DNA, 276 bp, Glycine max
  unsure (1)..(276): unsure at all n locations; Clone ID: 701139168H1
gctatagtaagnnacacttatttgaggttggagaaatatggctaaagatgttgaggtncaagagcaaggaggagagtactctgcaaaagactaccatgaccctcctccagcacccttgttcgacccagaggagctcacacagtggtccttttatagagccctaatcgctgagttcatagcaacccttctcttcctttatgtcaccgtgctcaccattattggctacaaaaggcagactgatgccacgctaggtggcaccgagtgtgatggggttgg

SEQ ID NO: 50861 - DNA, 131 bp, Glycine max
  unsure (1)..(131): unsure at all n locations; Clone ID: 701139170H1
ggagaaagatggaggggaaggagcangatgtgtcgttgggnnccgaacaagttccccgagagacagccgattgngacggcggngcagagccaagacgacggcaaggantaccaggagccggcgccggcgcc

SEQ ID NO: 50862 - DNA, 265 bp, Glycine max
  unsure (1)..(265): unsure at all n locations; Clone ID: 701139172H1
gagacttctctcatctatcgttataatttactttgatacgaagctctctcgatctaattttccgactaacactaacaatgacggatgcagctgaagacgctacacgacgccgtaatgcggtggccgagtaccgcaagaaacttcttcaacacaaggaattgganctccagagtacgatccgtcagagaaaatttgcgtgcctcgaagaaagagttcaacaaaactgaaggttttgangntcctttcaaagangttggacagatca

SEQ ID NO: 50863 - DNA, 257 bp, Glycine max
  unsure (1)..(257): unsure at all n locations; Clone ID: 701139173H1
cttacttagtctcatttaccanttaaaantgccttcactagttgaggaggcattcgaagccaagggngcagaatcccttgagcctgaagcccattttcagtgcctcaggcgtcaagggcnagcgagtaactgcactatcngcagaagcaaatgncctcactgntttcattcaagcaatgcatagctgacaancngggcntcgactctccattcagcgtnctcgatttgggcgtcgtaatgggnctngtngantggng

SEQ ID NO: 50864 - DNA, 270 bp, Glycine max
  unsure (1)..(270): unsure at all n locations; Clone ID: 701139174H1
gtgcttcacaagtatgtttcggagctcatggcgaagangcagtntgatgttatgagattantngnagcnngtganntngctgngaatnccgccagcaancttctattgtccgatngatcaaagtctactcgcccaganaangctcgccgcttgggtttcaaggcnannacagggtcatgtnatttaccngtgtttcgtgtacgaangggtggccggaagagtaccattcccaaaaggtnttgtttatggtaagcccaccaaccaaggtgt

SEQ ID NO: 50865 - DNA, 262 bp, Glycine max
  unsure (1)..(262): unsure at all n locations; Clone ID: 701139176H1
cccacctcggaggcctaagccaaagcagatcctgcggacattgtaagtaaatcttatgaagatggagatgataactaatgttaccgagtatnaggcaattgcaaaggaaaaattgccaaanatggtttntgactactatnaannaggggcanaggatcagngnnctttggagnancgcnatgnnntcttcaaggnttctntttccggccgcgtattcttgntgatgtgagcaagatagacttgactgcaactgtattgggtc

SEQ ID NO: 50866 - DNA, 249 bp, Glycine max
  unsure (1)..(249): unsure at all n locations; Clone ID: 701139178H1
attcgcacngcaaacagtgagccactggccgtcggaaagaacaagcgcatctccaaggggangaagggtggcaagaagaangcagntgatccctntgccaagaaggattggtatgncattaaggctccttctgtttttcaagtgaaaaatgttggcaaaaccctcgtctctcgtactcagggtaccaagattgcttctggngggntnnaagnatagggtttttgngngtcncttgggnggatcttnaag

SEQ ID NO: 50867 - DNA, 268 bp, Glycine max
  unsure (1)..(268): unsure at all n locations; Clone ID: 701139179H1
aaaaaaactcccttgtatattgttgcagctctagctagggtttcgcaagtgcgattcgaagaagaacaacgacgatggcgatggctgcagctctgcntcgcgaaggaaggcgtttnatccaaccaatcaacgccctccactcttctctcaattcctccctcatctctcaagaccaagcncctcatggcgcgcgctccatttccactcaagttgtgaggaaccgaatgaagagtgtgaggaatatccagaagatcaccaaggccatgaa

SEQ ID NO: 50868 - DNA, 267 bp, Glycine max
  unsure (1)..(267): unsure at all n locations; Clone ID: 701139180H1
gctctctctgccactgagncaagaagatggcctcacaggtttncaaatctgcntccagagccgcgaggttcncttctatcctctcgttttcactctcaaggacgtgcgcttggggctgctgcggctgttctcattgagcagcaaagtgcctcttttttacggaaagaacggttctggaaatggnnnnnnnnnnnnnnnnnnnnnnnnnnnnnggatttcaggagtctgntcttcctgccgcagnttacatgttccnagatnacgagg

SEQ ID NO: 50869 - DNA, 281 bp, Glycine max
  unsure (1)..(281): unsure at all n locations; Clone ID: 701139182H1
gtttaacccctcttctcttcccccattaaaacctatttcaccaatccaacaangtgctgctcctgcttctggttaaggttttggttgttgttcttgttagtgatcctcatggacgnnnnnnnnnnnnnnnnnnnnnnnntggcggctccacaggcagagggatcaccggctgcggcggcaggccgagccgctacgagtcgcagaaacggcgcgactggaacacgttcttgcagtacctgcggaaccacaagccgccattgnacgctggcgaggtgcagtgg

SEQ ID NO: 50870 - DNA, 279 bp, Glycine max
  unsure (1)..(279): unsure at all n locations; Clone ID: 701139183H1
aganagatggagnggaatgagcangatgtgtcgttgggagcgaacaanttccccgagagacagccgattgggacggcggcgcagagccaagacgacggcaaggactaccaggagccggcgccggcgccgctggttgacccgacggagtttacgtcatggtcgntttacagagcagggatagcagagtttgtggccacttttctgtttctctacatcaccgtcttaaccgttatgggagtcgccggggctaagtctaagtgtagtaccgttgggattcaa

SEQ ID NO: 50871 - DNA, 137 bp, Glycine max
  unsure (1)..(137): unsure at all n locations; Clone ID: 701139185H1
accaactgttataactgtccctcgcaaagccttggccattgttatantccaacagccaaacccacgancatgcttaattgatctaaaggncaaggngnattgtntcggacaatattcactcccgggaatggcttccc

SEQ ID NO: 50872 - DNA, 280 bp, Glycine max
  unsure (1)..(280): unsure at all n locations; Clone ID: 701139186H1
ctcgagactttatgttatgctcatatatatataccatgatgccaccagcaacgtactanccgcaatacacacccaccattggatccaccaatctccaaccttcttctccattgttccgtttctctctccaacggaattctgagggccccagaagctgattngatctgggtnttnctttgtttngtgttgaagggaagaactttttttntangngtgtgtttttggtggtgagtttgtaagaagcaatggcacgcaagaagatcagagagtatgactccaa

SEQ ID NO: 50873 - DNA, 260 bp, Glycine max
  unsure (1)..(260): unsure at all n locations; Clone ID: 701139188H1
ctctctgcttntntctcttagactnnnaaccctattgcgtgctttgcaatcgaccncgnttatggccaacagtaacctccctngaagaatcatcaangaaacgcagcgtttgctcagtgagccagcacctggaattagtgngtncccttcggaagaccaatatgcggtatttcaatgtgatgancgttggcccaacncagtggcnttatggggggagnttcanaatggngtattnttggcngcaggatatctcanagggt

SEQ ID NO: 50874 - DNA, 260 bp, Glycine max
  unsure (1)..(260): unsure at all n locations; Clone ID: 701139191H1
gaatgccatctcttgttccagttgcttctacgaagcctcgtattggacgatcaggctacaacaaaagccaaggccctttcacggcttgtctatcacattcttcatctctaagaggttcatacatgaaggtatgagtaacaatgccaatgattccaccttgctttgcctgaaagtgcttgcggtatnnttcaacagccttggcatgcgacagtatcatattgtgcaggcaatgagaggctcaacatcagagttaccagtat

SEQ ID NO: 50875 - DNA, 268 bp, Glycine max
  unsure (1)..(268): unsure at all n locations; Clone ID: 701139193H1
atctgagtgtttatnaatcgnnatatcatagtcactcaagcctntagggtttctgccagctacatgaaaatgggaagcaacttgaggtntatgagtctttggtctcttggcattgattgcatcaactcatgcccaacttcagcttggtttttatgcccanngctgncccaaaagctgaggaaaatccntttgaaatttgttcatgagcatatccanaaatgctccantnanagccncgancngagaanggannncnaggnnnncgcnc

SEQ ID NO: 50876 - DNA, 263 bp, Glycine max
  unsure (1)..(263): unsure at all n locations; Clone ID: 701139194H1
gaggtctttccggaagaacatgttcgcagcccaaaagagcagcggcggagaggaaagcgaaaagagcagccctaatgcaagctttgtcaaagttagcatggatggagcaccttacctccgcaaagttgacttgaagatgtacaagagttacccagagctctctgatgccttgggcaaaatgtttagctccttcaccattggaaattgtgaatcccaaggcttcaaggatttcatgaatgagagcnagttgatggatcttttga

SEQ ID NO: 50877 - DNA, 262 bp, Glycine max
  Clone ID: 701139195H1
aaaataatggaggcttacactaaggttgtttgcattcttggacttttaatttttgtaagcatttcagatattcatagagtggagggtgcaggggaatgtgggaggtctactactccagataatgaagcaataaagcttattcctgtgtctctgccgcaaaagatgaaaatgttaaagttactaagaattgctgtgctcagatcgagaaacttggcaagaaccctagttgtctgtgtgctgttatgctctccaacacagcaaa

SEQ ID NO: 50878 - DNA, 272 bp, Glycine max
  Clone ID: 701139201H1
atgatcctattattgttggtgaagaaaactagataaggaggttcagaaagtgacaccaacatgtaacataatagaaacaaagatcaatcaccaaatgacagaaggttgtgccgataaaaactccatatattaacctccaatttttattctgagattgatttcaagctcttgttgctcaaaattcaggtccccatcacagcacaattgcggataaagtgattgagctgaatgctgccacatccaatttgcctccacctcaatttctcatcatc

SEQ ID NO: 50879 - DNA, 269 bp, Glycine max
  unsure (1)..(269): unsure at all n locations; Clone ID: 701139202H1
tnnacttgacattgnccgancnccagccaaataacacaaccttaaactttccccanaaacactacncancccatcattcgtnttnctctctagattntntcagttagttattgctgtcttctttttgtgtgtgccaacaacacagaaagagagagaaagacatggctctgaaccaatcaaaggccgtgttgttgagggtgagtttggtggtggtggcgctgtgtatagcaggatacatagtgggtccccctctctactggcntttcgtt

SEQ ID NO: 50880 - DNA, 263 bp, Glycine max
  unsure (1)..(263): unsure at all n locations; Clone ID: 701139203H1
ggaaaaagcaggccaagaccttgaaggttgcctgcaatcttaacaatgctncttgcaagttgnagttanaagactacaaggaagcagaaaaattgtgtaccaaggngttagacctcgagagnacaaatgtnaaagccctctatagaagggcccaagcatatatgcagttaactgacttggatttggctgaacttgacattaagaaagctctgagattgaccctaacaacagggatgtcaaattggagtacaggactttgaagg

SEQ ID NO: 50881 - DNA, 258 bp, Glycine max
  Clone ID: 701139205H1
ttttgctccatctctttagatcatcacaacttcagaggcttggttttaggattcaacttccaaagggcttactctaacatatctctgattgaaggggttctgtgagtttcttgttttagtttgagcttgtctggtaaacttgtcaagggggaattgcagtttctgatttgtgaaactacaaaaaattgaatttagaactgataaagggtctaatagaagagttaccaccatatcatgttataccaaactagcattagg

SEQ ID NO: 50882 - DNA, 258 bp, Glycine max
  unsure (1)..(258): unsure at all n locations; Clone ID: 701139206H1
gccatttcgggctgaaaagtttccacaaggacaatgcctacttacttaccacgagagctgtttctgtgggctcaagaagttgtgaggtgtatgttgccgcagagcataaggaacgatcctgataaggctcgagggattcgggtcacggtgagttatttgggtggcaatgtgaggcacccggttcgtgttcttgtgccttctgtggcaagggntagtagccctggtggtggtggtagagttcagaagaggaatagaaac

SEQ ID NO: 50883 - DNA, 256 bp, Glycine max
  Clone ID: 701139207H1
gctagttttgctttatggatgttttaggaactttattactttacatactttgttggttctgtgctttactttttattactggcctttttccgtttctccctcactggggtttgttgggcacggtttgccgaatctctccccatcattggcttgtttgttactatcatcacatctgcagatacttcacttaaacttggttcattgcagcataaacttggcccatcatcacctttaacagaacctccagcaaacccac

SEQ ID NO: 50884 - DNA, 257 bp, Glycine max
  Clone ID: 701139208H1
aactggactgacaactgaagtcaagtctgtggagatgcaccatgaatctcttacagaggcacatcctggtgacaatgtgggattcaatgttaagaatgttgctgttaaggatttgaagcgtggttatgttgcctcaaactcaaaggatgaccctgcaaaggaggctgctaacttcacagcccaagtcatcatcatgaaccaccctggtcagattggaaatggctatgcccctgtcctcgactgccacacttctcaca

SEQ ID NO: 50885 - DNA, 259 bp, Glycine max
  unsure (1)..(259): unsure at all n locations; Clone ID: 701139209H1
aaacactgtgtcccttctctcaagtgcacatccttcgaaaccgntgcggctcacacgtggcgctcttggattcgatcactaaaccaatccctaccctccaaactcatcgtgaagctccttttctcagtcaacgttagagcaatagttgaccttccacaaggttattacggaaacgggtttttgctagcgtgcgctgatagcaccgtagaggagttagtggagggtaacttgcgccacggtgtgaagcttgtgcaggaag

SEQ ID NO: 50886 - DNA, 258 bp, Glycine max
  Clone ID: 701139210H1
ctccattccacaacatcaaggttctgatcatgtcggggaagaggccccggccaatgatcggaaagttgtcggagttgttggtctcgagaggccgcacggtggcacttttggacaccactggaagcccaagaggcccattagacatgaagatgatgcaatcaccaagaggcttaaaaaattatgatcttggtggcgttggtcttggaattgtggtggctcttgataaatccaataacgaggttgctgcacgtgaagttt

SEQ ID NO: 50887 - DNA, 258 bp, Glycine max
  unsure (1)..(258): unsure at all n locations; Clone ID: 701139211H1
cggaacataaggcggggaagagttagtttcttcncctcttcgatggaaggcggggaagaggttctcccttcggccactgccacctccgccgccaccggcaatcccaccgcttcgcctcctccgctcgctgatcttgtcggtgctcccgatctcgctgctgcctcggacgacgtcgttacccaacctgaaattcacgcgctgatttcagacgaagagcacgatcacgagcatgaacatgacgatgacctcgagcacgag

SEQ ID NO: 50888 - DNA, 199 bp, Glycine max
  unsure (1)..(199): unsure at all n locations; Clone ID: 701139212H1
ccaattcccaattcgaaacccttattcctttcaaagaaccaaattgagtgatcgtgatggcaccaaaggcagagaagaagccagcggagaagaagcccgcggaggagaagaagtcgacggtnggagacaaggctccggcggagaagaagccaaaggccggaaagaagcttccgaaggagggaggcgccggcggagaagg

SEQ ID NO: 50889 - DNA, 254 bp, Glycine max
  unsure (1)..(254): unsure at all n locations; Clone ID: 701139213H1
aaagaaggaagagaagaaggaggagaaaaaataatagacaatacttgattatcatctggttttgtctaattctacccnnnnnnnnnnnnnnnnnnnnnnntaattttgttttgcatattttcccatattcagaagcaattgttagctgcaaaaattgtctatagagtcttttancttttgctaatgtgggtttcttctcaaatctgttgctcacaatcctttctgaagcaggatcaatcttcaattgctgagaa

SEQ ID NO: 50890 - DNA, 256 bp, Glycine max
  unsure (1)..(256): unsure at all n locations; Clone ID: 701139214H1
cgccgtcatcctcaaacgacacccttccgctagcaaaacgactgcggtttggtcgtcgtcttccccgaggcatgctcttgggatattattattcatcatcgtaatcacaccctacagagacgttgactttgtgctttttctgggaggggaacaaatggaccaagctcttctggacgacataatncaatcgccttctcgaagttcgcagccggccggggaagcaggtgcagctgtcggagtcggagatccgccatct

SEQ ID NO: 50891 - DNA, 247 bp, Glycine max
  Clone ID: 701139215H1
caagaatggcacttcgttgcttggtgatgtccctttctgttctcttcactcttggtcttgcgagagaaagccatgccagagacgaagatttttggcatgctgtttggccaaacactcccattccaagttcattgcgagatcttctaaagcctggccctgcaagtgttgaaatcgatgatcaccctatgcacattgaagaaacacagtacccgaaaaccttcttctataaagaagaccttcatccagg

SEQ ID NO: 50892 - DNA, 259 bp, Glycine max
  Clone ID: 701139216H1
ggggtcgtgaaagcgtttgcgggggaatctgttgttccatggaagaaagactcagactcagtgcattcgctcctacagtctgatcccaatggtgatagagcactcttcccgaggtgagagggcatacgacatcttctcgcgccttctgaaggagcgcattatctgcatcaacggacccatctccgacgacactgcccacgtcgtcgttgcgcagttcctcttcctcgaatccgaaaatccttccaaacccatcaacatg

SEQ ID NO: 50893 - DNA, 262 bp, Glycine max
  unsure (1)..(262): unsure at all n locations; Clone ID: 701139218H1
agtgtgcgcaggagtatggaagaagaagtgtggtggcaatgatatgataggcgcagagcagagagagagagaaggcaaaggcatttggatccgacgacctcgttggtnttcctttgnaantngtaancntttggcaccagcaagccctgtcttcttcttcgatcagattagggcatttcatttctgcgatggccgcagcacccgctagagctcgtgccgattacgattacctcatcaagcttcttcttatcggcgacagggt

SEQ ID NO: 50894 - DNA, 261 bp, Glycine max
  unsure (1)..(261): unsure at all n locations; Clone ID: 701139219H1
aactacgcacgcactcattcttgagaaagctcaatattcattcgtccatggcactnctcttctcgtctcttttccaaatccaaattgatctatggctgtcaaatacttctgcaaaaggagcatgctattccagttcgtcactttgctaaagagtctgcccctcctgcccttaagggagatcagatgctgaagaacatttttgtggaggtgaagaacaaatttgagactgccataggaatattaaagaaggagaagatcacc

SEQ ID NO: 50895 - DNA, 258 bp, Glycine max
  unsure (1)..(258): unsure at all n locations; Clone ID: 701139220H1
cattagtatctttcaactgttgctctgcttctgcacacagagaatggngtgggtggggaaacagagatgatctatctgtgttcacagcaccactgtttccctgcctcacccttatgtacaagaacaagaataagcacacacacccgccacaacgctatagtcatcacttcgaagaacttcacaattttgttttcttggatatggggagtcttgctcttgaaaccgaggatgtaatctcagatatatacctttcgctgg

SEQ ID NO: 50896 - DNA, 255 bp, Glycine max
  unsure (1)..(255): unsure at all n locations; Clone ID: 701139221H1
ggggggcaaaaggggtcacttttcagatccgagattgagctcctttacccatcatcatcatggagctcctcgggtacctgaatcagggtcacccttctagaggaacaacacttgttattactctttcagcggtgctttcgacacttgtgtccttctccactttcacacatgccttctcncttctgcgtttccggaactgaatcctataaaacctaggcactcacgtcttctcaggagtgccgtgcaacatgaaac

SEQ ID NO: 50897 - DNA, 257 bp, Glycine max
  Clone ID: 701139222H1
aagaatcccaggcgaggagaaagatggaggggaaggagcaggatgtgtcgttgggagcgaacaagttccccgagagacagccgattgggacggcggcgcagagccaagacgacggcaaggactaccaggagccggcgccggcgccgctggttgacccgacggagtttacgtcatggtcgttttacagagcagggatagcagagtttgtggccacttttctgtttctctacatcaccgtcttaaccgttatgggagtt

SEQ ID NO: 50898 - DNA, 260 bp, Glycine max
  unsure (1)..(260): unsure at all n locations; Clone ID: 701139224H1
attcgctgggcagctacagctatgatcatcaacagcaccccttttcctctatgatcgattcgattccgtagagtgagaaatcagatcncaataatcatcgatgggtaatttgttcgtgaagaagcccaaggtaacagacgtcgataaagcaattctcgctctcaagacccagagacgcaaactcgcccaatatcaacagaagctagatgctgttattgaagcagaaaagcaagctgcacgagacttgattcgtgaaaaga

SEQ ID NO: 50899 - DNA, 255 bp, Glycine max
  unsure (1)..(255): unsure at all n locations; Clone ID: 701139225H1
ctctgcgtcgatggcttcgaattcgatcgacggcgacgcgtnancggggtcgggactgtgcataaacgacgtgttaagggacgacgagctgcnntccatnctggggcgagtggagagcgagaaggacaaggaaacgttcgggttggtctgcaagcgatggcttcggttgcagagcacggaaaggaagaaactcgccgcacgtgcgggtccccacatgctccgaaaaatggccgatagttcacacgcttagtcgaa

SEQ ID NO: 50900 - DNA, 257 bp, Glycine max
  unsure (1)..(257): unsure at all n locations; Clone ID: 701139226H1
gtttatcgtgaggagaatatgaagttgtttgttttctttgttgctgcagtagttttggtagcatggccatgccatggcgcaggctaccaaaggttccctctccgaatgaaaactggctatggtgagcgttcttcggaggtaaaatgcgcaagttttaggcttgctgtggaagcacacaacatccgagcncttacnnaccattcctgaagagtgcgttgaaccaacaaaggactacattaatggcgancaatttagat

SEQ ID NO: 50901 - DNA, 260 bp, Glycine max
  unsure (1)..(260): unsure at all n locations; Clone ID: 701139227H1
cctagcgcacgatagccctccatcacccatgcttggagtactctgcgccactccgctccaaaccttggctcttctccctncgtccacgcctcccttcctcgcctatcccatgcccctctctcaccttccgcctcgccgccgccccgtcgccgccattccaccgcctgcaaactctttctctccgctggcggcgccgcctgccatatggcacgccatcatgccccgagtgaatgacgacgacggattccgacgcggcgttg

SEQ ID NO: 50902 - DNA, 255 bp, Glycine max
  Clone ID: 701139228H1
actcactctcttcgcagcggcactctcggtggctttcatcttctcggggtgagttgtcaagatgtacacatcgaggaagaaaattcacaaggataaggatgctgagccaactgaatttgaggaatcagttggacaggcattgtttgatctagaaaataccaacaatgagctgaaaagtgatctgaaagatttatacataaactcagctgtccaaattgatgtttctggcaaccgaaaggctgtggttatccatgt

SEQ ID NO: 50903 - DNA, 253 bp, Glycine max
  unsure (1)..(253): unsure at all n locations; Clone ID: 701139229H1
catccctcttgatttgaaggttgttttgtgcttatagataaaagttctgccaaatcaagaggggttttcagatcatannnnnnnnnnnnnnnnnntaaacaatggctaagttctttgctgctatgatcttggcactcattgccatttccatgcttcaaacagtggttatggctgctaatgagcaaggaggccacttgtatgacaacaagagcaaatatggaagtgggagtgtcaagagataccaatgcccatc

SEQ ID NO: 50904 - DNA, 255 bp, Glycine max
  Clone ID: 701139230H1
ggcctgctcttgctttgcttcctcttctatttgctttcttgttagctgccactacggaatcaagaaaagatccaggggaatattggaaaatgatcatgaaagatcaggaaatgccagaaggacttcaaggtcttgtttcatttcaatctgaaaataaccctaagactcaagagcagcttggtaaaggttccaaaaaccattgtgaagagtctctagttacaaatacacaagttaacagtgacttcgaacccatac

SEQ ID NO: 50905 - DNA, 85 bp, Glycine max
  unsure (1)..(85): unsure at all n locations; Clone ID: 701139231H1
caaatctcctctttgcatatcttcantgaaancctgagtgtcaccaacttccatctttcagtttcatctntcacacancananng

SEQ ID NO: 50906 - DNA, 258 bp, Glycine max
  Clone ID: 701139232H1
attcgctggcagctacagctatgatcatcaacagcaccccttttcctctatgatcgattcgattccgtagagtgagaaatcagatcagaataatcatcgatgggtaatttgttcgtgaagaagcccaaggtaacagacgtcgataaagcaattctcgctctcaagacccagagacgcaaactcgcccaatatcaacagaagctagatgctgttattgaagcagaaaagcaagctgcacgagacttgattcgtgaaaag

SEQ ID NO: 50907 - DNA, 266 bp, Glycine max
  unsure (1)..(266): unsure at all n locations; Clone ID: 701139233H1
gccagtatcaggaagcttgtcacagtcaacccccaaaccaccagagaaggtggcggggggaaaatgaagctgaacaacacagactaatgctttcttgtcagaaattagagggaagcatttgaactattcaaagttttggaatgctaatccctctgcagaaaagcaggtcaagttgtctagcaaagctggcatgcttttgctgtacactcctgcttttcttgctggccttgcatcctncngggtctttcctcntcangggncatatt

SEQ ID NO: 50908 - DNA, 258 bp, Glycine max
  unsure (1)..(258): unsure at all n locations; Clone ID: 701139235H1
attagataccatgatggccatctcaaatccctgcttcattgattgcaagtnagtcattctttgattccgcaacgccatttctcncagccgcaaganggcaccttttgatctttttgacactaagaagaagcctaacaacatcaaactgtatgtccgccgtgttttcatcatggacaactgtgaggagttgatgccagaatatctagctttgttaagggtattgtggattctgaggatcttcctctcaacatttctaga

SEQ ID NO: 50909 - DNA, 256 bp, Glycine max
  unsure (1)..(256): unsure at all n locations; Clone ID: 701139236H1
tctccctcttcgctctctctcagtgaccagagacagatgatgatggagatggcgaacgaaaacgctgtcgtngcggcactcgcggcgttggtgctactcgcggcgagtgtggcggtggatgctcaggagaactcggacgtgaagacgctggtgaagtacaagcacgggaagaagtactgcgacaaaggatgggaatgtaagggctggttcaatttactgttgtaacctcaccattaccgattatttccagacctac

SEQ ID NO: 50910 - DNA, 236 bp, Glycine max
  unsure (1)..(236): unsure at all n locations; Clone ID: 701139237H1
cagggaagtgttcatgatgcatacatgatgctgtgcttantgtagactttagcagagattcagaaatgcttgcatctgggtctcaagatggaaagattaaagtctgagngtattaggactggtcagtgcttacggcgtcttgaacgtgctcattctcaaggtgtcacaagtgtttccttctcccgtgatggaagccagttannaagcacttcatttgacagcacagcaagaattca

SEQ ID NO: 50911 - DNA, 254 bp, Glycine max
  Clone ID: 701139238H1
ttgacaccttgccttgccaattaccaaggttgggcaatgtttgtggattgtgatttcctctacttggctgacatcaaggaattgaaaaacttgattgaggacaagtatgcaatcatgtgtgttcagcatgactatgctccaaaggagaccactaagatggatggggcagtgcaaactgtgtacccaagaaagaattggtcttcaatggttctctataactgtgctcatccaaagaaccgtgttctcactcctga

SEQ ID NO: 50912 - DNA, 91 bp, Glycine max
  unsure (1)..(91): unsure at all n locations; Clone ID: 701139240H1
gctgggtttacctggcctacccaggcttgatatgangtcatcatatcaagctgggtaggcaggtaaaacccagggatctaagtanaggtac

SEQ ID NO: 50913 - DNA, 258 bp, Glycine max
  unsure (1)..(258): unsure at all n locations; Clone ID: 701139241H1
cttttcctttctcttctcacttctcacacaccacatatcanacantcttgnntcttgtcccctcaaaatcaaaatccaatggaaggatcaggatccggtgtggtnacagtgnacggnaacggtgnaatcaccgagaccaagaantcccccttctccgttaaagtgggcctggnccagatgctccgnggcggntcatnatggangtngtcaacgcggaacaggcccgcatcgagtangaggccggtgcctgcnaggtca

SEQ ID NO: 50914 - DNA, 245 bp, Glycine max
  unsure (1)..(245): unsure at all n locations; Clone ID: 701139242H1
gncgtcaatccctccttaagcagacttctccgtgttgctcttgaggagatcacactcaagtttatcgatacctcttcaaagtttgggcatggtcgcttccagaccacacaggagaagcagaagttctttggacgcctcaaagcataattatgttaattggatggaaatgctggaattctatttggttgccatcacttatnaacttgtagtgtttctgttttgatattatggattctcgggtagtg

SEQ ID NO: 50915 - DNA, 252 bp, Glycine max
  Clone ID: 701139243H1
gccttcgatccttttgctgatgcaaatgctgatgactcgggtgctgggtcaaaggagtatgtgcatattcgcgttcagcagcgaaatggtaggaaaagcctgacaaccgttcagggattgaaaaaagaattcagctataacaagatacttaaagacgttaagaaagagttctgttgcaatggaacagttgttcaggacccagaactaggacaggttattcaacttcaaggtgatcagaggaagaatgtttct

SEQ ID NO: 50916 - DNA, 245 bp, Glycine max
  unsure (1)..(245): unsure at all n locations; Clone ID: 701139244H1
aaattttctctctttcacttatttattgactccccaaaagcttttcaaatatctctgttcctctctcacgtaccttctccctatctttcactccacttcttaacaccacaaaacagaacaanacgccgagcnaacaacaagaaaaatggtgttgttgtccaaagcaacaacagaacaatactcctacattaagaactgcatgccaaccaaattttcctcaacaattcccatagtgaacctctcca

SEQ ID NO: 50917 - DNA, 161 bp, Glycine max
  unsure (1)..(161): unsure at all n locations; Clone ID: 701139245H1
cttggggnctgaatcgaatcgaatcgaagcgattcatcgatcgatcgatggctcttgtaggagttgaactgaagcatgcggcgganggcgtaccggaggcgaattgctccgccaagcccaccaagcagggcgagggcctccgccactactattccanaaaa

SEQ ID NO: 50918 - DNA, 252 bp, Glycine max
  Clone ID: 701139246H1
accttgacgaggccaattccattcattttgatgtgtctctgttttcaacaaacgttcacaacaacacatttcgccgtttcaaatcactacttaacaccggggcacatagagagagagagacatcatggtctcttctaatggactagctacgagtcagccacttttttcttttggattgatttctgatgtccaatatgctgacattcctgatggccgttcattccttggtgttccacggtattatagacacag

SEQ ID NO: 50919 - DNA, 253 bp, Glycine max
  Clone ID: 701139247H1
ctcttaataaactccaccaccactctacccgtgttctccaacgttattaacaacccaaacgttataactccaccaccatcttcctctaattttattcaacaacaacccatgacaccccatcttgaacccaacttggagaagaggaattctgtggcggctatgagggagatgattttccgcgtagagtgatgcaacctattcatatagaccctgaatccatcaagccaccgaagagaaggaacgtgaagatttc

SEQ ID NO: 50920 - DNA, 255 bp, Glycine max
  unsure (1)..(255): unsure at all n locations; Clone ID: 701139248H1
cgatatcggtgtaactattcgttgtcgtttccccttgggtcggattccgatctacaggtcgatggtgctcttcctaggatacgtattncgaagcgcggtgtcactgatctacctaccgtacagagttgtgatgatcgtgtctgagttgcttttaaggtttctttcaaaaaatcgttcgatcaataatcggagattgcagcgcagatctagagaagaaagcggagtcacgtttcttcgcattccaatgtcggtggt

SEQ ID NO: 50921 - DNA, 266 bp, Glycine max
  Clone ID: 701139249H1
gacgaaccttctcaatcgactctcggaatccttcaaattcgtccacgaagtgggaacctaacagttgaaagaatcatggaaggaggacatttttctgctcatacaagaactgattagctcatggaaaaaaatttggtcctatgtatctaaaacttaggtgtgtatgtgcgattctagtgttgacccataaggggataataaaaacccttttaggctaacactttataagaagactatggtctccaatataccaatccaccaaaagc

SEQ ID NO: 50922 - DNA, 248 bp, Glycine max
  Clone ID: 701139250H1
gaaaaactctgtaaacatgttggtttaccaggacctccttacaggtgatgagctctctctgactccttccgttacaaggaaattgagaatggaatgctgtgggaagttgaggggaagtgggttgttaaaggagcagttgatgtagacattggtgcaaacccttctgctgagggtggaggagaagatgagggagttgatgatgcagctgttaaggttgttgacattgttgacacattcagacttcagga

SEQ ID NO: 50923 - DNA, 257 bp, Glycine max
  unsure (1)..(257): unsure at all n locations; Clone ID: 701139251H1
aaaatggccaaagacccagttcgcgttctcgtcactggagctgcagggcaaattgggtatgctncttgtccctatgattgctaggggagtgatgttgggtcctgaccagcccgtgatcctccacatgcttgacattcctccggcagcagagtcnttgaatggggttaaaatggaattggtggatgctgcattccctcttcttaaaggtgttgttgccacaactgatgtggttgaggcatgcactggggtcaatattg

SEQ ID NO: 50924 - DNA, 254 bp, Glycine max
  unsure (1)..(254): unsure at all n locations; Clone ID: 701139252H1
cgctaccttttcccgtgtacgancgantccaatccaccaaatcggcggcgacgctnccgctctgtctcgaaaccacagatctgcngcggaaccgcgtctccgactatctccgattgatcttccggtaaagtggaccggagatgccggttgccgcttccgccatttacttcctcaacctccgcggcgacgttctcatcaaccgcctctatcgcgacgatgtcgggggaaatatggtggatgcttttaggacgcat

SEQ ID NO: 50925 - DNA, 255 bp, Glycine max
  unsure (1)..(255): unsure at all n locations; Clone ID: 701139253H1
ctccgagtggttgacaccgatcgaagtagcagcacacagaaaatgggcactcgagaggtgtacgaagagaaactaaggaccggaaatctccaccacgatcccaccatcaaccctggcctcggttccgctcgatgccctcgctgtctctctctcctcaaccctaatttcgnnnnnnnnnnnnnnnnnnnnnnnnnnntcgcaacgtatttgtgtgttactgcaaataagctgttcgatgaattgactcaacgaaat

SEQ ID NO: 50926 - DNA, 254 bp, Glycine max
  Clone ID: 701139254H1
gttgactcttgataatggcacaacctgcacatcatggaactattctggcaccaggctcgctgcgggttccgccgatggcactctttcaatcttcgattcccgcgagccgccttcttcttcctccctccgttctactttcaaatctagggttctagaaggaaacatcgtgaagattgtttggattccgccagaatatggtgatgcagttgcgtgcatttctgccgatggaattgtgtcattgtgggaggaggtcg

SEQ ID NO: 50927 - DNA, 254 bp, Glycine max
  Clone ID: 701139255H1
ctcccctacacaaaacatggctttgcccaatcagcaaaccgtcgattaccccagcttcaagcttgtcatcgtcggcgacggtggcacaggaaagacaaccttcgtgaagaggcatctcactggtgaattcgagaagaaatatgaaccgaccattggtgtggaggttcatccgttggattttttcacgaactgtggaaagattcgcttctattgttgggatactgctgggcaagagaagtttggtggcctcagag

SEQ ID NO: 50928 - DNA, 254 bp, Glycine max
  Clone ID: 701139256H1
ggaaatttaagtgaagagagaatgatgatgaagtctgctatgtgtgcattggtgcttgtggcactggttgtggttgaagtggggcccatggctgaggctgcggtgacttgcaacccaacacagttgactccttgtcttccggcaattaattcaggttctgcaccttcgagtgcttgttgccagaagctgaaggagcaaaagccatgcttctgtggctacctcaaaaaccctagcttgaagcagtatgttaactc

SEQ ID NO: 50929 - DNA, 256 bp, Glycine max
  unsure (1)..(256): unsure at all n locations; Clone ID: 701139257H1
cttccctttctcacttaccactctcccccttcnttnccaaaaacactccctttccctttctattcacttcccctacccttccgtgatgatgtagatagagaataaaaagagaccagtgtgcagtgagaaagagattgctcacttcttgtgtgggtttgttttgttctttgtgttggaatttgttcatgggtgaagaaggagnagaggtgtcaagagagaaggaacaatacatgggagttatggaaatgagtggttg

SEQ ID NO: 50930 - DNA, 253 bp, Glycine max
  unsure (1)..(253): unsure at all n locations; Clone ID: 701139258H1
gttttttgcacagaagaattaacacgtatntagcaagcatggcagtcacactctacgaccttagctctgcctctgggttgaagaagcttgatgagtaccttctcccacgcagctacatcaccgggtaccaagctacaaaggatgatcttactgtttatgcagctttgccaactgctccatcagatgcatatggaaatgtttccaggtggtacaagcacattgatgcttgttgagaatctctggtgtttctggc

SEQ ID NO: 50931 - DNA, 252 bp, Glycine max
  Clone ID: 701139259H1
ctcacattgctgtgaagttttctgaaatcttgaccaagattgacaggcgatctggtaaggagcttgagaaggagcccaaatttttgaagaatggtgatgctggtatggttaagatggttccaaccaagcccatggtggttgaaactttctctgagtatcctccccttggtcgttttgctgtgagggacatgcgtcagaccgtagctgttggagtcatcaagagtgttgagaagaaagaccccaccggagcca

SEQ ID NO: 50932 - DNA, 251 bp, Glycine max
  Clone ID: 701139261H1
atcagcttaaaccaacctttcttgtaaactttattgattttgagaattaaagagggtatagacatggctagagcaattgcagtttctttcttggttctgcttctggctttccccactgtatttggagctgaccatgaagttggtgacactggtggatgggccctaggggttaattacaacacctgggcctctgggaaaactttcagaattggtgacaatttggttttcaagtatgactctacccatcaagt

SEQ ID NO: 50933 - DNA, 252 bp, Glycine max
  unsure (1)..(252): unsure at all n locations; Clone ID: 701139262H1
ggtcgcaacaaacacggccgtggccacgtcaagttcattcgatgctccaactgcggcaaatgctgtcctaaggacaaggctatcaagaggtttctggtgaggaacattgttgaacaggctgcagtcagagatgttcaggaggcttgtgtctatgaacaatacacgcttccgaagctttatgtgaagatgcagtattntgtttcctgtgctatccactctcatgttgtgagggttcgatcccgcactgatagg

SEQ ID NO: 50934 - DNA, 264 bp, Glycine max
  Clone ID: 701139265H1
cacacacattgttccattattctctttctcttttttctgtctaagacccacaatggctctttcaaactccgaagatctttcacttcatcctctcttctttcagctaccctttgcaacacaaaaggtaggaagtagatattgactgcttcctgggttcacatacaatgaaatcaggtttaaaaaatggttggcctctgttgtgcgtcttcgtctccgagacaaatcagtgacacccttttgcatattctctaaagtgaaatcagc

SEQ ID NO: 50935 - DNA, 257 bp, Glycine max
  unsure (1)..(257): unsure at all n locations; Clone ID: 701139266H1
actcgtgatcaaagaaagacgaagaggaccattcttctgctggtgctagggggaaagaaccaaccaacgtcagtggagaaatattttgcttttacaatttttctcattcaggtgctatttattcaatgatatgttttgaatatgtttgatgttggatgtgtataactgaatgttaaatgctagtgccaattgccaaatgttaaggacaaaatcttatgacctatttcacttattctagttccatatatattncngcc

SEQ ID NO: 50936 - DNA, 256 bp, Glycine max
  Clone ID: 701139267H1
gggatcatcacgagattgcaaaatgaagttcaacattgcaaatcccaccactgggtgccagaagaagctggaaatcgatgacgacctgaagcttcgggcattttgggacaagaggatctcccaggaggtccttggtgacgccctgggtgaggagtttaaaggatatgttttcaaaatcactggtgggtgtgacaaacaaggattcccaatgaagcagggagtgttgacccctggtcgtgttcgactcttgctccat

SEQ ID NO: 50937 - DNA, 252 bp, Glycine max
  unsure (1)..(252): unsure at all n locations; Clone ID: 701139270H1
tttgaaggcaatgatgtgcgaagaagctganaatcagcaggtaaaggttgagacttgataattgaagtcctaatggccgtnnctctanagctacgctgctactattttaacgtttcaagagggttgcacttgcatgtgattgggcgtgcaagtagtaatgtnntgncctctnaggcattgcatcaaacagtttcaatacactctcagncncaggcgccattcaacttcaacntcaatttggatgacccaact

SEQ ID NO: 50938 - DNA, 253 bp, Glycine max
  Clone ID: 701139271H1
cacaaactcaacagatcgaaaatccataatgttgttgcgtaagaacaataaaaatctcccatttgtgttttcttctcttcacgcacaccaacaaaacctctctctcatcggaatctccaaaaagaatggacaacaaaacgcagcagtccgagagtaagcaaaacgacaacgacgaggaagttgcgccaaaacgacaagaccctaacccgtcgtctggcgggtggggcttttcaccgctctcgtttctctccga

SEQ ID NO: 50939 - DNA, 84 bp, Glycine max
  unsure (1)..(84): unsure at all n locations; Clone ID: 701139272H1
gcagactannagatgtttatagtatttcagtgttgcctgaggaagatgaaaatggcaaattgcgcttcaacacnacatntngnt

SEQ ID NO: 50940 - DNA, 254 bp, Glycine max
  unsure (1)..(254): unsure at all n locations; Clone ID: 701139273H1
gcgaaatcggagcttaagagatctgccgtagcggatantctctctggagagagccanctaagtgatgttcgaacaagctctggaatgttcatttccaagaacaaggatcctattgttgctggtattgaggacaagatttcgtcatggacctttcttccaaaagaaaatggggaagatatacaagtattgagatatgagcatggccagaaatatgacccgcattatgattacttcactgataaagttaacattgc

SEQ ID NO: 50941 - DNA, 254 bp, Glycine max
  Clone ID: 701139274H1
ctctctatcaccgcaatggagactccttcatccacagcaagaagaatcacaagatcccaaaccgcctccaacaacatccccgtttcaagaaagaagaacgaggagtgctcaggaaaaaagagcgtttcgaaaacgcggcagagaagcagcgtgcaacaacagcaggataatcggtgtgcgctggtggacatatcgaacgattcgccgatcgtggggctggcgaacggtaaggacatgatcgagacgccgttgtc

SEQ ID NO: 50942 - DNA, 252 bp, Glycine max
  unsure (1)..(252): unsure at all n locations; Clone ID: 701139275H1
caaatcccaactactactcacactcactgcagatctcaatccatgngctaccattgttagcatcaaggcccgccagatctttgacagtcgtggcaatccaaccgtcgaggtggatttgacatgctccgatggtacttttgctagagctgctgttccaagtggtgcatccactgggatttatgaggcccttgaattgagagatggaggatctgactaccttggaaagggtgtatcaaaggctgttgacaatgt

SEQ ID NO: 50943 - DNA, 252 bp, Glycine max
  Clone ID: 701139276H1
actcaacacaacgaaccaaaccaacaatgtcgcagccgcagcctcagtccgcagccgcaacacgggcaagcggcgctggagcaggtgcagtgcttcggtcgcaagaagacggcggtggccgtgacctactgcaagcgcgggcgcggcctcatcaagatcaacggctgccccatcgagctcgtcgagccggagatcctccgctttaaggccttcgagcccatcctcctgttgggaaagagccgcttcgccggc

SEQ ID NO: 50944 - DNA, 252 bp, Glycine max
  unsure (1)..(252): unsure at all n locations; Clone ID: 701139277H1
gcacaaagngggttactgtctgttcaagctaccatctctctctctgctttgcttagtgcctccttgccagaagttaaaatggcccaagaaactttcctattcacatctgaatcagtgaacgaggggcaccctgacaagctctgtgaccagatctccgatgctgtgctcnngccatgcttggagcaggaccctgacagcaaggttgcntgtgaaacctgcaccaagaccaacatggtgatggttttcggagag

SEQ ID NO: 50945 - DNA, 249 bp, Glycine max
  unsure (1)..(249): unsure at all n locations; Clone ID: 701139278H1
ataatttcttctgctactttagagaccttgctgcaaaggttctctcttagcatggtaacaatgggtttganagcactttttgtttggtgcataatatggttggcgtttgcacagttgtcactaggaggangagtgagncattacaagtttgatgtggagtacatgatcaganagccagattgcttggaacacgtngtgatgggaatcaacggccagtttccaggcccaactattagggctgangttggt

SEQ ID NO: 50946 - DNA, 252 bp, Glycine max
  Clone ID: 701139280H1
gtgaatgctgatgataatagattctcctgaacttgaagtacattgttgtcgtgctgctgatccaacgtttgcagaggtttctgttgtgttcacagttcacacacaaatggaactgaaactacttctaataacggttttaatgatggtgtcactttctgcaactgcagcagctgattacattcgacctcagcctcgaaaaaccttccatctcccatggcattctaaaccctcctcttaccctcaacaggtaca

SEQ ID NO: 50947 - DNA, 261 bp, Glycine max
  unsure (1)..(261): unsure at all n locations; Clone ID: 701139281H1
ggncacttgtatgacaancagagcaaatatggaagtngaagtgtcaagagttaccaatgcccatcacaatgctcgaggagatgtagccagacccaataccacaagccctgcatgtttttctgtcagaagtgctgcaggacatgcctgtgtgtgcccccggggtattatggtaataaagctgtgtgcccttgctacaacaactggaagaccaaggaaggaggacccaagtgcccttgagcttcaacttgttcaacttcaatt

SEQ ID NO: 50948 - DNA, 259 bp, Glycine max
  unsure (1)..(259): unsure at all n locations; Clone ID: 701139282H1
cacaaatcaatccgagttagaaacaagtaagaaggattccacttatgacagaatanctgaagtcaaagcctttgatgaaacaaaacttggtgtgaaaggcctcttcgattctgggatcacaaagataccacgcatgttccatcatgccaaggtggaggaccacactgaaaccatgccaaatgactcaaacttcagtgtccccattcatagatctccaagatatagacacaaactcatcccttcgtgtgaaagcacttga

SEQ ID NO: 50949 - DNA, 253 bp, Glycine max
  Clone ID: 701139283H1
gttttttctggtgttagtgttagctctatgtatccatgcttcctctgtgtggattttcattttatcttctcctccttaattttccaacaaaatctcaaacataaataaattaaaaaataacatttttatttacaattaataaagatatcgggattcatcttgttcttattttgccccctttttcttctggtctcccgaatcagaaaccctaatcagtgtttgggattcagataaagaaatttaaacagatgaa

SEQ ID NO: 50950 - DNA, 254 bp, Glycine max
  Clone ID: 701139284H1
gcatattgtgccctccctctttctagctatttccctctcttaacacaattaacaaagatatatccatatcatatcaactccaaatgatgaaaaatattgggttgtttcttcttgtggtggtggctacttttgtggtggcagccacagctggtagcttttaccaagactttgaaataacatggggtggtgagcgtgccaaaatctatgaaaatggaaatcttctcaccctctccctagacagagcctctggctct

SEQ ID NO: 50951 - DNA, 251 bp, Glycine max
  Clone ID: 701139286H1
tctgctctttgccttctctgacacatttggtgccttgtagagcgtgttttggcaggaaggtggtatggcgaaggacgttgaggttgctgagcgtggctccttctctgggaaggactaccaggaccctccaccagcaccactcattgatgctgaggagctcacaaagtggtccttttacagggctctcattgctgaattcattgccactttgctcttcctctacattactgtgctcacagtcatagggtaca

SEQ ID NO: 50952 - DNA, 252 bp, Glycine max
  Clone ID: 701139287H1
gtttaacctttctggctgtgttaatatgcgtttcagcactgtcactgagtccttctgttgcgggggaagggcaaaataatggccttgttatgaacttctacaaggaatcatgccctcaggctgaagacatcatcacagaacaagtcaagcttctctacaagcgccacaagaacactgctttctcctggctcaggaacatcttccatgactgtgctgttcagagttgtgatgcttcactgttgctggactcca

SEQ ID NO: 50953 - DNA, 254 bp, Glycine max
  unsure (1)..(254): unsure at all n locations; Clone ID: 701139288H1
caattccattcagatcacagtcccttcaattcctgctgcagcatactgtgtgcaacaaagccctaaaatggaggggactgtcttcactcctgcactgcaagaaattgagcatgtaaagtctgatcaaggagaaattctgagcaagcctttcttggatgcgtgcaagcacatattgcctgtaatagataagtttggngctgctatggcccttgttaaatctgacataggtggtaacatatcgagattggaaacta

SEQ ID NO: 50954 - DNA, 253 bp, Glycine max
  Clone ID: 701139289H1
catatctttacttcccaaaacttgctctacaatgagtttccttcgttcttttgcaagaaacaaggatatatcaaaagtaggacgcagaggtatccattgcatgcagaaactatgtgcagaaaaaatatctcctgattcactagagaaggcccaaaatcgtgtgatagatgctgcactcacacttgttcgagaaaatacaaggcttaagaaagaactcgtgcatagtttgggaggtgctgtggcaacttcaact

SEQ ID NO: 50955 - DNA, 231 bp, Glycine max
  unsure (1)..(231): unsure at all n locations; Clone ID: 701139291H1
gcgaaagcggcagagaagatggacnggagaagagggttnncagcagccacagttggtgctcgcggacaagctattccttctccggcaacccgatgtgcaagacattgacaaggttcgctacaaagaggatgtcttcactcatgtcaaggaaaacgatatggtccctctgtacgaaaccctagtcgctgattccgtgttggacttggatcgtgcccttttggactctatgcg

SEQ ID NO: 50956 - DNA, 243 bp, Glycine max
  unsure (1)..(243): unsure at all n locations; Clone ID: 701139293H1
gnaccccaatatacttagccatatctttacttcccaaaacttgctctacaatgagtttccttcgttcttttgcaagaaacaaggatatatcaaaagtaggacgcagaggtatccattgcatgcagaaactatgtgcagaaaaaatatctcctgattcactagagaaggcccaaaatcgtgtgatagatgctgcactcacacttgttcgagaaaatacaaggcttaaganagaactcgtgcata

SEQ ID NO: 50957 - DNA, 253 bp, Glycine max
  unsure (1)..(253): unsure at all n locations; Clone ID: 701139294H1
tcattctccaacttgataccgcgttcgctcactctctactcaacttcaattaatcaaatccctcactttctctctcttgtcttcaaatctcaattctattttggaaaatcagaatcaaagacagttaaaaatacagaacaaacatctcactcaacatcaacacttcagatctacgtttccactctcacaacaaccnaaaaggaaagaaaaaccgattctacagcgacaacaaggaacgaaagaacgatcgatt

SEQ ID NO: 50958 - DNA, 251 bp, Glycine max
  unsure (1)..(251): unsure at all n locations; Clone ID: 701139295H1
acgtggtgttgttactgctnctcttntctcttttcttttctctttagttctctcttcccctttctttntctttttncttcttcttctgagcttgtttaagcttttcttccattaacatattatcataatgtgtggtattcttgctgttcttggttgttctgatgactctcgagccaaaanggtccgcgtgcttgagctctctcgcagattgaagcaccgtggccctgactggagtgggctccatcaacatg

SEQ ID NO: 50959 - DNA, 244 bp, Glycine max
  Clone ID: 701139296H1
cctttcccaagatagtagaagatggcagacactgaggatattcaacctcttgtactgtgacaatggaacaggaatggttaaggctggatttgctggagatgatgccccacgtgctgtgtttcccagcattgtaggtcgtcctcgtcacactggtgtgatggttggcatgggccaaaaagatgcatatgttggtgatgaggcacaatctaagaggggtattttgactctcaagtaccccattgaa

SEQ ID NO: 50960 - DNA, 272 bp, Glycine max
  Clone ID: 701139301H1
tttaactgccttgtcaccccctccattgacagaatccagtaaccaacctgaggctgagccagaatttgaaagtcatgcagagaaatttgactggtactctcagtggtaccctttgatgccaatttgtgaccttgacaagaggaagccacatgggaagagggtgttgggaattgatgtggttgtgtggtgggataggaatgagggtgcttggcaggttcatgatgatgcttgtcctcatagattagcacccttgtctgatggaaggattgatc

SEQ ID NO: 50961 - DNA, 249 bp, Glycine max
  unsure (1)..(249): unsure at all n locations; Clone ID: 701139303H1
gttgttgcagttaaaaagctcncngcttgcaaagaatancaatgccacgtaccacgnntncagagatttaaaggaacatctaaggaggctgcagcaacagtctgattcacggcgtagagctgctgtgatggaaatgatgaggcagagagccgcagaagttgctaacaatgctggatgagcaatttatacttgtaaatatgtggcactttgaagaaatgttctagacagaggtataccttagtttcacct

SEQ ID NO: 50962 - DNA, 232 bp, Glycine max
  unsure (1)..(232): unsure at all n locations; Clone ID: 701139304H1
tctcatttttctcaatacaattttnttctttctttctcaagttttgctacttttctcttcttaaccatagttcacatattatatcatcacatatcatagtgatatcatatcacaatgtgtggcatacttgctgtgcttggttgctctgattcatctcaagccaaaagggtccgcgtccttgagctttctcgcagattgaagcaccgtggtcctgactggagtgggctccacc

SEQ ID NO: 50963 - DNA, 260 bp, Glycine max
  unsure (1)..(260): unsure at all n locations; Clone ID: 701139306H1
antctctcctgcaggccgcccggaaagctcctgttgctgcacggggttttcgaattcaatgtaacaagtgggctgtgatagtgcgtttacngttgggagaaatacctgagcggactgtcttcatgcagaaaggaatggagaaagctctaaggccttactttgagcttacaaatgctgtgcggattggagacttggaactgtttaggaatattgcggacaagtttgccactacctttaatgcagacagaacccataatttg

SEQ ID NO: 50964 - DNA, 264 bp, Glycine max
  unsure (1)..(264): unsure at all n locations; Clone ID: 701139307H1
aagaaatggcgagtagcagcagcaacactccgaaggaaagcgttgttgtcgactgcggaaggcgtcgaacctcttgcggctattgcagatcctctcgtcacaatagcatctctcatggcatgngggcacatagccttactgtggatgactaccaagatcttcttgatcgtggctggagaaggtctggatgttttctttataaaccagagatggaaaggacatgctgcccttcttatacaattcgcttgaaagcaagtgactttg

SEQ ID NO: 50965 - DNA, 264 bp, Glycine max
  Clone ID: 701139308H1
ttttctgtgaccccacaaatatctcattcccgttgtgcgtttctaaccgaactcacccctttcctccgatcaccggttaaatggttccggccaccggtgaccggcatcaccagcactttgattccgccgagccctaaccctaaccaaccaaccaagtactcttttcagattcatggatcctcctgattctcactcgcagtcccaggaacaggaagcgcccaagaagaacgacgtcgtttttctcatactgcgatgggttctcgc

SEQ ID NO: 50966 - DNA, 266 bp, Glycine max
  unsure (1)..(266): unsure at all n locations; Clone ID: 701139309H1
cnccgtactccgaaagggaatcgggttaaaattcctgaacccgggacgtggcggctgacggcaacgtttagggagttccggagacgtcggcgggggccccggaaagagttatcctttcngnttaacagcctgcccaccctggaaacggcncagccgaggtagggnccagcggctggaagagcaccgcacgtcgcgtggtgtccggtgcgcccccggcggcccttgaaaatccggaggaccgagtgcctcccacgcccggtcgtact

SEQ ID NO: 50967 - DNA, 263 bp, Glycine max
  unsure (1)..(263): unsure at all n locations; Clone ID: 701139310H1
tggacttatccttcttaatcccactttcttctctttcacttccatgcgaagagatcttcncctgattcgaaaaggaaggaacttgagacttgtttctctcngagatggcgttgcctaaggntgatttcgaggttggaactgatggggttgctgtcatcactatgtgcaacccaaccgtcaatgctttggccattccaattatcatggggttgaagaacagatttgatgaggcagctaggaggaatgatgtgaaagctatagtt

SEQ ID NO: 50968 - DNA, 262 bp, Glycine max
  Clone ID: 701139311H1
ctcaaacatggcagatgaggtggttctgctagatttctggccaagtccatttgggatgagggtcaggattgcacttgctgaaaagggtatcaaatatgagtacaaagaagaggacttgaggaacaagagtcctcttctcctccaaatgaacccggttcacaagaagattccggttctcatccacaatggcaaacccatttgtgaatccctcattgctgttcagtacattgaggaggtttggaatgacagaaatcccttgttg

SEQ ID NO: 50969 - DNA, 262 bp, Glycine max
  Clone ID: 701139312H1
tcaaggttgaagtggaagctataggacgtgttcgccacaagaatttagtcaggttgcttggttattgtgctgaaggagctcatagaatgcttgtttatgagtacgtggacaatggtaatttagagtcagtggctgcatggggatgttgggccttgcagtcctctaacttgggaaattcgaatgaacattattctgggaacggctaaaggattaacttatcttcacgaggggttagaaccaaaagttgttcaccgtgatatta

SEQ ID NO: 50970 - DNA, 264 bp, Glycine max
  unsure (1)..(264): unsure at all n locations; Clone ID: 701139313H1
cttcaccccggggaactggggaaggatattttcttcttttttggtggttctagttgttangggaagatattgtaaccatgaatgttgaagaagaggttcagcgtctcagccaagaaancaagaggcttggtaaggtccaagcagatggntcttacaaggtaacatttggaacactatttaacacatgatgaatgcgcaaatatatttgaagcacttgttggaacactaagagcagcgaaaaagcgtaaagtactgacatacgag

SEQ ID NO: 50971 - DNA, 264 bp, Glycine max
  unsure (1)..(264): unsure at all n locations; Clone ID: 701139314H1
cttactgtacgaccagaaacagagacacctgtcagtgctgtannccatccggagaattccacgggttccatcagatatgcctctctatgatatactaaatgagttccaaaaagggaagtagtcatatggctgctgttgttaaggctaggggaaaaggcaaagaaactccacaaatcattgatgaagagaaaaatgaagaaaacaaaagcattggtggggatcacagttgaccactccgttgctacagaagcaggatgcaaaatc

SEQ ID NO: 50972 - DNA, 262 bp, Glycine max
  unsure (1)..(262): unsure at all n locations; Clone ID: 701139315H1
tgagagggtgccgttggtgtctttggatgatgggattgttggcgctagggannnnnnnnnnnnnnnnnnnnnnnctacttaccagaggtatgatattcagcaggctgcgaagnggantgagcagagtctaccggnttcgcncnngcngccgacngnnttcagccgccagcatttgcaaggnttctttgtcacaatttgtatatcagctgtgatgttcaagtcaaatgaaattgttaagaagcagactgccctgaagggagat

SEQ ID NO: 50973 - DNA, 227 bp, Glycine max
  unsure (1)..(227): unsure at all n locations; Clone ID: 701139316H1
caagcttctctcgcgcgccaaaaatacnntgaaccatctgagtccgccgttaacgaacaaatcaatgtggagtataacgtttcgtacgtttaccatgccatgtttgcgtacttcgatagggacaacgttgcgctgagaggacttgccaagtaagtaacggtttcgttatttttagaatctatcgtttattttatactagttaggagtgattatagttataataatgg

SEQ ID NO: 50974 - DNA, 267 bp, Glycine max
  unsure (1)..(267): unsure at all n locations; Clone ID: 701139318H1
ttttttgtgattcctccgctcattgttgttgaagggtctcgtgaaatcaatctagttttgagacctgtttactggcagaggtgacggagtttcagttttgtaagtgcatgatcataataataaggtttttatagaaaagaaaagttgagaataagatgggggaagatggtaattcttggattaggaggacaaatttttcacacacagtgtgccanccgtttggatcctgctagattaggctctattcctatcagtgttcagtcagag

SEQ ID NO: 50975 - DNA, 246 bp, Glycine max
  unsure (1)..(246): unsure at all n locations; Clone ID: 701139319H1
gttctcactaactccctttcactaagttaaaactcaaaacactttgttttttcacttncagttcccccacgcgccaccacnaccacccatgggttgcacggcgtcgaagctgnaaaacgaggacacggtgcggcggtgcaaggagcggcgccgccttcatgaaggaggcggtctacgcgcgccaccacctcgctgctgcccactccgactactgccncnacctccgcctcaccggctccgccctct

SEQ ID NO: 50976 - DNA, 261 bp, Glycine max
  unsure (1)..(261): unsure at all n locations; Clone ID: 701139320H1
ggagaatatgaagttgtttgttttctttgttgctgcagtagttttggtagcatggccatgccatggcgcaggctaccaaaggttccctctccgaatgaaaactggctatggtgagcgttcttcggaggtaaaatgcgcaagttttaggcttgctgtggaagcacacaacatncnagcctttaaaaccattcctgaagagtgcgttgaaccaacaaaggactacattaatggcgaacaatttagatcagactctaaaacagt

SEQ ID NO: 50977 - DNA, 261 bp, Glycine max
  Clone ID: 701139321H1
ccttgggcttatcttcagttattgcatgtagcatctagtcacaaatgaccccatcatgtaattaaataattaacctacctaggtctaactcttaactatacttcatggtgaacaatgaacattatttgattttgggcacaacttgtcaattgattttgtgataattaaaaagggattatactttttgggaaaaagaaattaattgagagcatggttgttgttgtgtgagagtgtgatatacaactaactggaacaaggctt

SEQ ID NO: 50978 - DNA, 261 bp, Glycine max
  unsure (1)..(261): unsure at all n locations; Clone ID: 701139322H1
caaagattaagccatgcatgtgtaagtatgaactaattcagactgtgaaactgcgaatggctcattaaatcagttatagtttgtttgatggtatctactactcggataaccgtagtaattctagagctaatacgtganacaaaccccgacttctggaagggatgcatttattagataaaaggtcaacacaggctctgcctgttgctttgatgattcatgataactcgtcggatcgcacggcctttgtgccggcgacgcatc

SEQ ID NO: 50979 - DNA, 263 bp, Glycine max
  unsure (1)..(263): unsure at all n locations; Clone ID: 701139323H1
cttactgtacgaccagaaacagagacacctgtcagtgctgtanccatccggagaattccacgggtttccatcagatatgcctctctatgatatactaaatgagttccaaaaagggaagtagtcatatggctgctgttgttaaggctaggggaaaaggcnaagaaactccacaaatcattgatgaagagaaaaatgaagaaaactaaagcattggtggggattcacagttgaccactccgttgctacagaagcaggatgcaaaa

SEQ ID NO: 50980 - DNA, 261 bp, Glycine max
  unsure (1)..(261): unsure at all n locations; Clone ID: 701139325H1
caatccgccagcgaattgtaccaatcggagagctcaggcaccagcttcactctcaagctcgagcagtttgtggctctcgccgtcttccaggctggtgatgctttaatacaattatatcacaatttcatcacagactttgagncgaaaatcaaccttctcaagcttgcacattttgctgttatagtttctcggcagtattctgaaaaagaagctgctgttggttatcttggaggggtcattcagaaacttcaagacactagg

SEQ ID NO: 50981 - DNA, 258 bp, Glycine max
  unsure (1)..(258): unsure at all n locations; Clone ID: 701139327H1
ctaatacgtgcaacaaaccccgacttctggaagggatgcatttattagataaaaggtcaacacaggctctgcctnttgctttgatgattcatgataactcgtcggatcgcacggcctttgtgccggcgacgcatcattcaaatttctgccctatcaactttcgatggtaggatagtggcctaccatggtggtgacgggtgacggagaattagggttcgattccggagagggagcctgagaaacggctaccacatccaa

SEQ ID NO: 50982 - DNA, 259 bp, Glycine max
  unsure (1)..(259): unsure at all n locations; Clone ID: 701139328H1
cnaacttcacattggggtggtagcagtatttgaggcaagaaaaatgggagtgattcagaagtttttcgttgcatcactgttcatgtgggcaatccctattgcaattttatatgcttttaaccataatatacttcctggaacatccaatttgtccccatactctatgacactagtgagcggatttcttgctgtcatatctgtcaatgtggtgatagcattttacatatatttggcaatgagagaacctgcggcggataaa

SEQ ID NO: 50983 - DNA, 253 bp, Glycine max
  unsure (1)..(253): unsure at all n locations; Clone ID: 701139331H1
gggaatggcttccctaccctttccgttgatgaacaagtcgttgccatagagcngccactgaaatacggtctnntcattgagtcagtgaacaagagagggctgaaccnctctgaggtggagggntccacattcacaangggatngtttggagaaaccaaggacagaaggacagtgagagtggaatgcttcatgaaagaaagcagccccaatatctgggtgaggcctatcagtggactccacaatggtggttgac

SEQ ID NO: 50984 - DNA, 266 bp, Glycine max
  Clone ID: 701139333H1
ttcgtttcctgggcaaggtcttttgctgtacctggaaatcatcttggacaacaaagtcatggttttcgttggccatatggtccggtggcaattattactccttttaattttcccttagagattcctgtccttcaattgatgggtgcactttatatgggcaacaagccagtccttaaagttgatagcaaggtgagcattgttatggaacaaatgttgcgcctgcttcatacctgtggcttacctctagaagatgtagacttcataaa

SEQ ID NO: 50985 - DNA, 264 bp, Glycine max
  Clone ID: 701139334H1
aagggtttaacctttctggctgtgttaatatgcgtttcagcactgtcactgagtccttctgttgcgggggaagggcaaaataatggccttgttatgaacttctacaaggaatcatgccctcaggctgaagacatcatcacagaacaagtcaagcttctctacaagcgccacaagaacactgctttctcctggctcaggaacatcttccatgactgtgctgttcagagttgtgatgcttcactgttgctggactccacaagaagg

SEQ ID NO: 50986 - DNA, 261 bp, Glycine max
  unsure (1)..(261): unsure at all n locations; Clone ID: 701139335H1
tctttgtaacttgtaagcatggagtcctcaaagatctatgcttacctcttcctttgcatgctcttcctctcctccgccactcccattctcggttgtggctactgtggcaaaccccccaaaaagcacaagcctggtaaaacaccaaagacacccacagtacccgttgttaagccaccagtcacaatccctcccattgttaagccaccagtcacaatccctcccattgttaatccnccagtcacaatccctcccattgttaat

SEQ ID NO: 50987 - DNA, 258 bp, Glycine max
  Clone ID: 701139336H1
ggaatcgctttagcattaggtggatcgcccaatgaatttgaaggtcaaagagctggggatccattttgggtaatgcggctcattggttacccaggtgtatcatctgtaaatggaaccaatgttcataaaaatgacattggatggtaatgaaatcttggatctggtgtttctaaatgttaccttttttttaattacttggccttacattgctgatgtcttttcctttatgttactttttcttcaattctttgaatcaaa

SEQ ID NO: 50988 - DNA, 249 bp, Glycine max
  unsure (1)..(249): unsure at all n locations; Clone ID: 701139339H1
ggattttagtagatggtatgatgagccactatgccgaaatgtttcgcatgaaatctgctgctgcaaaagcagatgtcttctatgttatgtccggcatgtggaaaacaacagctgaaagatttttcctatggattggnggctttcgcccctctgagcttctaaaggttcttggccccctgattgaacccctgacggagcaacaacgtttggatatctataaccttggacaatcatgtcaacaagcagaag

SEQ ID NO: 50989 - DNA, 256 bp, Glycine max
  Clone ID: 701139340H1
agaacgggttttgaagaagaagcagttcaattgatcaactcagatttcagggacctaagtctagctgctaatagactcgcccatcatgccatcaaacttggtggcattggctttggagcctcttttttcggattgtttgctgccattgctgctatttatctgttgattttggatcgtacaaactggaaaacaaatattctcacagcactactcattccatacattttcttcagcttgccttcattaattttcgacg

SEQ ID NO: 50990 - DNA, 249 bp, Glycine max
  unsure (1)..(249): unsure at all n locations; Clone ID: 701139341H1
gacgtcgtgcgcaaggaggccgagaactgcgactgcctccaggggttccangtctgccactcgctcggcggaggaaccggctccgggatggggacgcttttgatttccaagatcagagaggngtaccctgacagaatgatgctcaccttctccgtttttccttcccccaaggtctctgatactgtggttgagccttataacgctactctttctgttcatcagttggtggagaatgctgatgagtgtatg

SEQ ID NO: 50991 - DNA, 258 bp, Glycine max
  unsure (1)..(258): unsure at all n locations; Clone ID: 701139342H1
gnaagaacgaagaagaagaagcatcacagaaccgaacccattcagaagcaaatccgaaaacccctcacttaatattactggtattcagctgttcntcacaaaagcctgaaccaatcatgtcagaaggtgcagaaattgatgagcgtgtggaccttgatgaggaaaattatatggaagagatggatgatgatgttgaagaacaaatagacgatgatggagtggatggagttgaagaagaaaatgctgaaggtagttttg

SEQ ID NO: 50992 - DNA, 260 bp, Glycine max
  unsure (1)..(260): unsure at all n locations; Clone ID: 701139343H1
caancctnancactccttcttctccgcttcctcttcgatcatcgcttncagangngncgncgaagttcgnncnnngncagatcgtcgangtcntcgtacgcgtcaccggnggtgaggtcggngcggcgagttcnctcgccccgaagatcggtcccctcggtctntcccccaagaagatcggagaagatatcgccaaggaaaccgccaaggactggaagggnctccgcgtcaccgtcaagntcacngtgnagaaccgtcag

SEQ ID NO: 50993 - DNA, 90 bp, Glycine max
  unsure (1)..(90): unsure at all n locations; Clone ID: 701139344H1
ctcgagtctagagctggacataaacctggagatgntgatgnatgatgtgggaccggngaacaaccaananaannnggaaganggaaccgc

SEQ ID NO: 50994 - DNA, 262 bp, Glycine max
  unsure (1)..(262): unsure at all n locations; Clone ID: 701139345H1
aganaactctcaaaaaactattatagcaatgggcagaacaaaaccaaaaccaaacaactgncagctgacaaggcaccaagaggttggtcacaagagccttctccagagtgatgctctttaccagtatattctggagacaagtgtctacccaagagaacctgaatccatgaaagaactgagagagttgacagcaaaacacccatggaacatcatgacaacctctgcagacgaagggcagttcttgaacatgctccttaagctc

SEQ ID NO: 50995 - DNA, 248 bp, Glycine max
  unsure (1)..(248): unsure at all n locations; Clone ID: 701139346H1
gtgccagcagccgcggtaattccagctccaatagcgtatatttaagttgttgcngttaaaaagctcgtagttggaccttgggttgggtcgatcggtccgcctccggtgtgcaccggtcggctcgtcccttctgccggcgatgcgctcctgtccttaactggccgggtcgtgcctccggtgctgttactttgaagaaattagagtgctcaaagcaagcctacgctctgtatacattagcatgggataac

SEQ ID NO: 50996 - DNA, 259 bp, Glycine max
  Clone ID: 701139347H1
cggggattcaaaaacagtgatacaactcaaaaaagagaagtgattgatgcaattgaaaagccaaacataaacaagccaaatgctgttcaggataatgcttctcagcacctccttaccttgcgtcaggaaattttggctcataaaaggaaggcagttactttgaaaagagaagggaaactaacagaagctaaggaggaactccggcaggccaagctgttggagaagggcttggaggatggaagtatgcagccagacactg

SEQ ID NO: 50997 - DNA, 237 bp, Glycine max
  unsure (1)..(237): unsure at all n locations; Clone ID: 701139348H1
agaaagcactctacatacttgacntgttgtcaacactnccagagggaagaatggctnnaaggagtgtccaaatatcattcccaatgtggtgaagttgctgatgagagtctcagagaggtgcacacaatttgcattgtcaatattgtgggctatttacaagcttgcccctgaagagtgtgcctccaaggctgtggaggctggattggcagcaaagcttctgttggtgattcagagtgg

SEQ ID NO: 50998 - DNA, 262 bp, Glycine max
  unsure (1)..(262): unsure at all n locations; Clone ID: 701139349H1
gcgatttgtgggagaatcctctctcccaaccacgtcttcaaaccaggggacacacattcaatttgtaaaggaccatactccaatctttgtgtacccatggttgtattggcaacagggcctggtataggaggtggggtgctggaaaagccagttattgaaaaagtcacccctggccgtgagtctgaatttgatttaaagaaatcacggaaatcggcnccnccctatcgtgtaatattgcacaacgacaactttaataaacggg

SEQ ID NO: 50999 - DNA, 260 bp, Glycine max
  unsure (1)..(260): unsure at all n locations; Clone ID: 701139350H1
ggaaaatggcatgtaataatggcctgcagggattacctcaaagctgcaagagctgcaaaatccgctggcatggctaaggaaaactacaccatcatgcactnnggaccttgcctcgctcgacagtgtccgccaatttgttgataacttcagaagatcggaaatgccgttagatgtgctggtttgcaatgctgctgtttacttgccaactgctaaggaacctaccttcactgctgagggctttgaacttagtgttgggacaa

SEQ ID NO: 51000 - DNA, 255 bp, Glycine max
  unsure (1)..(255): unsure at all n locations; Clone ID: 701139351H1
tttaaagttttcttctgttgctgatcaaanctgatcgaaataacacttncctagctgaactatggaannggagaagacaccaacaagtttggtttttggtgttaatggtgagaggtttgagctctcccacgttgacccatcaaccactnngctccaattcttacgcactcgcactcgtttcaagagtgtcaagctcggttgtggtgaagggggttgtggcgctgtgtagttttaatctccaaatacgatcctgtg

SEQ ID NO: 51001 - DNA, 255 bp, Glycine max
  unsure (1)..(255): unsure at all n locations; Clone ID: 701139352H1
caagggaaagatttcactgttctccagttaatgatctattgtgtctttngtgttctggctggtgtagttggtggcatgttgggactaggaggaggattcgttatgggtccnctttttctggagttgggagtcccacctcaggtgtcaagcgcaacagccacctttgcaatgaccttctcctcatctatgtctgtcatagaatactacctgttgacacgttttccagttccttatgctctttacttcattcttgtg

SEQ ID NO: 51002 - DNA, 256 bp, Glycine max
  Clone ID: 701139355H1
ccatccacttgatgctacacccacaagagttgacaccacatactacacggatttgctgcacaaaaagggtcttctccattctgatcaagagctgttcaagggaaaaggcacagaaagtgacaaattggtgcaactatatagtagaatccctttggcttttgctagagattttaaagcttcaatgatcaagatggggaacatgaagcctctcactgggaggcagggagaaatcagatgcaattgcagaagggtcaac

SEQ ID NO: 51003 - DNA, 229 bp, Glycine max
  unsure (1)..(229): unsure at all n locations; Clone ID: 701139358H1
acagggttctgatcatgttggggaagaggccccggccaatgatcggaangttgtcggngttgttggtctcgagaggccgcacggtggcatatttggacaccaccggaagccctaganccccattagacatgaagatgatgcaatcatcaccaagaggctaaaaaactatgatcttggtggtgttggccttggaattgtagtggctcttgataaatccaacgaggttgct

SEQ ID NO: 51004 - DNA, 255 bp, Glycine max
  unsure (1)..(255): unsure at all n locations; Clone ID: 701139359H1
caaaaccaaaccacatattaacttgtttgctctaagtcatggctctgatcttgcacgcaaccaaagcaacncaagaatgctttcaagactctgattgcggcagagtacagtggcgtccaagtggaattggcccctaatttcgagatgggtgtctctaatagaactcctgaattccttaaaatgaatcccataggaaaggttcctgtcttggaaacgcccgatggtccagtctttgagagcaatgccattgctcgt

SEQ ID NO: 51005 - DNA, 224 bp, Glycine max
  unsure (1)..(224): unsure at all n locations; Clone ID: 701139360H1
ggagtgcgtattcggattggtgggtaatgggtttgcgatcgtggtggctgattcatcggcggtgcacagcatcctcgtccncaagtccaacgaggncaagatcatgctcctcgattcccacaaactcattgcnnnnagcggcgagcccggagacagggttcagttcacagagtacattcagaagaacgtcgccttgtatcagttccgtaacggcatccctctta

SEQ ID NO: 51006 - DNA, 256 bp, Glycine max
  unsure (1)..(256): unsure at all n locations; Clone ID: 701139362H1
tttaacccaagggtttcctcaagccgtcgaaaganccgcaaggctcacttcaccgctccgttcgagcgtgcgtcgcgtcctgatgagcgcgcctctctcgaccgatctccggtcgaagtacaacgtgcggtccattccggttcgcaaggacgacgaggtgcaggtggtgaggggaacctacaagggccgcgagggcaaagtggtccaggtctatcgccgcaagtgggtcatccacatcgagcgcatcacccgcgag

SEQ ID NO: 51007 - DNA, 254 bp, Glycine max
  unsure (1)..(254): unsure at all n locations; Clone ID: 701139364H1
tcctgccagtagtcatatgcttgtctcaaagattaagccatgcatgtgtaagtatgaactaattcagactgtggaaactgccantggctcattanatcngntatagntgntganggcaaccactacncgganaaccggagtaattctagagctaatacgtgcaacaaaccccgacttctggaagggatgcatttattagataaaaggtcaacacaggctctgcctgttgctttgatgattcatgataactcgtc

SEQ ID NO: 51008 - DNA, 259 bp, Glycine max
  Clone ID: 701139365H1
tggagattgcggactatatagttcttaaaaaaattattcttgttttgttttgtattattttgttttgtaagattgttagatacatgttcagtcttctcaaagaagagaaagaaccaatcacaatattagtcaccggtgcagcaggccaaattggatatgctcttgttccaatgattgcaagaggggcaatgttgggcccaaatcaacctatgattctacacatgcttgacattgaaccggcaacagaatcctaaaaggg

SEQ ID NO: 51009 - DNA, 239 bp, Glycine max
  unsure (1)..(239): unsure at all n locations; Clone ID: 701139366H1
gngagaaagtnggttcaggaagtnccnaggacatctgaaccggtagtaatagaagattgnngccagattgtagagaagtgagtcttgatacaacgatgtttcgagacatgtttgttgctattcaatgcaaatcactagtattataataagtgatttgtgtaactaggagtcaattgtccagtattaatgtaactctcaaatttgtactcctaaatctgcttttacatttgttccaacta

SEQ ID NO: 51010 - DNA, 253 bp, Glycine max
  unsure (1)..(253): unsure at all n locations; Clone ID: 701139368H1
tgacttgcaggcagctgacactgcaatggtacagcaagacttcttgtctgctaatgagttaccaactgaaacagaaggcaataaccccttgcctgctcctcctcccctcgatgaagtgtgtgaatcaatggattccacaaactcaaatgatggagagcctgccccatcaaagccagaaaacacacatccatcttatccnatgttatatcctgcgtattattctccagtgttcccgtttcctctgccctattgg

SEQ ID NO: 51011 - DNA, 115 bp, Glycine max
  Clone ID: 701139370H1
gaagggtcgtgtttccctgcttcagtttcagcttcggcttcgagaagcgtcgattgggtccttaagctgttccttctctgtttctgacaaactgtataactccacacaacatacg

SEQ ID NO: 51012 - DNA, 251 bp, Glycine max
  unsure (1)..(251): unsure at all n locations; Clone ID: 701139371H1
aaagttgtttgttttctttgttgctgcagtagttttggtagcatggccatgccatggcgcaggctaccaaaggttccctctccgaatgcaaactggctatggtgagcgttcttcggaggtaaaatgcgcaagttttaggcttgctgtggaagcacacaacatccgagntntaaaaccattcctgaagagtgcgttgaaccaacaaaggactacattaatggcgaacaatttagatcagactctaaaacagt

SEQ ID NO: 51013 - DNA, 250 bp, Glycine max
  Clone ID: 701139375H1
cgtgacacctgcaggaacatcggcttcgtctcaaatgatgtgggactggatgccgacaactgcaaggtcctcgtcaacattgagcagcagagccctgatattgctcagggtgtacacggccaccttaccaaaaaacctgaagaaattggtgctggtgaccagggtcacatgtttggctatgccactgatgaaacccctgaattgatgccattgagccatgttcttgcaacaaaactcggtgctcgtctca

SEQ ID NO: 51014 - DNA, 251 bp, Glycine max
  unsure (1)..(251): unsure at all n locations; Clone ID: 701139376H1
cgaagtcgtaggagggtttcaaaagatggngaacatgcagagcttctggcaattgggcgatgaactccgtggacactcaaaagcatcggaggatcacaaatggttaatggttgcttcgaaattggcggaacagacaagattgaagggggagcgtgtgaacaaccttgatctttcaaagggccccattgaaacaaggtcaagggataaatttgggttccaggaagagaacaaatttgattctcttaacttaa

SEQ ID NO: 51015 - DNA, 252 bp, Glycine max
  unsure (1)..(252): unsure at all n locations; Clone ID: 701139378H1
agantccaaccatcgatctncaattttcaaccttaacctctaagaatgtcttacgcttatctcttcaaatacatcatcatcggtgacaccggagttggaaagtcttgtcttctacttcaattcacggacaagcgctttcagcccgtccatgacttgaccatcggtgttgaatttggtgccaggatgatcacaattgataacaagccaatcaagttgcaaatatgggatacggctggtcaagaatcattcaga

SEQ ID NO: 51016 - DNA, 259 bp, Glycine max
  unsure (1)..(259): unsure at all n locations; Clone ID: 701139379H1
gatggctaagtcgaagaacccacacccgctcacaaccagtcctacaagggcccacaagaatgggcatcaaaaagccaaagaggcaccgccacacttccaccaaagggatggatccaaagtttctgaggaaccaaaggtacgcgaggnagcataacaagaagagcggtgaaacagccacggaagaagagtaaagtgtcactctcaaatggggctattaggatttgatttgctattcaagtcccatatgttttgtgtcaaa

SEQ ID NO: 51017 - DNA, 255 bp, Glycine max
  unsure (1)..(255): unsure at all n locations; Clone ID: 701139380H1
aaataaagaacagaggagcaaaactatttagttcctcctcataaatacgtttacaatccaaagcctgtcttcgaagatcttcctttgacaatgagcccttgtttcctactacatcaaactttgcaagctcctcaacaacacgaggtaagaacatccagtcctcagttcctttccggatgtcctgtttttcctctagagaacatattgcatcttgcaaacaagttagaatcccctctgcagctatttttgtcaang

SEQ ID NO: 51018 - DNA, 258 bp, Glycine max
  Clone ID: 701139381H1
cgacatggatccagacgcgttggcaaaggcattcgtggagcactactactccaccttcgacaccaaccgcaacaatctcgccaatctctaccaggaaggttccatgctctctttcgagggtcagaagatccagggctcccacaacatcgtcgccaaactcacctcccttcccttccaacagtgccagcactccatcaccaccgtcgattctcagccctcaggcgtcaacgccgccatgctcgtcttcgtcagcggcaa

SEQ ID NO: 51019 - DNA, 221 bp, Glycine max
  Clone ID: 701139384H1
caccatgtcacttgctgggaaaatcaccactgaaatcggggttcatgcaaccgctacaaagtggttcaacctcttcgcaacacaactccatcatgttcaaaacctaactgatagagtgcatggaaccaagctgcatcaaggtgaagactggcatcacaacgagacagtcaagcactggacttataccatagatggtaaggttacaacatgtctggagagta

SEQ ID NO: 51020 - DNA, 249 bp, Glycine max
  unsure (1)..(249): unsure at all n locations; Clone ID: 701139385H1
tcgagccnttcctttgcacttggctaagttctactaaggtgagtgtgttgtgctcgtanctataaaatttangttttccacatgggacatttagtttgataaatgactgtacatttttttaaggttgtgtttggttgttaattatgatcatattataagtattaacctgtcctttttgctctctatcccactcttctccctatttatacntcagtagggatttagggacatatgcttctctttggaggt

SEQ ID NO: 51021 - DNA, 250 bp, Glycine max
  Clone ID: 701139386H1
ctccatcttcttcgatctctcaaactctatcggcgcagaaccaatcctatatcactatggggaagacacatggaatgggagctgcccgcaagctgaagtctcaccgtaggagacaaaggtgggctgacaagtcatacaaaaagtctcatcttggaaatgaatggaagaagccttttgctggttcatcccatgcaaagggtattgttcttgaaaagataggtattgaggctaagcagcccaactctgccat

SEQ ID NO: 51022 - DNA, 242 bp, Glycine max
  unsure (1)..(242): unsure at all n locations; Clone ID: 701139388H1
ctgttagatctgtacccgcctagccattgatttggnaaagtccaacttcaacgatgagtaagcttcagagtgatgctctaagagaagctatctcaggaatcatggctgattccaaggaaaagaacaggaaatttgtggagaccattgaactccaaattgggttgaaaaattatgatccccagaaggacaagcgtttcagtggctctgttannnttgcctcatattcctcgccccaagatgaa

SEQ ID NO: 51023 - DNA, 240 bp, Glycine max
  unsure (1)..(240): unsure at all n locations; Clone ID: 701139389H1
ctctgctctttgccttctctgacacatttggtgccttgtagagcgtgtttncggcaggaaggtggtatggcgaaggacgttgaggttgctgagcgtggctccttctctgggaaggactaccaggaccctccaccagcaccactcattgatgctgaggagctcacaaagtggtccttttacagggctctcattgctgaattcattgccactttgctcttcctctacattactgtgctcaca

SEQ ID NO: 51024 - DNA, 247 bp, Glycine max
  Clone ID: 701139390H1
gctacggggacattctataggagttttcagtgaagggattggtttagttttatttcgctggtcgactcttctaacggctgttgagaatgaatggggtggccacgagtcccgtgtcaaagccgatcaacttgccagtgacattctttcctggttcactcaatccaaagagccactttatattgatgacttagaagacatactggatcaaggtatgctttctctcaatgtagaggtggaggatggcagc

SEQ ID NO: 51025 - DNA, 233 bp, Glycine max
  unsure (1)..(233): unsure at all n locations; Clone ID: 701139391H1
caaatttctcctcctggtactctcgtnttcgtttttcggccaagtacttgaactgctaccaccncactctccacaaaaacgcacnnaaacaccatcttcaacaaccacggaaccaggaagaacgcatggccaacctctctgcttcctttggcgctcgctgtttccgctggatcactcgctcttcaaccacacttcaatccttccttctgcgacaccgacgacagaggtgtggg

SEQ ID NO: 51026 - DNA, 251 bp, Glycine max
  unsure (1)..(251): unsure at all n locations; Clone ID: 701139392H1
cgacgtgagcngttcgctgcccgcgacgttgtgagaagtcacacacatttactccacttcactgtgagagcggcnnnnnnnnnnnnnnnnnnnnntgaaggacgccggaaagagccacaaggcgaatgcaaagctgtcgccggagacgcggaaggatcggaaatcggcgacggggctgagtggatcgccgaagaagggaggccacggcgggaagttcacgtggatcggcaacggctacgagaacgtcgaga

SEQ ID NO: 51027 - DNA, 253 bp, Glycine max
  unsure (1)..(253): unsure at all n locations; Clone ID: 701139396H1
ttgctacagagacagggagacaagacagagtagtacagattantaccaatggctaccaaggnttacattngtttnttaantctacgtatggacangntgaggagcnagcnagngcganagaaaaaggggcngccncagtggagggagnagaagcaaaactgaggcaggtacctgaaacattgcctgaagaagtccttgctaagttgggagcacctccaaagagtgatgttccaattattactcccaatgagct

SEQ ID NO: 51028 - DNA, 258 bp, Glycine max
  Clone ID: 701139401H1
caaatttctcctcctggtactctcgttttcgtttttcggccaagtacttgtactgctaccaccgcactctccacaaaaacgcacccagcaccatcttcaacaaccacggaaccaggaagaacgcatggccaacctctctgcttcctttgggcgctcgctgtttccgctggatcactcgctcttcaaccacacttcaatccttccttctgcgacaccgacgacagaggtgtgggtgttgggggcaaaggcagcacgcaa

SEQ ID NO: 51029 - DNA, 262 bp, Glycine max
  Clone ID: 701139402H1
ggttgaaggcggcgtgagaatgttggacatcaacctattcagagaggagaagggccacaaccctgaactcatacgcgaatcccaacgccgtcgtttcgccagcgtcgaaatcgtcgacgaggtcatcaatctcgacaaagaatggcgaaaacgtcaattcgagttggaaaatctccgcaaggaattcaacaagatcaacaaggaagtctccaaactcaagcgtgctggggaggatgcttctaagttcattactgaatcagag

SEQ ID NO: 51030 - DNA, 272 bp, Glycine max
  unsure (1)..(272): unsure at all n locations; Clone ID: 701139403H1
ctgannncaaaatcatcatatttggtagcacttggtaaaggttcannccaaccattgtacnagagtctctagttacaaatacacaagttaacagtgacttcgaacccataccaagtgttaccaaatatgatgatttggaattcaagtcaagcattatcaagaacgatgattttgaatcgagaccaagtgttactaagtatgatgattttgccctcaagtcaagcgttaccaagaacaatgattttgaaccgagaccaagtgctaccaaatat

SEQ ID NO: 51031 - DNA, 266 bp, Glycine max
  unsure (1)..(266): unsure at all n locations; Clone ID: 701139405H1
aggagatgattaacttcgaagaaaccgagttgcgactcggcctcccnggcgggtctgcgagtgatcacaacgagtcaacaacggtcaagggcagtggtggaaagagaggcttctctgaaactgcttctgttgatttgaagcttaatctttcttccagtgatgactctgcctcagattcaccttcatctgcgtctacagagaagactaccactgctgctcacccttgtgctcctccttctcgagccaacgaccctgcaaaaccacct

SEQ ID NO: 51032 - DNA, 266 bp, Glycine max
  unsure (1)..(266): unsure at all n locations; Clone ID: 701139406H1
taacaccgaatcttccaccttttccttcttctcntgttgtctcaaaactctcttttcttcttctttgtttcttgttnncttcaattttaagttgcctgatatggcttcatataccccaaagaatatccttattactggggctgctggatttattgcgtctcatgttgccaaccggcttgtccggagctaccctgactacaatnttgtcgtgcttgacaaacttgattnctgttctaatctaaagaatctccttccttcaaaatcat

SEQ ID NO: 51033 - DNA, 267 bp, Glycine max
  unsure (1)..(267): unsure at all n locations; Clone ID: 701139407H1
ganactggtggtcctgctgctatgatgaggtactggaatgatgaggaggttttgcggaagttgggacaagccatgggtcttgcaaattctggagatgtaggtgcctctgctgaaaattctggggcagatgagacagaagatttgggaaatgaagatgaatcaattgttcatcatactgctagtgttggtgatgtggagggcttnccaaaatgcactagccgctggtgctgacaaggatgaagaagattcagagggaagaactgcttt

SEQ ID NO: 51034 - DNA, 273 bp, Glycine max
  unsure (1)..(273): unsure at all n locations; Clone ID: 701139408H1
gggcttcgacttgngcctnagatttcagggntcaagttctgcaaaggtcgaagagcgtttggttcttctcaacgaaacagagaaacgagagtacatggtgccaggtttcagacccatcagngatgtctccgtngacatcaaatgcgacnagggcgatcgcanccgctaccaatccgacatcctcaccttcaccnngatgttagagctcttcaancagaaaagtccaatcccngggagaattncatctgggtatttcaacaccgtgttttgatt

SEQ ID NO: 51035 - DNA, 269 bp, Glycine max
  unsure (1)..(269): unsure at all n locations; Clone ID: 701139409H1
gccttcactagttgcggaggcattcgaagccaagggnccagaacccttgancctgaagcccattttcagtgcctcaggcgtcaagggcaagcgagtaactgcactatcagcagaagcaaatgccctcactgatttcattcaagcaatcatagctgacaaaccagacatcgactctccattcagcgtcctcgatttgggcgtcgtaatgggcctcatggacaaatgggcctgcaagctccccacggtccagcccttctacgccgtcaagt

SEQ ID NO: 51036 - DNA, 265 bp, Glycine max
  Clone ID: 701139410H1
gtcaggttgttagatatgaggataactttgattcaaccaccaacgtggttgtcaccatcactccgactgataagaagtctatcactgactatggttcacccgaagagttcctctctaaggtggattatttactaggaaaacaggccttcttcggcgaaacacaagccgagggtggttttgatccaaatgcggtggccacggctaacatcttagagacggcaacacctgtgattgatgggaagccgtactattttctgtctgtgtt

SEQ ID NO: 51037 - DNA, 267 bp, Glycine max
  unsure (1)..(267): unsure at all n locations; Clone ID: 701139413H1
ccaaggttcaacaactgctgcaggacttctttaatggaaaggagctgtgcaagancatcaatcctgatgaagctgntgcatatggtgctgctgttcaggctgcaattttaagtggtnagggcantganaaggttcaggatcttctcctccttgatgtcacccctctanctctnggtttggagactgctggcggtgtgatgactgtcttgatccctaggaacactacaattccaaccaagaaggaacangttttctcaacatactctg

SEQ ID NO: 51038 - DNA, 268 bp, Glycine max
  unsure (1)..(268): unsure at all n locations; Clone ID: 701139414H1
caagaatggcacttcgttgcttggtgatgtccctttctgttctcttcactcttggtcttgcgagagaaagccatgccagagacgaagatttttggcatgctgtttggccaaacactcccattccaagttcattgcgagatcttctaaagcctggccctgcaagtgttgaaatcgatgatcaccctatgcaaattgaagaaacacagtacccgaaaaccttcnnctataaagaagaccttcatccaggcaaaacaatgaaagtacaatt

SEQ ID NO: 51039 - DNA, 273 bp, Glycine max
  unsure (1)..(273): unsure at all n locations; Clone ID: 701139416H1
tcacgcnnngntgnnngacttttctnaaaccaaacaaatnccgtgcatcgtcctttcanggacgctacgccggcaaaaaagccgtgatagtggcgaaccttcgatgaaggcacgcgcgaggccccctacgggcactgcttggtggcagggataaagaagtaccctggcgaaggtgatcaagaaggattcggccaagaagacggccaagaagttcgcgtgtgaaggcgttcgtgaagctcgtgaactaccagcactcatgcccacgcgctacac

SEQ ID NO: 51040 - DNA, 259 bp, Glycine max
  unsure (1)..(259): unsure at all n locations; Clone ID: 701139417H1
gttgcnataattttggtagcatgggcaatgccatgcgtacgatatgttccctctccgaatgaacactggctatggtgcccgtactccggaggtgaaatgcgcaagttggaggcttgctgtggaagcacacaacatctttggctttgagaccattcctgaagagtgcgttgaagcaacaaaggaatacatccatggcgaacaatatagatcagactccaaaacagttaaccaacaagcttacttttatgccagagacctc

SEQ ID NO: 51041 - DNA, 249 bp, Glycine max
  unsure (1)..(249): unsure at all n locations; Clone ID: 701139418H1
gggctccaatgctgatgtatagcactggtaacccaacaaanattgcgaacccaatcaaanctgcaagtgctcgggttgatataaagacatcaagtggaaggttgacattgtttgagactactttgtgcgaaaagatatcttgggaaaagcttgaagcacgcaaaagtttggatcccctgggttatcttagagcatacaatgagaaagacattcaattaatttgttgccaatcagaggcaagtacattgt

SEQ ID NO: 51042 - DNA, 267 bp, Glycine max
  unsure (1)..(267): unsure at all n locations; Clone ID: 701139419H1
ctagttgtttaaagtgagaganaaagaaagaagaaaatggcaaactttccagttgttgacatggggaaacttaacaccgaagagagagcagcagccatggagattataaaagatgcctgtnagaactggggtttctttgagttggtgaaccatgggatatccattgagttgatggacactgtngagaggctcacaaancagcactacaagaagactatggagcaaaggttcaaagaaatggtggccagcaaagggctgagtcagttc

SEQ ID NO: 51043 - DNA, 124 bp, Glycine max
  unsure (1)..(124): unsure at all n locations; Clone ID: 701139420H1
ctcttgttaaatattttaataattttgtngtggagtnngcgattttgtnttctcatacttccaatgtggttgtgtttcataggaatcgtaagatttgaggacaagagcttccacacaacatacg

SEQ ID NO: 51044 - DNA, 247 bp, Glycine max
  unsure (1)..(247): unsure at all n locations; Clone ID: 701139421H1
caaagtttatgtttttatgtgatgancagcattaaaaagaaacgtctgaattttccacggaanccggcttgncnatatttgatcttaggtgcattttcctctggaatcttactgtttggttgttccatgatctatgggtctactggagctacccacttcgatcaattagccaagattttgactggatacgaaatcactggtgctcgatctagtggtatttttatggggatctatttatcgctgtagg

SEQ ID NO: 51045 - DNA, 266 bp, Glycine max
  unsure (1)..(266): unsure at all n locations; Clone ID: 701139422H1
atggctctggggaagaggcagtgcagtggttctactactttgcttcttgctgcttcactctcncatggctcgtgctgccacctacacagttggagattctgggggttggacctttaacactgttgcctggcccaaaggaaagctctttcgggctggtgacacacttgctttcacttatagccctgggactcacaatgtggtggccgtgaacaaggctggatatgatagctgcaagactccaagaggagccaaagtgtataagtcag

SEQ ID NO: 51046 - DNA, 269 bp, Glycine max
  unsure (1)..(269): unsure at all n locations; Clone ID: 701139423H1
tttcacacttggaaaaacngtanaggggtttggaaaggtgagaaaacaaccacatgggaagctacntgtaaagtgntccagccagagtgggaanccatcttcttcgcaaaatgcggtncgtgttggtgttgttggagctagtggctacactggttctgaggttctgcgactcttggcaaatcatccacagtttgggattgcactgatgactgcggataggaaagctgggcagccaatctcttctgtgttcccacatttgagcattnggg

SEQ ID NO: 51047 - DNA, 267 bp, Glycine max
  Clone ID: 701139424H1
aaagaatcaattattgcttttcttttacaccttatgaggaaatattccaagttatttagaagtgagttctctgatgataatgattctcagggttctcaaccttgttctcccactgttcagagatctcttgaggatggcattcccggtggtcattgtcatgcctttgacagacagctttcaaaacttagttcctttaattttaagccaaataataggaaatcagggcagatgctccttccgccagaagagtaaggtgcccaatatctc

SEQ ID NO: 51048 - DNA, 267 bp, Glycine max
  unsure (1)..(267): unsure at all n locations; Clone ID: 701139425H1
acactttggtcctttgtggttttcacatgccttttnattcctctagcagttgcagattggaacatactgaagctgcagacacaagatggattgaagatcagcctgaagaactattgtgaaagctggaggatgaatgcggagctgcacaacattagggacttccaagttgtgcctgaagagtgcactgaatacataggaaaatatgttaagtccacacagtacaaagtagactcacagagggcatctgaagagtgcttggtttacctt

SEQ ID NO: 51049 - DNA, 100 bp, Glycine max
  unsure (1)..(100): unsure at all n locations; Clone ID: 701139426H1
acgcggtgttcggncngtttgggaagcggtngttgcagtgacggagcttncgcaagagcaatcaaggaccgaatcaacaccttcttcccacacnanatac

SEQ ID NO: 51050 - DNA, 265 bp, Glycine max
  unsure (1)..(265): unsure at all n locations; Clone ID: 701139427H1
ctgatctccattcccattccatggcttccactgaatcatcccctttcaanaaaattcagattcaaagggatgacactacatttgacgcatatgtggttggaaaagaggatgctcctggaattgttgtgattcaggagtggtggggtgtggattacgaaattaagaaccatgccgtgaagatttctcagcttggtagtgggtttaaagctcttattccagatttatacagaggaaaggttggtctggatgttgctgaagctcagca

SEQ ID NO: 51051 - DNA, 267 bp, Glycine max
  Clone ID: 701139428H1
cagacgcaaacgcaaacgcaaacgcaaacgcaaacgcagagcgtgatccattgacgaagatggtgctgcgtctcacctaccgcaagcggcacagctatgccaccaagtccaaccaacacagggtcgtcaaaacccctggtgggaagctcgtttatcagactaccaagaagagggccagcggacccaagtgccccgtcactggcaagaggattcaggggattccacacttgaggcctgcagagtacaagaggtcaaggttacccagaa

SEQ ID NO: 51052 - DNA, 266 bp, Glycine max
  Clone ID: 701139434H1
agtggtaatggctgctaatgaacaaggaggccacttgtatgacaacaagagcaaatatggaagtggaagtgtcaagagttaccaatgcccatcacaatgctcgaggagatgtagccagacccaataccacaagccctgcatgtttttctgtcagaagtgctgcaggacatgcctgtgtgtgcccccggggtattatggtaataaagctgtgtgcccttgctacaacaactggaagaccaaggaaggaggacccaagtgcccttgag

SEQ ID NO: 51053 - DNA, 264 bp, Glycine max
  Clone ID: 701139435H1
tctatgcttacctcttcctctgcatgatctttctctcttccgccactcccattctcggttgtggctactgtggcaaaccccccaaaaagcacaagcctggtaaaacaccaaagacacccaaaacacccgttgttaagccaccagtcaccatccctcccattaatgttcctcccgttgttcttccaccaatagtgaagcccccaggtattctccctccaattccaattattaacccaccaaccacaccagggaagggagggaaca

SEQ ID NO: 51054 - DNA, 262 bp, Glycine max
  unsure (1)..(262): unsure at all n locations; Clone ID: 701139437H1
gcagtggttctactactttgcttcttngctgcttcactctcagatggctcgtgctgccacctacacagttggagattctgggggttggacctttaacactgttgcctggcccaaaggaaagctctttcgggctggtgacacacttgctttcacttatagccctgggactcacaatgtggtggccgtgaacaaggctggatatgatagctgcaagactccaagaggagccaaagtgtataagtcagggacggatcagatcaga

SEQ ID NO: 51055 - DNA, 265 bp, Glycine max
  unsure (1)..(265): unsure at all n locations; Clone ID: 701139440H1
tgacatccagtcaagtagcaggaactcatcagcttccatacccatgacccctnggagcgaggganagatcttacaattttccaatttaaaaagctacagctacaatgagctaaaaatggccacaaaaaatttctgcccagatagtgtcctaggagagggtggatttggttcanttttcaagggctggattgatgaacattcgcttgctgttaccagacccggaacaggcatggttattgccgtgaagaaacttaaccaagacagt

SEQ ID NO: 51056 - DNA, 266 bp, Glycine max
  unsure (1)..(266): unsure at all n locations; Clone ID: 701139441H1
agaagcatcctcattccaacaantanncatgntgncncacattgctgtactacctagtccaggcattggccacgtcacanacctcctagagctctccaagctcctggtcacacaccaccagtgcnacgttatcttcctcaacgtcaccancgaatcttccgcagcccaaaacaacctccttcactccccaactctccctcccaacctccacgtcgtcgatctcccacccgttgacctctccaccatggtcaacgaccaaaccacca

SEQ ID NO: 51057 - DNA, 262 bp, Glycine max
  unsure (1)..(262): unsure at all n locations; Clone ID: 701139442H1
aaaaagcacaagatgggttattggaagtctaaggttcttcccaagatcaagaaggtttttgagaagaatagcaccaagaaagctgctgctgctnaggccaccaagtcctttgatgagtcaaaggaggaatacaacaaagcctttgaagaaaagaagactgaacttcaaactaaagtagttgaaatatacgaggcttcatcaactgaaatcaaaagtttggttaaagaacccaaggaagctggtttgaagaagaactccacag

SEQ ID NO: 51058 - DNA, 259 bp, Glycine max
  Clone ID: 701139443H1
caaggtgtctttgatccgagccatcatgtacatggtggctcagtgcttaggtgctatctgtggagttggtttggttaaggctttccaaaagtcttacttcaacaagtatggtggtggggctaattccctcgctgctgggtacagcacaggtactggattgggtgctgagattattggaacctttgttttggtctacactgtcttctctgccactgaccccaagaggaatgccagagattcccatgtgccggttttggct

SEQ ID NO: 51059 - DNA, 267 bp, Glycine max
  unsure (1)..(267): unsure at all n locations; Clone ID: 701139444H1
tgntctttgaagnagggtgtttgcttngattttggagatgtcgctgctctnagatgttcatgaaccttaaccttcacagacantactgaganggtgatcgcagagtatatatggancggtggatcaggaatggacctgangngcaaagnaagggnctctccntggaccagttagcganncttncaaagntcccaagtggaactatgatggntccagcacangccaagcttcctggagaagacagtgaagtgattatatanccacaag

SEQ ID NO: 51060 - DNA, 264 bp, Glycine max
  unsure (1)..(264): unsure at all n locations; Clone ID: 701139447H1
tttcttcgctcaacatggttcttcannatgatattgatttgctaaatcctccggttgagcttgagaagaggaaacacaagctcaagcgtcttgttcagtcaccaaactctttcttcatggatgttaagtgccagggttgcttcaacataaccactgtctttagccactctcagactgttgttgtatgcggaaactgccagnctgtcttgtgtcaaccaaccggtggccgggcaaggctaaccgagggatgctcctttaggaaga

SEQ ID NO: 51061 - DNA, 272 bp, Glycine max
  unsure (1)..(272): unsure at all n locations; Clone ID: 701139448H1
acgcgacccaaccctaaacccgattttcgaatcaaaatggncatgaacagcatgcagcacacgaactcccgaactccagagcgagcaccacgtgaactccagcgcgagcacgagcatgagcagcacccaccaacatgagttctctcacggtctcacccgaagtcaacgatggcatcacgcacgcgagcaatggacagcgacggtgacggcggcggcagcaacggctacggactgcgtgatggcaacaccctgtttttttgttctgttttttt

SEQ ID NO: 51062 - DNA, 259 bp, Glycine max
  Clone ID: 701139449H1
ctacaaccgcaatgacatcaacaggatccttggccccaaggccaattcgcatctccttcaaggactctgcatgccgttgctttggctacatggtctccaagaagaagtacatctacaccattgatgatgactgctttgttgccactgatccatccggacacaagattaatgcacttaagcagcatatagaaaacctgctctgcccatccacaccctactttttcaacaccctctatgaacctttccgagaaggtgcaga

SEQ ID NO: 51063 - DNA, 263 bp, Glycine max
  unsure (1)..(263): unsure at all n locations; Clone ID: 701139451H1
tttcattagcagcgttaaagaagagagaagaaaaatgcgaaagttcgatccatggcccgttttcttcaagcgcgagtggaaacgcaactggcccttcctcgttggattcgcagtcaccggagctctaatcaccaaactttcccttggccttaccgaggaagatgctaagaattccaaattcgttaaggcgcacnaaaggtgatttctgaatcgtgacatctgcctggctttgcactttatgttaggtttgtcaagattacttt

SEQ ID NO: 51064 - DNA, 263 bp, Glycine max
  unsure (1)..(263): unsure at all n locations; Clone ID: 701139454H1
gantgttttgtggagtgcctctttctaggaggcaacaagtgacgttggagttcttcctaactcaggaagattaatactaaaggcaacgagtcaagcctgcaagattttctatttttttttctttttctatagttttgtgcagtgtagagaaaaaaatgtcattttacacgagaaaagcaggagtgagagagaaatatgatgcttgccccatggaccttcaacattttaagaggagattgaccatggtagcagctagtaagagg

SEQ ID NO: 51065 - DNA, 263 bp, Glycine max
  unsure (1)..(263): unsure at all n locations; Clone ID: 701139455H1
gtaacccnggtttcntgtgcagaatctncnttagttttggtggaggatttacgtgtcttttcagattaatggcttcttggtgtggaggtgatatattcattanagagtgtctagactttatgagagattcaaacatgctattgatcatgtggtgaaccanaanagtaacttagttggtgctcctgtgggaaaggagataactaatgtagaatcttggcatagtcagattgatgactttaagttctcgagaggcagttgatcaa

SEQ ID NO: 51066 - DNA, 256 bp, Glycine max
  unsure (1)..(256): unsure at all n locations; Clone ID: 701139456H1
ctgcacactacgtgnggcangccggcctatgtcgcgcccgaggtgattgggaaaanaggctacgacggcgccaaggccgatatttggtcttgtggcgtaatcctctacgtacttcttgctggttttttacccttccaggatgacaacctggtggccttgtacaagaaaatttaccgcggtgacttcaagtgtccgccgtggttctcctccgaggcgcggaggctcatcaccaagctcctcgaccccaacccgaaca

SEQ ID NO: 51067 - DNA, 262 bp, Glycine max
  Clone ID: 701139457H1
atatcccctcctgctagcggtgtagctgttctgcgtcacttccggctttaagagaatacacctcttaactgagagttcctacaagcttgttcttagtgttatagtagttcttgagttcagttagcgactgatccaagggtatatctatcagctatgagttgaagaagctagactgtagttcctgtgcttcccgcccgaacgcagcagattctcgaacaagagcatacaaatacttgatatgagttgactagccttacttgcc

SEQ ID NO: 51068 - DNA, 259 bp, Glycine max
  Clone ID: 701139459H1
cccaatttgatgaagaactttataaggtaactggtgaaggagatgacaaatatctgattgcaacagctgagcagccactctgtgcatatcatttagatgattggatccaccctacccagctaccattaagatatgctggatattcatcatgctttcgtaaagaagctggatctcatggtcgagacactctaggaatattccgagtccaccaatttgagaaagtggagcagttttgcctcactagcccaaatgacaagat

SEQ ID NO: 51069 - DNA, 259 bp, Glycine max
  unsure (1)..(259): unsure at all n locations; Clone ID: 701139460H1
caggggcnnagattccttctcttgggttagggacttggcaagctgaacctggtgttgtagctgaagctctcacnacagccattcaggttggatacaggcatattgactgtgctagtgcgtataagaatcaagcagngattggttctgctcttaagaagcttttgatgatggngtggtgaagcgtgaggactatggatcacttccaaactctggtgttcanntcatgnancagnagatgtgccanaagcatggatanaac

SEQ ID NO: 51070 - DNA, 52 bp, Glycine max
  unsure (1)..(52): unsure at all n locations; Clone ID: 701139461H1
gagcggcccccttttctttttttttncnccattcaaacaaacaaanggncna

SEQ ID NO: 51071 - DNA, 270 bp, Glycine max
  unsure (1)..(270): unsure at all n locations; Clone ID: 701139463H1
ttcattccttgtgcttgtncttgctatnntnatcagnntnnttcaannnannncnagtcannttcaanannagaagagagggaaaaaccgattaccgtgccaggattcggttgattaatcaggacaagaacaaatataaccctccgaaataccgatttgttgttcgctttagcaacaaggacattgttgcacnaataatatctgctagcattgctggcgatattgttcttgctgcagcatatgcacatgagctgccacgatatggtctga

SEQ ID NO: 51072 - DNA, 267 bp, Glycine max
  unsure (1)..(267): unsure at all n locations; Clone ID: 701139464H1
ganacctctctacgtaacagcacacancgatttccccaaatcatcgaaactataactcgcgattcccaatcgaaaccctaactcgggatggcgattttgctgggcgaaattcttcaatcgctggagctgtggctgaagctgatcaagaacccgcagccgcagccctacgtaaaccctaatctggaccccgttttgctggtgcccggtgtcggtggctcgatgctgcacgccgttgacgaaaccgacggaagccatgaacgcgtctgg

SEQ ID NO: 51073 - DNA, 273 bp, Glycine max
  unsure (1)..(273): unsure at all n locations; Clone ID: 701139465H1
ccgnncgagncaatggcgacatcgctggtgcgatcgggttttcttcgaagcgccctaagaggaagcgctcgtggctcccaggttccgaagcgaaactttgcttcctctggtcatcacgatgatgcatatgagacggccaaatgggagaagattacatatctaggcattgttagttgcactggtttagccgtttataatctatcaaagggccacccacacttcaaagaacctcctgcttacccatatttgcatatccgcaataaggaattcccc

SEQ ID NO: 51074 - DNA, 263 bp, Glycine max
  unsure (1)..(263): unsure at all n locations; Clone ID: 701139466H1
ctagtatcttccatggctccgaaagatngnntnctggttttgggacccacaggagccattngaagncanatagtttgggcaagtgtaaaggcagggaatcccacttttatattggttagggacacccctgcntctgttaacaagccaaggcttgtcactgctgctaatcctgaaaccagggaagagctcattcagagcttccaaaattctggagttactctaatccagggagatatgaacgatcatgaaagtctggttaatgc

SEQ ID NO: 51075 - DNA, 261 bp, Glycine max
  unsure (1)..(261): unsure at all n locations; Clone ID: 701139467H1
ggagggagccgtagcagcggaagctnctagcttgggtagcgaatcacaatggcgagaggattaaagaagcatctgaagaggcttaatgccccaaagcattggatgcttgacaaactgggtggtgcatttgctcctaagccctcatctggaccacacaaatcgagggantgcctgccactcatactcattttgcgaaaccggctgaagtatgctctaacataccgtgaagtcattgctatnctgatgcagcgacatgtcctt

SEQ ID NO: 51076 - DNA, 260 bp, Glycine max
  unsure (1)..(260): unsure at all n locations; Clone ID: 701139468H1
acatttcgtctcattattttacatggtccaagtnacanaccagtncgagtagtaccttacgacaatcgtcctttatatctaccacttttaatncggtggatttaaaccccatccttntnctggcgactattggcggaatgctttatcatctaatctctcgtcgactagtgcaaaacataataatactcttttaaatcaatctaccttgaagaaacatctagcattttcataagttcatccaattgaacccatacacccta

SEQ ID NO: 51077 - DNA, 258 bp, Glycine max
  unsure (1)..(258): unsure at all n locations; Clone ID: 701139469H1
ctctaatatcccatactatgaaaaacatggatatggggtggaggaatttaatgaaaccttatatgatgaatgggttaacaagggcgacgcaccggcattgccagagactcttaaaaattacaacaagctgttgtctcttggcttcaagattgtattcttgtcaggaagatatcttgacaaaatggccgtaacagaagcaaacctaaagaaggctggctccacacatgggagcagtnaattctcaaggatccacatctt

SEQ ID NO: 51078 - DNA, 241 bp, Glycine max
  unsure (1)..(241): unsure at all n locations; Clone ID: 701139471H1
tcaccctgcaccatccttgaatcctccaattgacacgccttttggatccattttacctccgtgaggccctgacgcatcgcgattttgttttgggaacccgcgaaactgaatcagatagtgcggcacggaaactaggaattagagcaatngcagaagatctggtgctggatactgcaatcngagactgggtgctgatccctctctctgtggttatggttcncatggggtgctccgttatttt

SEQ ID NO: 51079 - DNA, 263 bp, Glycine max
  unsure (1)..(263): unsure at all n locations; Clone ID: 701139472H1
gnaggacccnatgtgtttcccanctcatcttggggagtgatcatccccccaaacattgatnatgaccactctcccctcccagggtggatggttgagtccctaaaggcagtgaagtacatagactcagaccacttctcagtccctcaaggcaagagagcngtggagctaanagcaggcaaagagagtgccattgctcaagttgccagaaccatccctggcaaaacctatgttctctcattctctgttggggatgctagcaactc

SEQ ID NO: 51080 - DNA, 261 bp, Glycine max
  unsure (1)..(261): unsure at all n locations; Clone ID: 701139473H1
gcgaacgnatacgctgtcgttgcggnanncgcggcgntggtgctactcgcggcgagtgtggcggtggatgntcangagnactcggacgtgaanacgctggtgaagtacnagcacgggnagaagtactgcgacaaaggatgggaatgtaagggctggtcaatttactgttgtnacctcaccattaccgnttatttccagacctaccagttcgagaatctgttctccaagcggaantcgccggtggcgnacgcggtnggattt

SEQ ID NO: 51081 - DNA, 259 bp, Glycine max
  unsure (1)..(259): unsure at all n locations; Clone ID: 701139474H1
gtggtaatatgcaatcaagagaagcagcactgagggcactaaatcagatatcatcatgtgacccaagtgcaaaaattttaatagaggcnggnctactttctcctcttgtcaatgacctttttgcagtcggtcctaatcagcttccaacacgattaaaaganntctccgctacaattcttgctagtgttgtaaactcaggagaagacttttattccattccatttgggcctgaccaccaaactctggtctcagaggatat

SEQ ID NO: 51082 - DNA, 259 bp, Glycine max
  Clone ID: 701139475H1
caagaatggcacttcgttgcttggtgatgtccctttctgttctcttcactcttggtcttgcgagagaaagccatgccagagacgaagatttttggcatgctgtttggccaaacactcccattccaagttcattgcgagatcttctaaagcctggccctgcaagtgttgaaatcgatgatcaccctatgcaaattgaagaaacacagtacccgaaaaccttcttctataaagaagaccttcatccaggcaaaacaatgat

SEQ ID NO: 51083 - DNA, 257 bp, Glycine max
  unsure (1)..(257): unsure at all n locations; Clone ID: 701139476H1
ctccctcttacttcttttgcttctgtttttgaggcgaagaangatggaattgtaatgctgngaatataantggagaattnggggncgagtaagggaggaaatcatacacaatgcccganttccccttgagctcgaggttggaaagggtgcaaaatagctgagagagaatggttctctggtgtatctcaatgtgtatgatcttacacctgccaacaattatctttacgcctttggggttggaatctttcatcgggcat

SEQ ID NO: 51084 - DNA, 261 bp, Glycine max
  unsure (1)..(261): unsure at all n locations; Clone ID: 701139477H1
tttggaagaagctgatcggagaagatggtgcagcgtctcacctaccgcaagcnccacagctatgccaccaaatccaaccagcacagagtcgtcaagactcccggtggcaagcttgtttatcagaccacgaagaagagggccagcggacccaagtgccctgtcactggaaagaggattcaagggattccacatttaaggccaacngaatataagagatcaaggttacccaaaaaccgnnngactgtgaaccgtgcatatggt

SEQ ID NO: 51085 - DNA, 260 bp, Glycine max
  unsure (1)..(260): unsure at all n locations; Clone ID: 701139478H1
acacattacattactaagtctnngttcatttgagtagtagtgatggctagcctcaaggttgcatgtgtggttgctgtgatgtgcatggttgtggtggccatgagtgctgcacccatggcacaggccgcaatcacgtgcgggcaggtcgccggcgacatgtctccgtgcttcagttatcttcgaagcggcggaaaaccgtcgcaggcctgctgcaacggagtgaagtccctcagcagcgcggcgaagaccaccgcggaccg

SEQ ID NO: 51086 - DNA, 263 bp, Glycine max
  unsure (1)..(263): unsure at all n locations; Clone ID: 701139479H1
cactccttcatccatgacgcttggctcttcaggatccagtgtcgtggttccaaggaacttcagattgctggaggagcttgagaagggagaaaaaggaatcggagatggaacagttagctatggnatggatgatggtgacgacatttacatgcgctcttggactggaaccattattggcccctataatactgtacatgaaggaagaatttatcaattgaagttgttttgtgataaagactacccagaaaagcccccaagtgttc

SEQ ID NO: 51087 - DNA, 263 bp, Glycine max
  Clone ID: 701139481H1
gctagaagaatgtccagctcatcggaatatttggtattttccggccaccacccggcgaactctccggcggaaaagtccactttctctcagacttgtagtctattgagccaatacatcaaggaaaagggtaccttcggagaccttaccctcgggatgacttgcactgccgaaacaaacggttcccctgagacatcgtgtcactctgcaacaaccatggagttgtttcccacgatcatcacgcaacggaacccaactactgtgga

SEQ ID NO: 51088 - DNA, 262 bp, Glycine max
  unsure (1)..(262): unsure at all n locations; Clone ID: 701139486H1
gtacccatttcgcgtgcgatagaattttctagagcgagagatttcggcgnaatgggtccaaacgcggcggcggcnaaacaagcggagaaactccgaattgacggcaacacttacttcaaaaaagnccgtttcggtgccgccatcgacgcttacaccgaggcgattacgctgtgccctaatgttccggtttattggacgaatcgcgcgctgtgccatctcaagcgcaatgattgggaganagtagaggaagattctcggaagg

SEQ ID NO: 51089 - DNA, 264 bp, Glycine max
  unsure (1)..(264): unsure at all n locations; Clone ID: 701139487H1
ccaccgctcacaaccagtcctacaangcccacaagaatggcatcaaaaagccaaagaggcaccgccacacttccaccaaagggatggatccaaagtttctgaggaaccaaaggtacgcgaggnagcataacaagaagagcggtgaaacagccacggnagaagagtaaagtgtcactctcaaatggggctattaggatttgatttgctattcaagtcccatatgttttgtgtcaaatctatatttagtagtatagtcattttgat

SEQ ID NO: 51090 - DNA, 263 bp, Glycine max
  unsure (1)..(263): unsure at all n locations; Clone ID: 701139488H1
ggtggacaggctggtttgacgtattggagtcctaatgtgaacattttccgtgacccacggtggggccgtggccaagagactcccggcgaggacccganattggccgcanaatacgccgccagctatgtcnaaggactccaaggcgatggtgccggaaattcgcctcaaggttgctgcttgtngtaaacactacactgcctatgatcttgataattggnatggtgtggacacgtttcatttcaacgccaaggtgagtaaacagg

SEQ ID NO: 51091 - DNA, 259 bp, Glycine max
  unsure (1)..(259): unsure at all n locations; Clone ID: 701139489H1
tttaaacctctcttacttggatcaactcacaaccactctcttttattcttagctttcctttccagttcatacttcatcctattattactttccctctttgcattccaaatggccactgttgaggttgcacagcaaacaccaacaactgtgacagagaatgaaacaacgactgaggtaaccaagattgaggnaactaccccagaacagccagccaccgaggttactgccccagaaacagtcaacgaagaagcaaaagagg

SEQ ID NO: 51092 - DNA, 257 bp, Glycine max
  unsure (1)..(257): unsure at all n locations; Clone ID: 701139490H1
gtccctccttcctctgccttataattcttgtgacccttttngctggtagcattgaaagtgcaccagcaaacgtgaagccaagccattatgtcgcacccttcaataggagtgtttttccttctggttttctatttggaataggctctgcagcttaccagatagaaggagcagcagctatagatggcagaggaccaagtatatgggacacctatactaaacagcaaccagggaagatttgggatcatagtgatggaagt

SEQ ID NO: 51093 - DNA, 258 bp, Glycine max
  unsure (1)..(258): unsure at all n locations; Clone ID: 701139491H1
tcgagtttcacagcagcaatggtgtacgtcaaggctcagaaatcaaaagcctacttcaagagatatcaagtcaagttcaagagaagaagagagggaaaaaccgattaccgtgccaggattcggttgattaatcaggacaagaacaaatataacactccgaaataccgatttgttgttcgcnttagcaacaaggacattgttgcacaaataatatctgctagcattgctggcgatattgttcttgctgcagcatatgca

SEQ ID NO: 51094 - DNA, 262 bp, Glycine max
  unsure (1)..(262): unsure at all n locations; Clone ID: 701139492H1
gcntnttccgcccacttcagcacttcgctcnctctgtgcttcaccaaccatggccgaaatcgaagctatcgttccagatccctctcaaatcgacgtcnnacttttcaaccgctggagctttcgacgacgttgaggttactgatatgtctcnggctgattacattggagtgtccccgtcaaagcatgctacatatgttcctcacactgnctggtntgtatcagtgaagaggttcaggaaggcgcatgccccattgttgagaga

SEQ ID NO: 51095 - DNA, 243 bp, Glycine max
  unsure (1)..(243): unsure at all n locations; Clone ID: 701139493H1
gggagcaagtacaaccagtggctgaancncaagcctgaggagaacnaagaagagaaggcagagncnaagccagcagaggaaaagaaggaagaaaaaccagaagaaaagacagaagaagagaagaaggaagagcctaaaccaccttcaccatgtgtgctgtttgtggacttgcattgtgagggatgtgccaagaaaattgagagatacattatgaaaatgagaggagttgaaggagtggtattg

SEQ ID NO: 51096 - DNA, 263 bp, Glycine max
  unsure (1)..(263): unsure at all n locations; Clone ID: 701139494H1
ctctntctctcacacacacactncgctnccnacttgctacttattgttaatcccaaatcattgcattcccttcgctgacgcgaatgcgaccaagatgccgagaatggagggcattctgaaccttccagtgcaagaccctctttgtcccgagttttctgctgctcacataaattgggtcaaattggaaggtggtcgccaatgtggtgataatattgctctgatnccttttgccagagttgatgatttgtcaaaggggaatctcc

SEQ ID NO: 51097 - DNA, 270 bp, Glycine max
  unsure (1)..(270): unsure at all n locations; Clone ID: 701139496H1
aaattnaantctcttgagataaaagtgatacgtgtagatctaggaagaggcgttgcctatttaaagaagctaaccctccacaaggaattaaggtncaagantttgttgtgagctataagctagtttatcgtgaggagaatatgaagttgtttgtcttctttgttgctgcagtagttttggtagcatggccatgccatggcgcaggctaccaaaggttccctctccgaatgaaaactggctatggtgagcgtcttcggaggtaaaatgcgc

SEQ ID NO: 51098 - DNA, 256 bp, Glycine max
  unsure (1)..(256): unsure at all n locations; Clone ID: 701139501H1
tccatctctctcacaaaatgaccaacaatatcaaattgctcccttctcttcctcttcctcttcctctccaccctccacatagcttccaccctctcaacccccaccaacttcatcaagtcctcctgcagcaccacccagtacccagccctctgcatccagtccctctccgtctacgcctccaccatccagcaagacccccacgagctcgtccagacagccctctncctctccctcaaccacaccgaggccaccaaaa

SEQ ID NO: 51099 - DNA, 269 bp, Glycine max
  Clone ID: 701139502H1
aattgcttcaatatgattttgctgatgttgtgcttcaccaacttgagcatagcttttgctcaaagtcatatgaatggatttggagagcagccactggccaagattgccattcacaagaccgttttggcgctacacagttctgcttccattatagcagtcccttttgtgctaggaactaagggtgaggatacccaatgggtgactgtagagctagagtccccaataccatctgttgatgactgggtcggagttttttctccagcaaactt

SEQ ID NO: 51100 - DNA, 267 bp, Glycine max
  Clone ID: 701139503H1
gcgcctttctccaagtatcctcccatgaaggttcttttgatgaccattcagaatgctcctccggggcttgattatgatcgtgatagaaagttctccaagtcttttaaggaaatggttgctatgtgccggtaaaagatcaaacaaagaggccatctgtggagaagttactcaaacactccttcttcaaacaagctaagccaccggagctttctgtaaagaaattatttgctgatttaccgcctttgtggaaccgtgtaaaatccctcc

SEQ ID NO: 51101 - DNA, 269 bp, Glycine max
  unsure (1)..(269): unsure at all n locations; Clone ID: 701139504H1
gtgagagaaaaagaaagaagaaaatggcaaactttccagttgttgacatgggnanacttaacaccgaagagagagcagcagccatggagattataaaagatgcctgtgagaactggggtttctttgagttggtgaaccatgggatatccattgagttgatggacactgtggagaggctcacaaaagagcactacaagaagactatggagcaaaggttcaaagaaatggtggccagcaaagggcttgagtcagttcaatcagaaatcaat

SEQ ID NO: 51102 - DNA, 269 bp, Glycine max
  unsure (1)..(269): unsure at all n locations; Clone ID: 701139505H1
gggccgctcgcgctctctcaatctagccttctttctttttttcaatttccaaatcacgaaacttcaagaagatggagaangcgatcaacagacagaagattttgcttcatcatctcaacccttcatcatccacccaccccaacgaatcatcctccctccatgcttcagcatgtgtggcgggggatagcgctgcttatcaaaggacatcgacattcggggacgatgttgtgatcgtggctgcttatcggactgctcattgcaaagctaaa

SEQ ID NO: 51103 - DNA, 266 bp, Glycine max
  unsure (1)..(266): unsure at all n locations; Clone ID: 701139506H1
ccagagttgaaaagcaaagaacagacagcacttactagtccaacagcgacggctgaacctctttgttctctctgtctnnnnnnnnnnnnnnnnnnnnnnnnnnnnnnnnnnntcaaatatccttgagccagacatgtacaggaacgctgcttcacgtcttagggtcatcagtgcccgttcgtgcagcagcagcaggatacctgccagtgccagatttgcaagttccgttgccacacaacaatcctcttcctggtttgggtggttta

SEQ ID NO: 51104 - DNA, 263 bp, Glycine max
  unsure (1)..(263): unsure at all n locations; Clone ID: 701139507H1
aacgcaaacgcaaacgcaaacgcaaacgcagagcgtgatccattgacgaagatggtgcagcgtctcacctaccgcaagcngcacagctatgccaccaagtccaaccaacacagggtcgtcaaaacccctggtgggaagctcgtttatcagactaccaagaagagggccagcggacccaagtgccccgtcactggcaagaggattcaggggattccacacttgaggcctgcngagtacaagaggtcaaggttacccagaaaccg

SEQ ID NO: 51105 - DNA, 136 bp, Glycine max
  unsure (1)..(136): unsure at all n locations; Clone ID: 701139508H1
ggccactcgtttttatatcatttcattattttcttctcccttcgatttctccagaacagcaagggngaattcaattcctcatcgttgcanttcttccctctctagattctcatctttcctctcttctntctccttg

SEQ ID NO: 51106 - DNA, 262 bp, Glycine max
  unsure (1)..(262): unsure at all n locations; Clone ID: 701139509H1
ttttcccgtgtacgaacgaatccaatccaccaaatcggcggcnacgcttccgctctgtctcgaaaccacagatctgcncgcggaaccgcgtctccgactatctccgattgatcttccggtaaagtggaccggagatgccggttgccgcttccgccatttacttcctcancctccgcggcgacgttctcatcaaccgcctctatcgcgacgatgtcgggggaaatatggtggatgcttttaggacgcatattatgcaaacgaa

SEQ ID NO: 51107 - DNA, 261 bp, Glycine max
  unsure (1)..(261): unsure at all n locations; Clone ID: 701139510H1
cacattacaagcaacaagttaacgcttaacaccactctccccaatccttttgtgtatgcaaaatgagaccatgcaaatgcaaatgcaatgttctctctgctctcattcttcttgtcacattcctttttgcttccgtccactgtgaagacncatatcggtacctcacttggaaggtcacctatggtgacatttatcctcttggtgttaagcaacaggggatcttaatcaatggacagtttccggggcctcaaatagatgctg

SEQ ID NO: 51108 - DNA, 259 bp, Glycine max
  unsure (1)..(259): unsure at all n locations; Clone ID: 701139511H1
tcccgggatgtcgccggancccggagcacacgctcctctcctcccgggatccaaggatgttcctccggcaactgtgtnnggtgccgtgttcaatgtcgccaccagtataatcggcgccggaataatgtctcttccggcgattctcaaggtcctcggcgtgattccggcgttggtgctgattctcgtgattgcgtttcttgccgaactatcggtggcgttcctcatgaggttcacgcgtgccggccaaacgacgacgtat

SEQ ID NO: 51109 - DNA, 98 bp, Glycine max
  unsure (1)..(98): unsure at all n locations; Clone ID: 701139512H1
ggtggatatcgtggacatccttttcaaaccagctatttcatnctgcaggaacttgctccctttggtgatggctttggttgtnctaggcatatattcct

SEQ ID NO: 51110 - DNA, 262 bp, Glycine max
  unsure (1)..(262): unsure at all n locations; Clone ID: 701139514H1
gtnagaganaaanaaagaagaaaatgnccaactttccagttgttgacatggggaaacttaacaccgaagagagagcagcagccatggagattataaaagatgcctgtganaactggggtttctttgagttggtgaaccatgggatatccattgagttgatggacactgtggagaggctcacaaaagagcactacaagaagactatggagcaaaggttcaaagaaatggtggccagcaaagggcttgagtcagttcaatcaga

SEQ ID NO: 51111 - DNA, 250 bp, Glycine max
  unsure (1)..(250): unsure at all n locations; Clone ID: 701139515H1
gttttgtcgtttgcttctttctttgattaatgatgactagctttaaggttgcatgtgtggttgcgatgatgtgcatggttgtngccatgagtgttacacccatggcacaggccgcaatcacgtgcgggcaggtcgccggcgacgtgtctccgtgcctcagttatcttcgaagcggcggaaaaccgtcggacgcctgctgcaacggagtgaagtcgctcatggcgcggcgaagaccaccgccgaccgccag

SEQ ID NO: 51112 - DNA, 261 bp, Glycine max
  unsure (1)..(261): unsure at all n locations; Clone ID: 701139516H1
agaatatgaagttgtttgttttctttgttgctgcagtagttttggtagcatggccatgccatggcgcaggctaccaaaggttccctctccgaatgaaaactggctatggtgagcgttcttcggaggtaaaatgcgcaagttttaggcttgctgtggaagcacacaacanccgagccttaaaaccattcctgaagagtgcgttgaaccaacanaggactacattaatggcgaacaatttagatcagactctaaaacagttaa

SEQ ID NO: 51113 - DNA, 269 bp, Glycine max
  unsure (1)..(269): unsure at all n locations; Clone ID: 701139517H1
acagcgccctagatttgctcttctttgcttcggaanaaagagaaaaacaaataacaatggcgttcgctttctttcctncggcagagttctcttcgcttccgtcttcatactctctgcttaccaagaatttaacgaatttggagttgatgggggacctgcagcaaaagcactcagacctaagtttgatgcctttacacatcgagtgcattctcaagttggcttcaacttcctgagattgatctgaaattttaattgctggggctattgct

SEQ ID NO: 51114 - DNA, 266 bp, Glycine max
  unsure (1)..(266): unsure at all n locations; Clone ID: 701139518H1
ggnaatcactttcgtgttacaacatatggggaatcacatggaggaggtgttgnttgtgttattgatggatgtcctcctcgccttcctctctctgaagcngatatgcaagtggatctcgacagaaggaggccaggtcagagccgaattacaactcctagaanggagactgatacatgtaaaatattttcaggagtttccgaagaatcactactggaactccaattcatgtatctgtacccaatactgatcaaagaggacatgactat

SEQ ID NO: 51115 - DNA, 265 bp, Glycine max
  Clone ID: 701139519H1
gctcaaccctagtaagccgcaatggtgaagtactcaagggagcctgacaatccaactaagtcttgcaaggctagaggcgccgaccttagggttcattttaagaacacaagggaaactgcctttgcaatcaggaagttgcccttggtcaaggctaaaaggtacttggaagatgttcttgcccacaagcaggcaattccttcagacgtttttgtcgaggtgttggaaggacagcccaggctaagaatagacactctaatggccaagg

SEQ ID NO: 51116 - DNA, 262 bp, Glycine max
  unsure (1)..(262): unsure at all n locations; Clone ID: 701139521H1
aaatttccaaggtaaaaagatgaatctgaagaacatgaagattccgaacgttccaggcggcggtgcgtcntctgcgctgctgaagcttgggcttcttggtggaattggtttatatgcagctgctaacagtctctacaacgttgaaggaggtcaccgagccattgttttcaaccgtctagttggtgtcaaagacaaggtctatcctgaaggaacacactttatgattccgtggtttgagaggcctgttatctatgatgtccgt

SEQ ID NO: 51117 - DNA, 263 bp, Glycine max
  unsure (1)..(263): unsure at all n locations; Clone ID: 701139522H1
gcgacttgctttttatataaatatatcggttattctccctctcttctcaatcgtcttctccgcgttcaactcgcgtgcattgcagccagaccaagcgagaaagggaagagaattcgagagagaaacttcnnnnnnnnnnnnnnnnnnnnnnnnnctagagagagaaaccaaagcccaaacaccccttttaaccattgcaattctcgttcggtttcagagaanccttttgaatttttttgaattttctgggaaacagggcgttt

SEQ ID NO: 51118 - DNA, 138 bp, Glycine max
  Clone ID: 701139523H1
ttttctatctctcttttttttctctctctccattctatgctttttttttcttctcttaatttatttgtaaagtgtgctactactgtttaatttggtgagaattcaagaggttggtggtgtgcagaagtgcttatatat

SEQ ID NO: 51119 - DNA, 261 bp, Glycine max
  unsure (1)..(261): unsure at all n locations; Clone ID: 701139525H1
ttccctcaggatagctgganccccgcgggcgagttctatcgggtaaagccaatgattagaggcatcgggggcgcaacgccctacgacctattctcaaactttaaataggtaggacggtgcggctgctcngttgagccgcnccatggaatcgagagctccaagtnggccatttctngtaagcagaactggcgatccgggatgacccggaagcngggttacggtgcccaactgcgcgctaacctagaccccacaaagggtgtt

SEQ ID NO: 51120 - DNA, 87 bp, Glycine max
  unsure (1)..(87): unsure at all n locations; Clone ID: 701139526H1
tggttgcttggcctttctaacttatttactccatnaatnatgctaactgctttcatttttcggcctttaaatncatttatccttctc

SEQ ID NO: 51121 - DNA, 254 bp, Glycine max
  unsure (1)..(254): unsure at all n locations; Clone ID: 701139527H1
agcacccaaaactatggttcttctacagctagatccgtttctcaatgagctcaccagcatgtttgagcgcanactaagcttggctctgtttgggttactcttaaacgatcatctttgaaatctaaggtgcagaggaataaattggccgctgccggtgaagcaattgagtttagatgccttatacgtgcaatgatgggaaaaagacaatttctacttcggttggaccgaagatcaccagcgctttcaagcttctt

SEQ ID NO: 51122 - DNA, 260 bp, Glycine max
  unsure (1)..(260): unsure at all n locations; Clone ID: 701139530H1
gccagaggagactctngtgnaggcccgcagcgatactgacgtgcaaatcgttcgtctgacttgggtataggggcgaaagactaatcgaaccgtctagtagctggttccctccgaagtttccctcaggatagctggagcccgcgggcgagttctatcgggtaaagccaatgattagaggcatcgggggcgcaacgccctcgacctattctcaaactttaaataggtaggacggtgcggctgctctgttgagccgcgccatg

SEQ ID NO: 51123 - DNA, 267 bp, Glycine max
  unsure (1)..(267): unsure at all n locations; Clone ID: 701139533H1
gcggttgcagaagaagattgcaagatgaagttcaacatcgcgagtcccaccactggatgccagaagaagctcgagatcgangacgatcagaaactacgagcattttgggacaagaggatctcacagcaggtcagcngagatgcattggtgaggaatttaagggctatgtcttcaaaattactggaggttgtgacaaacaaggattccgatgaaacagggagtgcttactcctggtcgtgttcgacttttgcttcacaggggaactcc

SEQ ID NO: 51124 - DNA, 264 bp, Glycine max
  unsure (1)..(264): unsure at all n locations; Clone ID: 701139534H1
tgcatatggtgtccgaaagttactcttctagacagccaaggccattgaccaccgttggctggcagaacantaatagaaatggaagatcaagaatacctagtgacagatatcggtcattggatgatgagggtttcatgattgttgatcgcacttcactgtatggacctaggaatatgctgatcgacntagagacatgaggatggacatagacacacatgagttatgaggaactacttgcacttggagagagaataggccatgtga

SEQ ID NO: 51125 - DNA, 264 bp, Glycine max
  unsure (1)..(264): unsure at all n locations; Clone ID: 701139536H1
tacaccacacctcctcctcgtttatccatcncccccatctacaacagctaatgcgatccaattccaattagatctagggtttctctttccctcgccggagaacaacaccgattttccggcgctggcttcacggatctcgcatcactgtttgataatacattggcaaaatgtacaccaaatcggcgcagtcatcgtttcgggaccggacacacgaattccagagcattgcggagaggttgaagaagacaggatcagcgccaaatg

SEQ ID NO: 51126 - DNA, 166 bp, Glycine max
  unsure (1)..(166): unsure at all n locations; Clone ID: 701139537H1
caatggcanngtgtttgggtgtttcagtttcaactcttggctcattctctcttagtaggcccacaatcttttatcgatctcccattaatatctctctctttgcctctcaatctcatttccctgctgctgcatttggttatttgacaccntccaacccncacangnt

SEQ ID NO: 51127 - DNA, 262 bp, Glycine max
  Clone ID: 701139538H1
ggatcctgcagcttctgtgtcctggggtaagatggtggacagcatagtcacactcctttctcggccagaagaggatagagttcaggaggaacctgacatgccagatataacagaaaatgcgggttatagcaccacctttgttcttctttacaatgctggaaagaaagaagaagacccacttaaagatataagagatcccagggagttttttgtggcatcattgtcccgactttctgcactttcccctgggaggtatcctaag

SEQ ID NO: 51128 - DNA, 259 bp, Glycine max
  unsure (1)..(259): unsure at all n locations; Clone ID: 701139539H1
cttcctcaatgatctcttccccagctgttaccactgtcaaccgtgccggtgccggcatggttgctnccattcactggcctcaagtccatggctggcttccccaccaggaagaccaacaatgacnttacctccattgctancaacggtggaagantgcnatgcatgcaggtgtggccaccagttggcaagaagaagtttgatntttttcctacctgccagaccttgatgatgcacaattggcaaaggaagtagaatactt

SEQ ID NO: 51129 - DNA, 254 bp, Glycine max
  unsure (1)..(254): unsure at all n locations; Clone ID: 701139540H1
cgcanttcttctagatttaaggaagatgggtaaggaaaaggttcacatcagtattgtggtcattggccatgtcgactctgggaaatccactaccactggtcacctgatttacaagcttggaggcattgacaagcgtgttattgagaggtttgagaaggaagctgctgagatgaacaagaggtctttcaagtatgcctgggtgctggacaaacttaaggctgagcgtgaaagaggaatcaccattgatattgctt

SEQ ID NO: 51130 - DNA, 258 bp, Glycine max
  unsure (1)..(258): unsure at all n locations; Clone ID: 701139541H1
gggtgatgccaacggctccaaccccttcgcttcgtggggtcaattcgtggattttcctctcccttccttccatctccggcttcttccccggcttggaattcggattcggattcggatcatccgtgaacacangtgtggactggagggagactcccagagcgcacgtgtggaagctggtgcttcccggcttctccaacgaggacgtgctggttgagctccaagacgagagggtgctccaagtcagcgtggagagcggca

SEQ ID NO: 51131 - DNA, 255 bp, Glycine max
  unsure (1)..(255): unsure at all n locations; Clone ID: 701139542H1
anaatngtgaagtttctgaaaccaaacaaanncgtcatcgtccttcanggacctacgccggcaaaaaanccgtgatagtncgaaccttcgatgaacgcacgcgcganncccctacgggcactgcttggtggcagggataaagangtaccctgcgaaggtgatcaagaaggattcggccaagaagacggccaagaagtcgcgtgtgaaggcgttcgtnaagctcgtgaactaccagcacctcatgcccacgcgcta

SEQ ID NO: 51132 - DNA, 254 bp, Glycine max
  Clone ID: 701139543H1
tttccttttcccttccgttggtgccattcgtgcagcaccggatcctctcatttctccggcgataactctcccctttccggcgaattcaccgcttcctcgatatgaatcccgagtatgactatctgttcaagctccttctgattggagactctggtgttggtaaatcatgccttcttctaagatttgctgatgattcatacattgagagctacataagcaccatcggagttgattttaaaattcgcactgttgag

SEQ ID NO: 51133 - DNA, 252 bp, Glycine max
  unsure (1)..(252): unsure at all n locations; Clone ID: 701139544H1
caaagccatcgtcttcttctcagacaagtagtttngtaaaagatggctgatgctgaggatattcaaccccttgtctgtgacaatggaactggaatggtgaaggcaggatttgctggtgatgatgctcctagggctgtgtttcccagtattgttggccgacctcgtcatactggtgttatggttgggatgggtcaaaaggatgcctatntaggtgatgaagcccagtcaaacagaggtattcttactttgaag

SEQ ID NO: 51134 - DNA, 253 bp, Glycine max
  unsure (1)..(253): unsure at all n locations; Clone ID: 701139545H1
cnatggnagagtgtntgggtgttacnnnttcaactnttggcncattcnctcttagtaggcccacnatnttttatcgatntcccattantatctctctctttgnntctcaatctcatntccctgntgctgcatttggtnatttgacacgttccnatncncacctgtangccggtgtctcctccgnntccaaggtcgatactncgctagacntaactcaaccngatctcgtgatagcggcggcggtgctaaggaa

SEQ ID NO: 51135 - DNA, 256 bp, Glycine max
  unsure (1)..(256): unsure at all n locations; Clone ID: 701139549H1
gttttttcctcggtcaccattcttgcagttcctgaagaggaacttgaatnntatcaccctccaattcacctccctcgcgaatttcaanctcatatcntgtcttccttcctttcatcactactactcaacttaatatataggnagctagctnttagtcctctactgcttgcatcacttnaaattagcaacaaacttaagcccatcaaaattattgcaattacacatatataaagatatatattggaattctccagtt

SEQ ID NO: 51136 - DNA, 140 bp, Glycine max
  unsure (1)..(140): unsure at all n locations; Clone ID: 701139552H1
accctttcaacttctnctncaacgctctntagtacaaacngaagaacgaagcctcctcgtncttcttcatctgcgcntctctctccctctctagaaccgtaaccgtcgttngattctttctctctcctcaaccagagana

SEQ ID NO: 51137 - DNA, 256 bp, Glycine max
  Clone ID: 701139557H1
gagaaatctgatgtttatgggctttggagtaatattatgggaaattgtaactgaaaagataccttgggataatctcaactccatgcaggtgattggagctgtaggattcatgaatcaacggctagaaattccaaaaaatgttgatccacggtgggcttctataattgagagctgctggcatagcgatccagcttgtctgccaacgttcccagaactgcttgaaaggctagagatctgcaaaaacagtatgccattc

SEQ ID NO: 51138 - DNA, 254 bp, Glycine max
  unsure (1)..(254): unsure at all n locations; Clone ID: 701139558H1
agaggatcatccttattattgttaattgaagaagaggaagacctaacataaagatgtccgttacggagctgaaggagcgtcacttggcggcgacggaaaccatcaacagtttganggagcgcttgaaggagaggcgtctatcattgctcgatacagatattgctggttacgcgaggtctcaaggtagagcccctgtcacctttggtcccaccgatctcgtttgttgtagagcgctccagggtcatacgggaaag

SEQ ID NO: 51139 - DNA, 255 bp, Glycine max
  unsure (1)..(255): unsure at all n locations; Clone ID: 701139559H1
gccctaatctgtgtccgattttatcaatcacagactcaaagattcaggtccttatcaccaagatccaacaacttctcaaccacaacgagttgctatttccttcgattcacgaacccagaaaattanagaattaaaaaagatatcgagtatcanaaacggcatctggaaaacatgtctcaataccatggtgatgaaatggagtatgcggcagacgataatgaaatggcagaggtagaagaggatatgtatttccgt

SEQ ID NO: 51140 - DNA, 252 bp, Glycine max
  unsure (1)..(252): unsure at all n locations; Clone ID: 701139561H1
gtagcnngtttacgtgaatggtttgtccaatcagctgaaagacacgcgcatccnagaattccttcatggttcaatatgtccgcaacagctttttcttncaagaagaattagaagccaatgatttngnctntcaagcttacntctcntgatcaaatgaatgctgcaagcagcagttctgcgttgatagagaatatctgatgatgaagaagattctcaaatagcgaacctgaacaagaggcctaccaaattagc

SEQ ID NO: 51141 - DNA, 260 bp, Glycine max
  Clone ID: 701139564H1
gtcttccaagttttcaccatcgtaatgggttccgaaggatccagcgtcgtggttcctaggaatttcagattattggaagagcttgagagaggtgagaagggaattggggatggaactgttagctatggaatggatgatgctgatgacatatacatgcaatcttggactgggactatcatcggtccccctagtactgttcatgaagggcgtatctaccagttgaaattgttttgcagcagggattatccagacaatcctcc

SEQ ID NO: 51142 - DNA, 261 bp, Glycine max
  Clone ID: 701139565H1
gggagcagttaacaccttgggggtcaagttctacaacgatctcattaatgagattatagcaaatggcttaaaaccatttgtcacgctgtttcattgggacctcccacaagctttgaagatgaatatgggggatttctcaaacctgaaatagtggaggacttccgtaactatgctgacttttgcttcaagacatttggtgatcgggtgaagcactgggtaaccctaaatgaaccatatggctacagcgtgaatggctacagt

SEQ ID NO: 51143 - DNA, 261 bp, Glycine max
  unsure (1)..(261): unsure at all n locations; Clone ID: 701139568H1
gngcttctcctcttcttactccttacaagatgggnattgncaatctgtcccatagagttgttttggcaccgctgaccaganagaggtcttacgacaangtcccacaaccccatgccnttctctactactcccagagaacttccaacgnaggccttctcattactgaagccactggcgtctctgacacggctcaaggctatccgcaaacccctggcatatggactaaagancatgttcaagcttggaaacccattgtcgatg

SEQ ID NO: 51144 - DNA, 254 bp, Glycine max
  unsure (1)..(254): unsure at all n locations; Clone ID: 701139569H1
gtagaactgaacaagggtttctctttctctttctctgtctgcttctcactttctctcgtttcaatcgaaaaaaatcatgggcagaaaattcttcgtcggtggcaactggaaatgcaatgggaccactgaggaggtgaagaagattgttactactttaaatgangctaaagtccctggagaagatgttgtagaagttgtgtgagcctccttttgtgttccttcctttgtaaaaagtttgctgcgcctgattccca

SEQ ID NO: 51145 - DNA, 254 bp, Glycine max
  unsure (1)..(254): unsure at all n locations; Clone ID: 701139571H1
gtttatcgngaggagaatatgaagttgtttgttttctttgttgctgcagtagttttggtangcatggccatgccatggcgcaggctacccaaggtnccctctccgaatgaaaactggctatggtgancgttcttcggaggtaaaatgcgcaagttttaggcttgctgtggaagcacacaacatncgattnataaaaccattcctgaagantgngtngaaccaacaaaggactanattaatggcgaacaattaga

SEQ ID NO: 51146 - DNA, 246 bp, Glycine max
  unsure (1)..(246): unsure at all n locations; Clone ID: 701139572H1
gngaaaattgcattacttttgaaatttaaggtacttaatggcaaaaattctngtgcagatccagatcacttgaaacctgacattttttaatgcgatgacactgactgcagcttattatatgcataaccatagtagtgtttttgttggccagtgtgctagttattttagtgcatcattatatgtagtattaatttctcaactgtttatgaattctttattttgcagacttttttggtttggcagcta

SEQ ID NO: 51147 - DNA, 254 bp, Glycine max
  unsure (1)..(254): unsure at all n locations; Clone ID: 701139573H1
tctctccaacctttcactttcgtttctcagttttattcgaatncctctctcantctcctttccaaatggccagcgttgangttgcacatcaaacacnaacaacagttccagaaaatgaaacaaccgaggtaancaagacccaggaaacaancccagtcactgaggctcctgcaacagaacaaccagnagctgaggttcctgcaacagaacaaccagccgctgaggctcctgccccagaatcaaccaccgaagca

SEQ ID NO: 51148 - DNA, 254 bp, Glycine max
  unsure (1)..(254): unsure at all n locations; Clone ID: 701139579H1
ggnttgataccctctttcttggcacattcttcagcatcaaacaatcaagttggctctgtaccatgtgtaccagaattggtgccctcttgcttggcacatccttcagctccaaataatcaagctgacgttggcattctaccttttcttgattgttccatagaagatgatgacacattggctgtgaatgaaaacaacagcattgagaacgttgatgatcctgatcaggcaaacaatgcagaacgtggaccatgttc

SEQ ID NO: 51149 - DNA, 252 bp, Glycine max
  unsure (1)..(252): unsure at all n locations; Clone ID: 701139581H1
cacaaatggccaatcccttcccaacattcctcccctcttccctcatcttcntttccttcttctttttcttattctcccctctcaccgccgccaaaacacaccgtttcgcgcgcaccatctccccctcctccctgggcctggacggggagcctgagaaactaagccacctccacttcttcttccatgacgttgtcagtggccaaaaccagaccgcggtgcgagtcgcggcggccccggccaccgacaagtccc

SEQ ID NO: 51150 - DNA, 257 bp, Glycine max
  unsure (1)..(257): unsure at all n locations; Clone ID: 701139582H1
ctagtctccatacatcaacttgggnggttaaagagacggcaacgttgtgctgtccgccttgaccgagccagagcttcgtcttggccctcgattttgccctgtaaaactaatcccagtcacaacaganataatcaatggcaccgaaacagaccaaggctgagaagaagatcgcttacgatgcgaantgtgcgacctaatggaggagtacggccaaatcctcgttgtaaactccgacaacgtgggatcgaaccagctcc

SEQ ID NO: 51151 - DNA, 258 bp, Glycine max
  unsure (1)..(258): unsure at all n locations; Clone ID: 701139583H1
gganaatcgaacttgaaaaagtctaaaacccgcgntctctccgatttttgaaatggaagacgaccaattggaactctgcaangacgacggcttcgtcttcaagcgcaagnccgccgcgtcgacgccccaccgccgccgccctccgagcccgaccaagaggcggcggaaaaattccggagagagcgtaagngaccaaaccctactcaagntcaaatccaagtatgagaaagagattcttcaatgggaatcttctcgaac

SEQ ID NO: 51152 - DNA, 254 bp, Glycine max
  unsure (1)..(254): unsure at all n locations; Clone ID: 701139584H1
ctgctctgcattttggtggcatcatcagagatatnagantgagtgtgagagtcacaacttctccaattcttcaaaagggtgaaactttgaaggaaaagaaatggttggtgctatanaagcagcgattggagacgcggtgttgactttcatgtgggtgttctgttcctctgtgttgggaattgcttcagggtacataaccaatgcacttaaccttcaacacataacctacatgnggttcccttaccctcttttct

SEQ ID NO: 51153 - DNA, 72 bp, Glycine max
  unsure (1)..(72): unsure at all n locations; Clone ID: 701139585H1
gccctagcttcttctgctactccaagaccttctcttacaactnccttccacttgcttccacaacaacntang

SEQ ID NO: 51154 - DNA, 253 bp, Glycine max
  Clone ID: 701139586H1
gcctaccctactattatccctttccttcctgcctctctttgctttcctggctctttcagaagatgttgaacaagttgtggacataagtggcaaccccattttcccaggtggcacatattacattatgccatcaacttggggcgctgccggtggtggattgaaactaggccggacaggaaactcaaactgcccagttactgttttgcaagattactcagaaatcttccgtggcacaccagtcaaattcagcata

SEQ ID NO: 51155 - DNA, 252 bp, Glycine max
  unsure (1)..(252): unsure at all n locations; Clone ID: 701139588H1
tgctgtggaagcacacaacatctttggctttgagaccattcctgaagagtgcgttgaagcaacaaaggaatacatccatggcgaacaatatagatcagactccaaaacagttaaccaacaagcttacttttatgccagagacctcgaagtccatcccaaggacacatttgtgttcagtatagatggcaccgtactctctaatattccatactacaaaaaacanggatatggggtggagaaatttaactcgac

SEQ ID NO: 51156 - DNA, 241 bp, Glycine max
  unsure (1)..(241): unsure at all n locations; Clone ID: 701139589H1
aaggtaggttaacactcttcttcatcgtcgtcgcaatgggacgtgtgatccgtgcgcacctaagggagcaggctcggtcttcaagncccacacgcaccaccgcaaggccctgcacgcttccggagcctggacttcggggagcgcaacgctaccttcaagggcgtcgtcaccgacgtcatccatgaccctggccgcggcgcgccgctcgccnaggtcgccttccgccaccctttcagataca

SEQ ID NO: 51157 - DNA, 250 bp, Glycine max
  unsure (1)..(250): unsure at all n locations; Clone ID: 701139590H1
aaagacaacccagagagcgcgtcttaataaacgctcttctctgaaaacccccatttcttttcttcttncttcttctctttcgcttcttcgatctncgatcttcgtcgctgaaaatgagagagtgcatttcaatccacatcggccaggccgggattcaggttggaaacgcctgctgggagctttactgcctcgaacacggcattcagcctnatgggcagatgccaagtgacaagaccgttggtggaggtga

SEQ ID NO: 51158 - DNA, 250 bp, Glycine max
  Clone ID: 701139591H1
tctggaagagaagagaaccaactcaactcaaaactcaaattatttggtttctgctctgtaaattccctctgctgcttaacaacatccatcttctccaaaacaaaaacaaagaaatatctaaaatctggaacttacgctgatccataatttgttgcttttcttccttcgtacaatgtcagaactttagcatcacctttttgccttccttcttactaactcagataactaccgccaccatgacttcaaaatc

SEQ ID NO: 51159 - DNA, 252 bp, Glycine max
  unsure (1)..(252): unsure at all n locations; Clone ID: 701139593H1
aagctttagtttaggatgacccaagtgaggaacaagcaagtggttctaagagattatgncaccggattnccctaaagaatccgacatgaacattgttgaaggcaccataatattgaaggttccagaaggttccaatgatgtccttctaaaaaatctctacttgtcatgtgatccatacatgcgactcctcatggccaaggaccgttctttcggagatggctccttcacccttgcctctccattgaaaggata

SEQ ID NO: 51160 - DNA, 254 bp, Glycine max
  unsure (1)..(254): unsure at all n locations; Clone ID: 701139594H1
ccctacctctcntttcaagatgcagatcttcgtcaagaccctcaccggaaagaccattcaaccttgaggtggaaagctctgacaccatcgacaacgtcaaggccaagatccaggacaaggaaggaattcccccggatcagcaacgtctcatcttcgccggaaagcagctcgaggacggccgtaccctcgccgactacaacatccagaaggagtcaacccttcaccttgtccttcgtctccgtggtggcatgcag

SEQ ID NO: 51161 - DNA, 244 bp, Glycine max
  Clone ID: 701139595H1
gtccatcacaacgacatatttatattcggcatagataacaccgtactctctcaatatcccatactatgaaaaacatggatatggggtggaggaatttaatgaaaccttatatgatgaatgggttaacaagggcgacgcaccggcattgccagagactcttaaaaattacaacaagctgttgtctcttggcttcaagattgtattcttgtcaggaagatatcttgacaaaatggccgtaacagaa

SEQ ID NO: 51162 - DNA, 259 bp, Glycine max
  Clone ID: 701139596H1
ggcactagctagtgctggatttaaagtttcacgttcaaagctagttgacatgatcagcaatggtgatgtgcgtatcaactggatccctgttactaccaaaggaaccacactcaagagtggagatattgtatcaattagtggcaagggaagattaaagataggagaaataaactccacaaagaaaggaaagtttgcagtggagctcattcggtatttgtagaagtttagagagttcagaagtactttcactctcaaagta

SEQ ID NO: 51163 - DNA, 283 bp, Glycine max
  Clone ID: 701139601H1
gagaaacataaacacaaccaaccatcaagggaagttagagagagagttgagttgtgttgagagagatagagagatagaggagaagatgaacggtggtgaatcttacggtgctattgagacacaatacataaggaggcatcacaaacatgaaccaagggaaaaccagtgcacctctgcacttgttaaacacataagagctcctgttcaccttgtgtggtcactggtgagaagatttgatcaacctcagaaatataaaccatttgttagcaggtgtatcatgcaa

SEQ ID NO: 51164 - DNA, 281 bp, Glycine max
  Clone ID: 701139602H1
gaagggtttaatctttttggctgtgttatgcttctcagcactgtcactgagtcgttgtcttgcggaggataatggacttgttatgaacttctacaaggaatcatgccctcaggctgaagacatcatcaaagaacaagtcaagcttctctacaagcgccacaagaacactgctttctcctggctcagaaacatcttccatgactgtgctgttcagagttgtgatgcttcactgttgctggactccacaagaaggagcttgtctgagaaggaaacagatagaa

SEQ ID NO: 51165 - DNA, 279 bp, Glycine max
  Clone ID: 701139603H1
gcagctgaagcctatgacattgctgctattaaattcagaggatttaatgctgttacaaactttgatataacaagatatgacgtggaaagaattatggagagcaataaccttcttagtagtgaacaagctaagcggaaaagagagatggatgatggaactagaagcgaggctacagttaaccaaaaacctgtactactcaagaaaccgttctgatgcagaaaagatgcagaagccaatcagaatggaagatggttcagtatccatcctcccaacagcttg

SEQ ID NO: 51166 - DNA, 281 bp, Glycine max
  unsure (1)..(281): unsure at all n locations; Clone ID: 701139604H1
tttcctttccagttcatacttcatcctattattactttccctcctttgcattccaaatggccactgttgaggttgcacagcaaacaccaacaactgtgacagagaatgaaacaacgactgaggtaaccaagattgaggaaactaccccagaacagccagccaccgaggttactgccccagaaacagtcaacgaagaagcanaagaggaagcagcagttgagactaatgaggcaacagaagtnncnnnggaagggaaggctgagaaaacagaagaagaagaa

SEQ ID NO: 51167 - DNA, 278 bp, Glycine max
  Clone ID: 701139606H1
gcttaatcgaactattcagattctaaaaaatgagttggtggtgggctggagcaatcggtgctgccaagaagaaattcgaggaagaggaaccgccgcgaacttcccagagcgtgggcctggtgatcggcgtgacgggcatcgtgggcaacagcctcgccgagatcctccctctcgccgacacccccgccggtccatggaaggtctacggcgtcgcacgccgcccccgtccgccgtggaacgccgaccatcctgtcgagtacatccagtgcgacgtctcc

SEQ ID NO: 51168 - DNA, 278 bp, Glycine max
  Clone ID: 701139607H1
ggcaaaatctgttttttctgaagcaggctggtcaaattttctgtgcaaaggaaagaaacttcatgagcctctggatctggcactcttatttgttggtagagagttacaatcttcagatttaaacatgaacaaacatgcagactcagctcttttggacctgctcaagatctctttcgccagatccaacacttctgtggcgtttccctatgtttctacatcagaggatgtgcttttggaaaactcattgatttcaggatttgctgaagcctgtggagata

SEQ ID NO: 51169 - DNA, 277 bp, Glycine max
  Clone ID: 701139608H1
ccatgacaaagtaagaaacagggtttacaagctcaatgatcagacagcaaagctttttgtgagaccaagaggttggcatctacctgaagcacatattctgattgatggtgaacctgcaactggttgccttgttgattttggcctctatttctaccacaaccactcggcattccgacgcactcaaggtgctggctttggccctttcttttatcttcccaaaatggagcattcaagggaagctaagatatggaacagtgtgtttgagaaggctgaggat

SEQ ID NO: 51170 - DNA, 275 bp, Glycine max
  unsure (1)..(275): unsure at all n locations; Clone ID: 701139609H1
gatccttttaacaccgccccattattgcttgctcgttaattacggcaatgactcggctatttcgatccaaatcttgcggactggtggagttcaacgctgctccgccgagtccacttttccatgatgtgaaaagtgaggacgaagacaatgaagaagatgaagatgaagnnnnnnnnnnnnnnnnnnnnnnnnnnttggacagtgatgatgatgtttcgagcaacccggtttcaacggcgttgatgaatccagggtcaaaagtggagaacaaaggt

SEQ ID NO: 51171 - DNA, 272 bp, Glycine max
  unsure (1)..(272): unsure at all n locations; Clone ID: 701139610H1
gtaaagagccagtttctcatgttgtggctcgtccttcaccgagtgatattcttgagtggcattatgtgncggagggaagtgaaggaacaccttttgcaggtggatattactatggaaaaatcaagtttcctcctgaatatccatataaacctcctggaatcagcatgactacacctaatggacggttcatgacacagaaaaagatctgtttgtctatgagtgactttcatccagaaagttggaatcccatgtggtctgtatcaagcatatta

SEQ ID NO: 51172 - DNA, 271 bp, Glycine max
  unsure (1)..(271): unsure at all n locations; Clone ID: 701139611H1
agggtttactattgttacaagaatcctgtngtatatatncctcaactacatgaatgtagcacatgtacgtgttttgattganacctcatcatcaagcatgtgtgggataacgaacaccaagcaattttacatcatctatgacgggtccacaaagcgaaccagagttatcactcttcatggtgtaaaatgtgcttaggaacctaagacgagtacgtgtgctacattcatgtagttgagcatatataccacaggattcttgtaataataggng

SEQ ID NO: 51173 - DNA, 270 bp, Glycine max
  Clone ID: 701139612H1
ccagaaggacctgttaggagctttgcactggtcagagttatgcgtgctgctgaaatcgatttcaggaagccagcacgccatggtgttttggggattcctggttacgttcagtttacatcccccatccgtagatatttggatcttcttgctcattatcaggtaaaggcattccttagaggcaagcctccaccctttacagctggtaagcttgaagggatagcagctgttgtaaatgagaatgttagaacagtgaggaaatctgcagcagca

SEQ ID NO: 51174 - DNA, 272 bp, Glycine max
  Clone ID: 701139613H1
ggggtattgtaagtggcagagtggccttgctgccacgatccactgagattcagcccttgtcgctttggggggtcagagtgagaaagagaaagagagaattcgtaaaccctaatttcggaaagatcggcgatgactgcctccaaggatcgcgagaacttcgtctacatcgccaaactcgccgagcaggccgagcgttacgaagagatggtggaatcaatgaagaacgttgcgaatctcgacgttgaactgacggtggaggagcggaatttgct

SEQ ID NO: 51175 - DNA, 253 bp, Glycine max
  unsure (1)..(253): unsure at all n locations; Clone ID: 701139614H1
anccgccgggatgtcgccggtacccggagcacacgcacctctcctcccgggatccacactccaaggatgttccgccggccaccntgtccggcgccgtgttcaatgtcgccaccagcataatcggcgccggaataatgtctcttccggcgactctcaaggtcctcggagtgattccggcgttggttctgattctcgtgattgcttttcttgcagagctatccgtggagttcctcatgangttcacacgtgccgg

SEQ ID NO: 51176 - DNA, 270 bp, Glycine max
  Clone ID: 701139615H1
ctcgcggatctaatattaaggaatagcttaagggcacattacaatgaaggcattgattctggttgggggatttggaacaaggctgaggccactgacactcagtttccctaagcctcttgttgattttgctaacaagcctatgattttgcatcagatagaagcccttaaggccattggagtgactgaggtagtgctagccatcaattaccaaccagaggttatgttgaatttctgaaggattttgaatcaaagctcggcatcaagatcaca

SEQ ID NO: 51177 - DNA, 284 bp, Glycine max
  unsure (1)..(284): unsure at all n locations; Clone ID: 701139617H1
cggtggntacgaagactgagtcaaatactagttgcagggnatgccattttatatgaatgtnnttcaaacaataatgagcattgaagataatggtggcttacgtgnacttgccattaatatcctgggaagattcttgtcaaaccgtgacaacaatatcaggtgaattgcttactggatatgcaagtgnnnnnnnnnnnnnnnnnnnnnnnnnnncaagagagagtcttgaatgaatgacaacaatgtctataaaatcattagcataatgatctggtggatgtatt

SEQ ID NO: 51178 - DNA, 279 bp, Glycine max
  Clone ID: 701139618H1
gcgaattctaatggttggtcttgatgccgctggtaagaccaccatcctgtacaagctcaaacttggagagatcgttaccacaattcccaccattgggttcaacgtggagactgtggaatacaagaacattagtttcactgtctgggatgttggtggccaggacaagattcgtcccttgtggaggcactacttccaaaatacacagggtctcatttttgttgttgacagcaatgacagggacagagttgttgaggccagagatgagttgcacaggatgtt

SEQ ID NO: 51179 - DNA, 237 bp, Glycine max
  unsure (1)..(237): unsure at all n locations; Clone ID: 701139619H1
cgaaaccaaagcttctgcttttgtgatggaactagagagctgagaggcctaaacctctgtttgcncctctcaccctttttggtgcagatcttgaacttgagctgcattttcatagaaaaccagcaccaagaaatggaacataccatgttacctgccattggatctgttttccctcgtggtgtctttgccgcactcttgctcatgttactgttttctttctccacatncaatncganc

SEQ ID NO: 51180 - DNA, 277 bp, Glycine max
  Clone ID: 701139622H1
cgataacaccctatgggctggatctgtggctgcaccacccgatgcaccattgatggattacattaagcctcttcgcggccatgtgatggagctcaacaagtatctggctcaagattcgaggatcgatcatttgccagctccccgtgggtgatgggattaccctgtgccgccgcatcatctgatcattttctcttcatctagatttttcatgacagatattcctttcattaaaacaggttgcgtgaatggtggagttctcaaatgttctactgtcttt

SEQ ID NO: 51181 - DNA, 278 bp, Glycine max
  unsure (1)..(278): unsure at all n locations; Clone ID: 701139623H1
tgattttgtaattgagttcgatcaaatagctcccagtactttaattgntttctgaatatcatcacttaatttgaaggaaanatgttgagcgtagtgagatccgccaggcacaaagggcagaaggcccagtcaaccatccttgccattggaactgcaaacccaccaaactgtgttgatcagagcacctatcctgactactacttcagnatcaccaacagtgagcacatnaccgagctcaaagagaaattccagcgcatgtgtgacaagtctatgatcaa

SEQ ID NO: 51182 - DNA, 277 bp, Glycine max
  Clone ID: 701139624H1
gtgaagtcgctttataacactcaacctaagatgcagaacgaggaaggacagatcaccgagctttacattcctaggaagtgctctgccacaaaccgattgattaccgctaaggaccatgcttcggttcaggttaacattgggcatgtggatgagaatggcgtctacaatggccatttctccacttttgctctctgcggcttcatacgtgctcagggtgatgctgacagtgccctagatcgcttgtggcagaagaagaaagttgaagttaagcaacagt

SEQ ID NO: 51183 - DNA, 273 bp, Glycine max
  unsure (1)..(273): unsure at all n locations; Clone ID: 701139625H1
tgacaatgaggcctgctcttgctttgcttcctcttctatttgctttctngttagctgccactacagaatcaagaaaagatacaggggaatattggaaaatgatcatgaaagatcaggaaatgccagaaggacttcaaggtcttgtttcatttcaatctgaaaataaccctaagactcaagagcagcttggtaaaggttccaaaaaccattgtgaagagtctctagttacaaatacacaagttaatagtgacttcgaacccataccaagtgtta

SEQ ID NO: 51184 - DNA, 273 bp, Glycine max
  unsure (1)..(273): unsure at all n locations; Clone ID: 701139626H1
ggaaggagagaangagaatcccgattgtaacgccacttnggtgaactccttctgcgaaatcacttcctcttccaaagaagaagcccttttctttttggagagccacaatttcgacctagacgccgccgtttcgactttcctcgacaacgccaacaaccctctcatccctcaaaacgacgacgtcgttgtcgccgcaaacccaaaccccaactccgtttcccctccctccgattctcactccccggacttcaacccttccaggtctccttcgcc

SEQ ID NO: 51185 - DNA, 270 bp, Glycine max
  unsure (1)..(270): unsure at all n locations; Clone ID: 701139627H1
gaaccctcgatcactctcacgcgctcctatattcgctcctccacnctcgctctctcgaacaaccacaacaccatcttcatcacatggcaaacgcagcatctggtatggcagtccatgatgactgcaagttgaggtttttggagctgaaggcaaaaaggacacaccgtttcatagtttttaagattgaggagcagcagaagcaggtcattgtggagaagcttggtgagcctgcccagggctatgaagatttcactgccagcctcctgctna

SEQ ID NO: 51186 - DNA, 269 bp, Glycine max
  unsure (1)..(269): unsure at all n locations; Clone ID: 701139628H1
ggnaaatggccattccgtcgtgntnatggaattcaggaacctgttgctgttgnatgtctgccgtctntctgctatgcagtttcatggttgggtatctntcttcattctngtgtactataagttcgactttgaggccagataagaagacttactatnagtncactggatngtggcatatttatgggatnttatccatgaacgcatggctgtggagtgctgttttccatagtagagccgtggattaacagagaagctggatttnncntctg

SEQ ID NO: 51187 - DNA, 272 bp, Glycine max
  unsure (1)..(272): unsure at all n locations; Clone ID: 701139629H1
gcgaatttgaattttcagacaagtgtttgcgaaaaatatattgtctgttaaggaggatgagaaagaagataaggaaaacggaatgagtaatgttgttcaggattcaaaggaaggttgtaccccctatacttcatcatccccgggtttaatattaatggaattgaagcaagcgaaattcaatctgaacagaactacaagtgatattgctgatgttcgnnnttctgttgaatcgctcaataagaagtnagagaaggaaagactatcacttgaga

SEQ ID NO: 51188 - DNA, 272 bp, Glycine max
  unsure (1)..(272): unsure at all n locations; Clone ID: 701139630H1
taaaaatggcacctgcaacactgtctctgtctctcctcctcctgttctcactcagcatcgccgtnaccgttagatcgagcgactacgactacgattgtgtgtacactgcatacgttagaaccggttcggtgttgaagggcggaacggactctaagatcgggctgaagctgtacgacaagtacggctactacatctacattaaaaacctcgaagcatggggcggcttgatgggcaagggctacgactacttcgagcgcggcaacctcgacatc

SEQ ID NO: 51189 - DNA, 274 bp, Glycine max
  Clone ID: 701139631H1
gggcagctcgtgtgggagatcgtcaagaaaaacaattccttcttggtcaagcagtttggaaggggcacccagagcgtcgaattcagcagagagagcaacaatctctacaacctcaattcgttcaagtactctggtttggcaaacaagaaaactgttactgttcagcctgagggcaaagatcaggctgtgttgttggctacaaccaagacaaagaagcaaaacaagcccgctgcattgctccacaaatctgtgatgaagaaggagttcaggagga

SEQ ID NO: 51190 - DNA, 273 bp, Glycine max
  unsure (1)..(273): unsure at all n locations; Clone ID: 701139632H1
aagcatatgagttgaccatcacattcatagaatctggaagtggcantctgaaccaaacaaaccactctcaaggttaatcaaatcttggttcttttcatttcaccagcttctacttttcttgttctgaagcaggggaaaatgacaatggttttttggtagtggtaatttgtgaaacattgatttgntaaagatggcgtggagaaaagggtgtgaggnagtggctaattcgaagcctctgttcctcacgatctacacttngtcatcattggaatc

SEQ ID NO: 51191 - DNA, 277 bp, Glycine max
  Clone ID: 701139633H1
tttccctcattagcagtagcctggatgcatggcggacacggcagtatgattattaccagagggttttgaatgggatattgtgaaatagtttgtcaatggtgatcgtttgcttgttcccttttgactaagcttgcacggtgattgttcatcaattagtattttgccttacaagtcatttgaagatggttggttcactgtgtgttatggctttggagtttttgtgagaagtaagaattaaaaggtggcagtgtgcattgtctattctcctggagtagtg

SEQ ID NO: 51192 - DNA, 279 bp, Glycine max
  unsure (1)..(279): unsure at all n locations; Clone ID: 701139635H1
aaaagttttgacaatgatttcatcagttaatcatatggcacatatttagacatgtcatggtncatctgatgacatgacatacatctagacatgtcacattacatgtcattttagagtgattgtctacataacatttaaatntatgagtattgaaaccaaatttctcatatttacacagattaaaaacatatttaaattatttagtaccaaattttgatttctacaggtcttgaatatttacacacaggatgcaatccaagtatcattcaccgtgacata

SEQ ID NO: 51193 - DNA, 273 bp, Glycine max
  Clone ID: 701139638H1
tttttgtcctccgaggaccttgtttcttgttccttagtttgtaggtttttgaattatgctgcatcggatgaggcattatggcgtcgcttgtactgtatgcgatggggcattcttccccctacaaggaagttaagggaatgcccatggaaaaagttatacattcagcgtgatggagaggacatggttgaacttgttagaagctgccaaaatgagtttaaggagtactacattcaaatgcaagcagctaagcgaatcaagcacctcatccttcac

SEQ ID NO: 51194 - DNA, 276 bp, Glycine max
  unsure (1)..(276): unsure at all n locations; Clone ID: 701139639H1
ctgaattcaaaaacatcgaaaganagaggcatggccgaggcaaaccttcatcatgatcaagccagatggcgttcaaagaggccttattggcgagattattagcagatttgagaggaagggtttttacttgaaagggttgaaactcgttactgtggaccgtccttttgctgagaagcactatgctgatttgtctgcaaagcctttctttagtggtttggtggattacattgtctctggccctgttgttgccatgatctgggagggtaagaatgttgt

SEQ ID NO: 51195 - DNA, 275 bp, Glycine max
  Clone ID: 701139640H1
ggagaacggtaaaacgaagcatccacaattgctttacgaggccaagctctacaatattcttcaaggaggaagtggcatctcgaacataaaatggtgcggcgtagacggggaggataatgtgcttgttatggacttgctgggacctagtcttgaggatctttttgtctactgtggaagaaagttctccctcaaatctgtgttaatgttggccgatcaaatgatgactagaatagaatatgtgcattctaaaggattcctacacagggatataaaac

SEQ ID NO: 51196 - DNA, 271 bp, Glycine max
  Clone ID: 701139641H1
cggcctttgtgccggcgacgcatcattcaaatttctgccctatcaactttcgatggtaggatagtggcctaccatggtggtgacgggtgacggagaattagggttcgattccggagagggagcctgagaaacggctaccacatccaaggaaggcatgaatggattaacgagattcccactgtccctgtctactatccagcgaaaccacagccaagggaacgggcttggcggaatcagcggggaaagaagaccctgttgagcttgactctag

SEQ ID NO: 51197 - DNA, 268 bp, Glycine max
  unsure (1)..(268): unsure at all n locations; Clone ID: 701139643H1
gacgaggncaatgcttcctggtttacgattttgtttctaatggaaatctgtcatgctaccttgacgtgaaggaaggtgatggagaagtccttgaatggtcaactagagtttctattgtgaaagggattgctaaaggtatagcatatttacatgcatacnaagcaaagaaacaagctcttgttcaccaaaacatctcagctgagaaagtgctcattgatcagcgatacaacccattgctttcagattctggctgtacaagcttctcacc

SEQ ID NO: 51198 - DNA, 265 bp, Glycine max
  unsure (1)..(265): unsure at all n locations; Clone ID: 701139645H1
cttcccttncctctggtggcgacaatgtcgactcctgctaggaagaggctgatgagagacttcaagaggctgcaacaagacccgcctgcagggatcagtggtgccccccaggataacaacataatgctgtggaatgctgtcatatttggtcctgatgatactccatgggatggaggcacgttcaagttgacactccaatttactgaggactatccaaataaaccaccgnntgtagatttgtgtctcgcangttctccanatatta

SEQ ID NO: 51199 - DNA, 271 bp, Glycine max
  unsure (1)..(271): unsure at all n locations; Clone ID: 701139646H1
ggcgcattgtctccgacaatattcactccgggaatggcttccctaccctttccgttgatgaacaagtcgttgccatagagctgccactgaaatnnggannaanncattgagtcagtgaacaagagagggctgaacctctctgaggtgntgtgttccacattcacaatggggnggtttggagaaaccaaggacagaaggtnagtgagagtggaatgcttcatgaaagaaagcagccccaatatctgggtgaggcctatcagtggactcanaa

SEQ ID NO: 51200 - DNA, 148 bp, Glycine max
  unsure (1)..(148): unsure at all n locations; Clone ID: 701139647H1
attcccccacctggcactgngccaganaatatatgagatagatccatctttgctagctcaccgtgaccatcttgatttnccgttatggacaatacaaaagantgtgttatgaaattgacaagcatgaaggcggtctggatacattttc

SEQ ID NO: 51201 - DNA, 272 bp, Glycine max
  unsure (1)..(272): unsure at all n locations; Clone ID: 701139648H1
caaatacccattttcttcctctctacccaaccttgattgaagatgaagatcctattcctatctatgcacagaagcttcttgtcatgctaatggagttcagttttattacaattcctgacattctacatctgaagacaatttcacaatgctttgagttcttgctgggtgatctctcaaatgcaaatgtgaataatgttaagctgtgtcttgctctggnnnctgctcctgagatggagtccaaattactctctcagttaaaggtggttaggagg

SEQ ID NO: 51202 - DNA, 279 bp, Glycine max
  unsure (1)..(279): unsure at all n locations; Clone ID: 701139649H1
cntnnncattggaagaagcnagggaccagtttacggttatngantgctnatctgactcannnncagttatattanatgnctgnaattncnatgaatctgttcgtcttganagttntgatataganannactctatccctggtaccaccagatggtgaatttccagtcatgaantatngtttgacacaggantttaggnntcnttttcgtattaatgctttgattgaagangcagggtcacttaaggcagaagtnattcttaaagtaagtgctgagtttg

SEQ ID NO: 51203 - DNA, 83 bp, Glycine max
  unsure (1)..(83): unsure at all n locations; Clone ID: 701139650H1
agccaactttggctgtcatcattggaagcaacgatgtaagtncttcaggctttgacatcaataacacattcccaatctncttt

SEQ ID NO: 51204 - DNA, 274 bp, Glycine max
  Clone ID: 701139651H1
tttccgatggcttctgcagatgttgagtaccgttgctttgtcggtgggctcgcttgggccactgacgaccatgccctcgagagagccttctctcagtacggcgaaatcgttgaaacgaaggtctgtttgttgcaggcatcacatctgatctcacacgattcggattcggaattttctcgatcccgttctgatctgtgatctctgatctgtttgcgttacttgatcttatgatacttgtgttactatatgattctttattactcacgccaatagg

SEQ ID NO: 51205 - DNA, 277 bp, Glycine max
  unsure (1)..(277): unsure at all n locations; Clone ID: 701139653H1
gggaatagtgctgcaatggcttcaagtcaggaggaggtgacccttttgggagctactggaagcccatttgtgtgcagggttcatattgccctcaagttgaagggagttcaatacaaatatgtcgangaaaatttgagnaacaagagtgaactgcttctcaaatccaacccagttcacaagaaggttccagtgtttattcacaatgagaagcccatagcagagtctcttgtgattgttgaatacattgatgagacatggaagaacaaccccatcttgc

SEQ ID NO: 51206 - DNA, 276 bp, Glycine max
  unsure (1)..(276): unsure at all n locations; Clone ID: 701139656H1
cgacatcgtcttggccaaccgccctcacttcctcaccggcaagtatatagggtacaacaacaccaccgtcgccgtttccccctacggcgaccactggcgcaacctccgccgcatcatggcgctcgaggttctctccacccaccggataaactccttcttggaaaatcggagggacgagatcatgaggctcgtgcaaaagcttgctcgggactcgcgcaatggcttcnccaaagtagaacttaaatccaggttttcggagatgacatttaacactat

SEQ ID NO: 51207 - DNA, 231 bp, Glycine max
  Clone ID: 701139657H1
tagtgcctccttgccagaagttaaaatggcccaagaaactttcctattcacatctgaatcagtgaacgaggggcaccctgacaagctctgtgaccagatctccgatgctgtgctcgatgcatgcttggagcaggaccctgacagcaaggttgcctgtgaaacctgcaccaagaccaacatggtgatggttttcggagagatcacaaccaaggccaacgtggactatgagaa

SEQ ID NO: 51208 - DNA, 270 bp, Glycine max
  Clone ID: 701139660H1
ccgggctaaggcagttgctgaagaatggaaacccagattggatgctcttgacatcgatgctagcaatgtgaattccttggaggctcatgcatttttgcaacttctagccagttttggtattgcctctggttttaatgaggaggagttatctaggctaattccaatggtatctcgacgtcgccaaactgctgatttatgtcgttgccttgggttgtcagagaagatgcctggtgtcattgaagttttggtgaatagtgggcggcaaattga

SEQ ID NO: 51209 - DNA, 250 bp, Glycine max
  unsure (1)..(250): unsure at all n locations; Clone ID: 701139661H1
ggactgcncggaaacggaggcantgaagaagtgctcatcaggaagaggggtttcnctgagactgaaactggtcatgangatgagtctggccancagtgtggntttgatgnntaattttcttctaaggaggnccgcaaccantggtgttgctgctgnagatccaactggtaagccacaananttgcctaaggagaagacncttctgccagcagatcctgntaagcctccagccaggacgcaggtggtgggt

SEQ ID NO: 51210 - DNA, 271 bp, Glycine max
  unsure (1)..(271): unsure at all n locations; Clone ID: 701139662H1
gttcactttcactttaccaactcctaacaatntctctnttggntccttcttcaccgcatctatggagttggacggcgttctcctcggcatgtgcaaccctctcctcgacatctctgcncncgnccgacgacgctttcttgcaaanatacggtatnnaagttgaacgatgcgattctcgctgaggataagcacaaacctatgtntgaagaattggctaacaatcctaatgtggagtacattgctggaggtgctactcagaatcaatcagggt

SEQ ID NO: 51211 - DNA, 103 bp, Glycine max
  unsure (1)..(103): unsure at all n locations; Clone ID: 701139665H1
attctgaaaaaaaaaattaaactaagaggttccctttcgcagttaagtggcactgccatgtggtaagganatcanctcagtttaanctttatatatgccatat

SEQ ID NO: 51212 - DNA, 265 bp, Glycine max
  Clone ID: 701139666H1
ctggatctatcccaaatctcaatctccaaaccctagaacgaacattcaagtttccccctttcccctttctcctttccctttcaaaaacactccctttccactcttccgctgcgattggatctcttgggtgtcttcctttccgcgatttcgatctgcaacttgagggttgtggaattcggaatttcacattgaagtcttcaattggcgctgtcaatgccattggtgtggttagtgaagaatttttctgtggtcatttgataccgat

SEQ ID NO: 51213 - DNA, 144 bp, Glycine max
  unsure (1)..(144): unsure at all n locations; Clone ID: 701139667H1
gnttgtggntcatcccttacatccagtgttgatcagaagaagactatataatagcctttgcnccaatcacttcctcttgntcatgccataaactaaaccctttcctacagttacaaatctatcgctactccacacaacatncga

SEQ ID NO: 51214 - DNA, 269 bp, Glycine max
  unsure (1)..(269): unsure at all n locations; Clone ID: 701139673H1
agaatgcggtctctctcagccaacccttccttactgcgacaagctnttccagttttggtcaaaccctacaaatccattctctctcgagcantcctcttcagctcccctgcctccacatctcattctcactatactcaatttcttagatccgtcacgtttttctctactacttctcttcgtaattttaattcacgcgccacccatctcaacgatgctggctctatcgactctcctcttatacagtccatgcagaacaagataaaggaaca

SEQ ID NO: 51215 - DNA, 269 bp, Glycine max
  unsure (1)..(269): unsure at all n locations; Clone ID: 701139675H1
tactctcanagcctgccagtggcagaagancccagttatttcnaaggaaattacttgttcnactcatttattctccaatgagatcttggaggagcttgaggttagcctctttttatccttaaattcggaaaaaatatccttgcagattcttcaataaaatgttatgcagccattgtatattgtagatatcagacttccctaaattgcttgttattatctgtgctgtgctaatgttgctcaaaactcggtccactcnacatacgagtaac

SEQ ID NO: 51216 - DNA, 268 bp, Glycine max
  Clone ID: 701139678H1
gttcatccaatctccgaaggccttcaccggattgcaaccatgtcgaggagaaaggttagagagccaaaggaggaaaacgtgactctgggcccagctgttagagatggtgaacatgtttttggagtcgctcgcatctttgcctccttcaatgacaccttcattcatgtcactgatctgtctgggagggaaacacttgtccgcatcactggcgggatgaaggttaaagctgacagagatgaatcatctccatatgctgctatgcttgctg

SEQ ID NO: 51217 - DNA, 84 bp, Glycine max
  unsure (1)..(84): unsure at all n locations; Clone ID: 701139679H1
gggcgttctatatatnatngaattancaatgaggcctgctcttgctttgcttccncctnnctatttgcttnncttgttagctgc

SEQ ID NO: 51218 - DNA, 271 bp, Glycine max
  Clone ID: 701139680H1
caatggacttgctaggcagtccctgattaatgcagatggcattatagagaaatcatttttgcccggaaagtactccattgagatgtcttcatccgtctacaagaattgggttttcactgaccaagcattaccagctgatctcgtcaagagaggattggcaattgaagatccctctgcaccccatggccttcgccttgtgatagaggactacccttatgctgttgatggacttgaaatatgggatgctattaagacatgggttcatgaatat

SEQ ID NO: 51219 - DNA, 276 bp, Glycine max
  unsure (1)..(276): unsure at all n locations; Clone ID: 701139681H1
ggcgaggagaaagatggangggaaggagcaggatgtgtcgttgggagcgaacaagttccccgagagacagccgattgggacggcggcgcagagccaagacgacggcaaggactaccaggagccggcgccggcgccgctggttgacccgacggagtttacgtcatggtcgttttacagagcagggatagcagagtttgtggccacttttctgtttctctacatcaccgtcttaaccgttatgggagtcgccggggctaagtctaagtgtagtaccgt

SEQ ID NO: 51220 - DNA, 272 bp, Glycine max
  Clone ID: 701139682H1
tgagaggcggcagcaaataagaatggcttcaaatcccaaacctttgacttttgaggaggtggctaatcacaacaacaaaaaggattgctggattattatcaatggaaaggtgtatgatatcacgccatttctggatgagcatcctggaggagatgaagttttggtaacgtcaacagggaaggatgccaccattgattttgaagatgtgggccacagtgattctgccatagaaatgatggaaaaatacttcgtcgggaaggttgacacttcca

SEQ ID NO: 51221 - DNA, 275 bp, Glycine max
  unsure (1)..(275): unsure at all n locations; Clone ID: 701139687H1
tttttttntcccatcataaaaaaccgacnctctcctttccctcttcaccaaccaatgncctcccccaaaggccganaagaagcccgcggagaaaaagcccgcagagaaggctccggcggagaagaanccccaaggccgagaagaagatatcgaaggaaggaggaagcgnnnnnnnnnnnnnnnnnnnnnnnnnnagcgtggagacctacaagatttacatcttcaaggtgctgaagcaggttcaccccgacatcggaatctcaagcaaggccatg

SEQ ID NO: 51222 - DNA, 272 bp, Glycine max
  Clone ID: 701139688H1
ctttgactcacaaccctattgcgtgctttgcaatgcgaccccgcctatggccaacagtaacctccctcgaagaatcatcaaggaaacgcagcgtttgctcagtgagccagcgcctggaattagtgcgtccccttcggaggacaatatgcggtatttcaatgtgatgatccttggcccgactcagtcgccatatgaagggggagttttcaagttggaattatttttgccagaagaatatccaatggctgctccaaaggttaggtttctgacaa

SEQ ID NO: 51223 - DNA, 267 bp, Glycine max
  unsure (1)..(267): unsure at all n locations; Clone ID: 701139689H1
gcatgctgatggaaggatcaaggtcgatgagcacttgagagtgaagggcaagagcaacattttngcaattggagatattacagatgttcaagaaatcaaacaagggatgtatgcaagtgctcatgctcaagtggttgccaagaacctgaagctattgatagagggaggaggcaaagagcgtaagttgggaacatacaaggcacagccaccaatatctatagtttcacttcgaaggaaaatagctgttgcacagttcccattcatgac

SEQ ID NO: 51224 - DNA, 267 bp, Glycine max
  unsure (1)..(267): unsure at all n locations; Clone ID: 701139690H1
cgtatatagactagttgattgtgccacacaacaatgctatntgggcaattatttgatttttgaattcaacaaaagcatttatttaactgtgatgaactacaaaatccccctacaaggctgtgagattgcaaaaaaaagccanagggattctcgtgcacgatctttaagaaatgtttgtgggtgtctactaaacactctggagttctatacgaagaaaattggcatcatcctgcatttacatttactacgaaagtaggggaaagtaaa

SEQ ID NO: 51225 - DNA, 268 bp, Glycine max
  unsure (1)..(268): unsure at all n locations; Clone ID: 701139691H1
agagaaggcttcgaagtggcttcaattgcttgtcctcanntctcaatgcgtcaaaaacacctttccacatcttcactgtttctacagtcacccataagaggctgcttgtcgtcgtcatggccctcctcggaattgagaaaatccattaaccgttccttgaaagaaagataaccgagctttgagaaggtaggaaatgaatgattgtaagaatcttgtttatgtaagtaggatttggtttcatcacataacctcattttcttttattttt

SEQ ID NO: 51226 - DNA, 265 bp, Glycine max
  unsure (1)..(265): unsure at all n locations; Clone ID: 701139692H1
gcatgatctccaattccaccagtgttgttgaggtcttctctcgcatcgaccacaaatttgacctcatgtatgccaagagggcgttcgttcattggtatgttggtgagggtatggaagagggggagttctctgaggcccgtgaagatcttgctgccctggagaaggattatgaggaagttggtgcagaggcaactgaagatggtgatgaaggagaggattatgattagaanttgcactattatgttactttctgtgttgtttttct

SEQ ID NO: 51227 - DNA, 265 bp, Glycine max
  Clone ID: 701139693H1
gtaacactcacttgtggactagtgggaggtgacacccttctatcttctacacccgctagcggagtagtttgtatcgctcagatcatgcagaatgaaagggcgtacatatcactcaagttcctaaaggaattgttggggaaaattcctcttgtacacgttgatgatgtctgtgaagctcatattttctgcatggaaagcacctcgatcagtggaagattctgtgtgcaagttcatatatttcattagaagagatggctaatcatta

SEQ ID NO: 51228 - DNA, 268 bp, Glycine max
  unsure (1)..(268): unsure at all n locations; Clone ID: 701139694H1
gtgggatnnnnccaagaatntttgancacttatttactagaattcaaaagganaaagaggctcgaagagatgaaaagataaaatttacatnccaaatgctctttcttggagatatacaatgaacagatccttgatcttttggncccatnatctaacaatctgcagataagagaagacagtaagaaaggagttnatgtgganaatcttacggaaacagnagtnacttatgctcgagaagtcattcaattacttattcagggagctgcgt

SEQ ID NO: 51229 - DNA, 250 bp, Glycine max
  unsure (1)..(250): unsure at all n locations; Clone ID: 701139695H1
ttctcttgcggctagggttttagcgcantttcttgctagattnaaggaancatgggtaaggaaaaggttcacatcagtattgtggtcattggccatgtcgactctgggaaatccactaccactggtcacctgatttacaagcttggangcattgacaagcgtgttattgagaggttgagaaggaagctgctgagatnnncaagangtctttcaagtatgccngggtgctggacaaacttaaggctgagcg

SEQ ID NO: 51230 - DNA, 258 bp, Glycine max
  Clone ID: 701139696H1
gtaaaacatttgacatcatgtattgtcaatttcctctcacaggtttaatgatacacttaatgtttgacacatgtaatctacgatgataaaagaaaaagaaaagtggacgaatcaaagataaacacgcaaatatacgcgacggagagctatcttctcaatttccgatcactgcattggttctgttgacgagggttttgttctacttgacttgcatacttgatggcgtcaaagttgcagaagttgcagtccgcagcatgt

SEQ ID NO: 51231 - DNA, 264 bp, Glycine max
  unsure (1)..(264): unsure at all n locations; Clone ID: 701139701H1
ctgaaacattctcttttcccacaacntaatcagatgaagacncttgaaatatctgattctacaggaattgcaacatcaatggaacactacctccatatcttgggaatatgacaactttaaaaaacttagaccttagctttaacaaattgactggaccaattccaagtacctatgatgccctaagaaaagtggattacatatatttaactgggaatctctcaatgggacagtacctgcatggacagagaaaagtgacatgtggat

SEQ ID NO: 51232 - DNA, 281 bp, Glycine max
  unsure (1)..(281): unsure at all n locations; Clone ID: 701139702H1
gaagaggggaaaggttccatgtgaacggcnnntncacatgggttagtcgatccctaaggnacgggggaagcccgtctgatagcgtctgtgcgcgtactccgaaagggaatcgggttaaaattcctgaaccgggacgtggcggctgacggcaacgttagggagtccggagacgtcggcgggggccccggaaagagtnatcttttctgtttaacagcctgcccaccctggaaacggctcagccggaggtaggntccagcggctggaagagcaccgcacgccgc

SEQ ID NO: 51233 - DNA, 283 bp, Glycine max
  unsure (1)..(283): unsure at all n locations; Clone ID: 701139703H1
aacagatcatagtcagcatcagaacaaggataatgtggtttctataaaagattgtatnctcaccggacttgacatcatttgcgacctcctctggagatgttgctgctggtttcacaggtgtgcatgaatcagaagccctgtcttgttatncatcagtctcaacttctgttggcgtgcaaagcaaaactgtcaagggttctgtaattgccaaaaataatcctaaatcttctggtttaatgaagccaaacaagttaaagtctacacatagaaatgggattttaag

SEQ ID NO: 51234 - DNA, 252 bp, Glycine max
  Clone ID: 701139704H1
atctgtgacgagcatcatggcctcgagagcagtgctattgttggctatgtgtgtgcttccggccatggttgtggccattcgcccagcaaagaaccctttttgcgtgaagggtcgcgtctactgtgacccttgccgtgctggttttgagacctcagcaaccacctacattgccggtgctgagattatgttgcaatgcaagagcagggttagcaacgaggttgtgtacaccaagaaggggtacactgactcaac

SEQ ID NO: 51235 - DNA, 281 bp, Glycine max
  unsure (1)..(281): unsure at all n locations; Clone ID: 701139705H1
gaactggtctgaactagctcaaaggccatggtcgctcgtggggatcttggagctgaacttccaatagaggaagttcctttattgcaggaagacatcattcgaagatgtcaaattatgcaaaagcctgttatngtggcaacaaatatgcttganagcatgattaatcatcccacaccaacaagggcanaagtttcagacatcgcaattgcagtaagacaaggtgctgatgctatcatgctttcaggagaaactgcacatggaaaatttccattgaaagctgt

SEQ ID NO: 51236 - DNA, 279 bp, Glycine max
  unsure (1)..(279): unsure at all n locations; Clone ID: 701139706H1
ttcctgcaacagaacaaccagccgctgaggctcctgccccagaatcaaccaccgaagcaccaaaggaagaaaccaccgaggcaccaacagaaacagtagaaaaaacaactacagaagtagccccagaggagcctaaagaagttccagttgagaccgaggaggtggtggcaaaggagacagaggaagagaagccagcagaagagaaatcagaggagaaaatgaagaagtgaaagaagaagcagaggagcctaaagaaatactganacnccctccgcagca

SEQ ID NO: 51237 - DNA, 279 bp, Glycine max
  unsure (1)..(279): unsure at all n locations; Clone ID: 701139707H1
ggcacttgagctctttctgcaatggtcatatgtgaaaggcatgcaatctcagttgtgccagtaactcgtgtcaccatggctcatcgtcgacaatccttcagtttctacattatagaatatggcaganaggngtatttgaaggattattaccctgctagatattgttggggcctgtgtccttgtttggagtggttgaagttgtaatgttgaaactgttcttcctggcagcattgggcagttgtaaaggtttcatctacacatttgtnangtctgtnttnc

SEQ ID NO: 51238 - DNA, 280 bp, Glycine max
  Clone ID: 701139709H1
aattattttgcccctctgcttctctctctgtctttctcagaagacaactcaaaaaaaccatggacgtgggtcagatgcagagacagtggatcgactacaccaaatccctcttccttgagggcttcctggatggtcagtttctgcaacttcagcagcttcaagatgagaacaaccctgactttgtggtcgaagttgtctctctcttctttgaagattctgaaaggcttctcaaagatctcacctttgccctagatcagaatggtgttgacttcaaaaaagt

SEQ ID NO: 51239 - DNA, 279 bp, Glycine max
  Clone ID: 701139710H1
ttctctcttttgcaaagaaaacaatttaattaagtcaatttgtaccaaaatgggcttctcaagtttgtgaaactttggctttcatcaacggtgatgatgggttgaaaatcaacggtgctcttctaatgtccctgatggaagagccatcaccaagtgatgagagtgatgatgatcgattggatagcttgattaggtccttgaggctgaaattagtggaagcaagatgggggatcatcatgattcatcatccatagggtcagaaatattgatgagcaataa

SEQ ID NO: 51240 - DNA, 279 bp, Glycine max
  unsure (1)..(279): unsure at all n locations; Clone ID: 701139711H1
cagactctatccctaatccctatcttcttctctgctctctccgcacgctttggctccncttcatctcagtttctggttttgaattgtaggtgttgttggcttggtatccgtgcaagttctgctgtagccgatttnaaggtgaaggtgtancncttaaagtttctttcatgtttgatcaggctactatccatttgggagcaactgagctgcttgganagtatttttcttcttctagaaaaaattacagaccctcatcccagagagttagctgtatgcatt

SEQ ID NO: 51241 - DNA, 246 bp, Glycine max
  unsure (1)..(246): unsure at all n locations; Clone ID: 701139713H1
gtgcttggtganngggaagtggaaactagcttcatcancgacaagcaactgtcacacgacaccagcnntgaagaatccccttgactatatgttggtatggtgttccaatgcaggaagtaaggaattgccaattggttctgcttacttttgggtgccccagcttcctgaaggttacagtgcccttggctatttggttactaatgtgcccgacaagcccaatttggatgaaatgatttgtgttcgtgc

SEQ ID NO: 51242 - DNA, 270 bp, Glycine max
  Clone ID: 701139714H1
ctcactgcagatctcaatccatggctaccattgttagcatcaaggcccgccagatctttgacagtcgtggcaatccaaccgtcgaggtggatttgacatgctccgatggtacttttgctagagctgctgttccaagtggtgcatccaccgggatttatgaggcccttgaattgagagatggaggatctgactaccttggaaagggtgtatcaaaggctgttgacaatgtgaacaccattattgcccctgctttggttggcaaggacccaa

SEQ ID NO: 51243 - DNA, 282 bp, Glycine max
  unsure (1)..(282): unsure at all n locations; Clone ID: 701139715H1
tctacttcacatactgtcanaacccanatgcagtattctctttttaaagnacagccanacanagactcnananacacaanaaagatcatgatcncatttccanaccattcnttgaaactcaggcttcantantcccttagttcagttgcaatggaagaatggtactanaagaagagccaagtgncagcatttgggagttgggattggaacgataacctacctttcacacagtgcttcgatgaancgaggcaagctggtttgctacgatgtagtaattatctg

SEQ ID NO: 51244 - DNA, 283 bp, Glycine max
  unsure (1)..(283): unsure at all n locations; Clone ID: 701139716H1
gntgaggggtggtgtggtgggatgaaaaatgagtgggctgaaagagcaccttaaactggcaagagaatacgcggtggaagggctctacgacacctccgtgatcttcttcgacaacgccgttgcacagatcaacaagcaccttaacagcaacagcgtggaggaccctttggtgcgagccaaatggatgaaggtgaagaaagcgctgtgcgaggaaacggaatggtgaagcagctagatgctgagagaagggcgtttaaggaaacaacacgatcgccatctcaat

SEQ ID NO: 51245 - DNA, 273 bp, Glycine max
  unsure (1)..(273): unsure at all n locations; Clone ID: 701139717H1
anttcctactccaancanttncttttttcccgcagtcatgggcaaggtcaagatcggaatcaacggatttggaagaatnnnaacgtttggtggccagggtggctctgcagagagacgatgttgaacncgttgccgttaacgatcctttcattaccaccgattacatgacatacatgtttaaatacgacagtgttcacgggcactggaagcatcacgatgtcaccgttaaggatgagaagacccttctcttcggtgacaagccagtcatgtttt

SEQ ID NO: 51246 - DNA, 282 bp, Glycine max
  unsure (1)..(282): unsure at all n locations; Clone ID: 701139718H1
cttnttcttcccanttcanccctcgtcnnncttgtttccggtnagggccaaccacaanatatgttaaacaaggaacaacctccaaaacataacatcctacgccaaacaaaactttgacctccttcagatctataccctnnnnnnnnnnnnnnntctattttcaaattctacatcatgggcacggaggttctacggncacaagattgtttcacccaacgcatcggtgttccaccgcctggcttttcccggcgaagaacctatggtacccaccacaacaacaaa

SEQ ID NO: 51247 - DNA, 283 bp, Glycine max
  unsure (1)..(283): unsure at all n locations; Clone ID: 701139719H1
gcgtgggtattgcttcacacaaacacaacantgtctgctgcaccttgcaatggtttcgctatcaacatggtttcgctacattgcccacaagctcgaatannccttctccctcagctggaagaactacaaaggaggtcaaattacagacagagaggtacgtgatgttgtttggaaaaacttctttcaaggaaagctgacgtacttgcactggaataaaggagaggagatggcccctactattgatggaaaagcagtaactcttgttcggaaattaccagttgta

SEQ ID NO: 51248 - DNA, 282 bp, Glycine max
  Clone ID: 701139720H1
gctgctgttattcgcaccgcaaacaaacagtgagccatggccgtcggaaagaacaagcgcatcttccaaagggaaaaagggtggcaagaagaaggcagctgatccctttgccaagaaggattggtatgacattaaggccccttctctttttcaagtgaaaaatgttggcaaaaccctcgtctctcgtacgcagggtaccaagattgcttctgaaggacttaaacatagagtgtttgaggtctccttggctgatcttcaaggggatgaggatcatgcattcaa

SEQ ID NO: 51249 - DNA, 86 bp, Glycine max
  unsure (1)..(86): unsure at all n locations; Clone ID: 701139721H1
gaactagtaacatgatggcaaaangaatcatcatcaacatncaanatcaanatnaacatcancccctctcctctccagcantaacc

SEQ ID NO: 51250 - DNA, 271 bp, Glycine max
  unsure (1)..(271): unsure at all n locations; Clone ID: 701139723H1
cgggtttctacctcaggtgaggttctgcaatattangccatccaaagcttcncatgttgaagcaagtttagtcactgggaagccgtcatctgtgccttnctctgtgcctgaaattggaggcgacggaagtagcttcctggactatggcttgagtgaagctgatcctgatgttcgtgcaattattgacaaggaaaaggaccgacaatttaaaagtcttgagcttattgcttctgagaattttacatctagagcagtgatggaagcagttggg

SEQ ID NO: 51251 - DNA, 283 bp, Glycine max
  unsure (1)..(283): unsure at all n locations; Clone ID: 701139724H1
cacacacgncagaaaggttgaaagtagagggacttgattcagtggaggtggncagagatggctaacaacgcagctgcttgtgctgagagagcaactagtgacatgctcattggtcctgactgggcaatcaacatagagttgtgtgatatcattaatatggaccctgggcaagcaaaggatgctttgaagatactcaagaagcgtttggccagtaaaaatccaaaaatacagcttctggctctttttgtattggagactcttagtaagaattgtggtgaaagtg

SEQ ID NO: 51252 - DNA, 280 bp, Glycine max
  unsure (1)..(280): unsure at all n locations; Clone ID: 701139725H1
gtgtctggtgccttaacttgttcttcattgtgccctttctctgagattgcatataggtttttagtggctgaagcatcaaaatggggagatattcaataccctttatgggtgttctgctactgttctgtctggtttcatcttcagaggcagaatatttgaagtataaagaccctaaggcgccactgaatgtcagaatcagtgacttgttgaagcgaatgtctctcgaagaaaagataggccagatgacacagattganangngtgttgctactcctgatgc

SEQ ID NO: 51253 - DNA, 274 bp, Glycine max
  unsure (1)..(274): unsure at all n locations; Clone ID: 701139728H1
cttctattacttgcttctttcttcaccatgtcacttgctggnaaaatcaccactgnaattggggttcatgctcccgctgcaaagtggttcaacctctttgcaacacaacttcatcatgttcaaaaccttactgatagagtacatggaaccaagctgcatcaaggtgaagactggcatcacaacgagacagtcaaacactggacttataccatagatggtaaggctacaacatgtctggagagtattgaatccatngatgaacagaacaaaacaa

SEQ ID NO: 51254 - DNA, 280 bp, Glycine max
  unsure (1)..(280): unsure at all n locations; Clone ID: 701139729H1
ccaagatntncnttgnattgctgttatgtctgatcatagcagcttcttctgggtttgtgaattgctttgatgttgaaaagaaggaaaagattggaatatttgagctcaataaaggtgacctttctttgaaggtcaccaactggggtgcttcaattttgtccctggtgattcctgataagaatggaaagttgagtgatgnngttcttggatatgattctgtttnntgattacactaatgatacaacatattttggagcaactgttggccgggttgctaaca

SEQ ID NO: 51255 - DNA, 273 bp, Glycine max
  Clone ID: 701139731H1
gtccaagaatgtgtgtgtaattggagctggaccctcggggctattggcagcgagggagctgagaaaagaaggtcacaaggtggttgtgttggaccagaaccatgatattggaggtcaatggctatatgacccaaatgtacaagaggaggatcccttaggaagagacccttggctaaaggtgcatagcagcatctatgagtctttaaggttcatgtctcccagagagatcatggggtcaactgatttcccctttttagtcaagaaaggtagaga

SEQ ID NO: 51256 - DNA, 284 bp, Glycine max
  unsure (1)..(284): unsure at all n locations; Clone ID: 701139732H1
ctttcatactcaccctnattgcagtattttgacctcaatggcaccaagttcggcagtgccagatgaacaggttgttgttggagaggagatagagcatgtaagantgatcactttgaacaggccaaggcaattgaatgccatctcaccagaattggtttctctgctagcaacatatttggaaaagtgggagaaggatgaggaagcagagctagttatcataaagggatctggtagggctttttgcgctggaggggatttgagagtgttctatgacggcaggaaaa

SEQ ID NO: 51257 - DNA, 270 bp, Glycine max
  unsure (1)..(270): unsure at all n locations; Clone ID: 701139733H1
ctcgagnngcanaaatgcngtntcaaggatantntncatccgaatgcagnccactatggacacgcttcttngncatccnaggtaatcnttatacatgccgagttacttgcctganatgnnatacaagggacgagattattgacgacttggctattcgtantctngttggnaagtcaaatccttgcttgaaaagantanactangtggttgtcctgaaaagtnntaaacgaggatatctgcagctgatggaaaaanctctaaaggctatat

SEQ ID NO: 51258 - DNA, 258 bp, Glycine max
  unsure (1)..(258): unsure at all n locations; Clone ID: 701139734H1
ccatcttttaacagttcncctcgacnacttctgaagatggantggcattgcattcggacgantggatgattctttcagtttaacctcaatcaaggcctatattgctgagttccattcaaccttgctctntgtttttgccggtgttggttcagccatagcctatggtaagttgacatcagatgcagcacttgatcctgctgggttactggcagttgctatttgccacggttttgcactctttgttgcagtttctgttgg

SEQ ID NO: 51259 - DNA, 274 bp, Glycine max
  unsure (1)..(274): unsure at all n locations; Clone ID: 701139737H1
gccgttcttggcagcagtgagggtgtcactggaactattcacttcgttcaggagggaagtggtccaaccaccgtaactggatctcttgctggtcttaagcctggtctccatggtttccatgtcntgccttgggggacactaccaatggttgcctctcaactggatcacatttcaatcctaataacaaggagcatggtgcccctgaggatgagaatcgtcatgctggtgatcttgggaatgttaatgtcggtgatgatggtatgtcagcttcata

SEQ ID NO: 51260 - DNA, 116 bp, Glycine max
  unsure (1)..(116): unsure at all n locations; Clone ID: 701139738H1
gttctcantcatggggctttgcttcctttgttggcacaattaaatgaacatgccaagctttctatgcttagaaatgctacctgngacactttcanacttctgcaggggcaagccac

SEQ ID NO: 51261 - DNA, 269 bp, Glycine max
  unsure (1)..(269): unsure at all n locations; Clone ID: 701139739H1
cgattttgtagtaagtgaggtgccaatatggtgaagatagctcttggtactntggatgactcttttagcgctgcctctcttaaggcttatttcgcagagttccacgcaactctgattatgcgtgttcgctggtgttggatcagccatcgcttacaacgagcttacaaaagatgcagccttggatccaacggggctggtggcagtagctgtggcacatgcatttgcactgtttgtaggtgtctccgtcgccgccaacatctcaggtggcc

SEQ ID NO: 51262 - DNA, 278 bp, Glycine max
  unsure (1)..(278): unsure at all n locations; Clone ID: 701139740H1
caccancacttcatcaactttacttgacaacaatattgtaaaactcaaaatctagtttcatacttngtttcttcnncttgaaatggctctccaggctgcttctcttgttcctgcttctttctcggttcttaaagagggaaagagtggtgtgtctctcaaggactccaccttgttcggtctttcattttcagaacctatcaaagctaacttcagctcttctgcattgaggtncaagagggaattcgaacaaaagctctgtgctgtgagggccgnaacag

SEQ ID NO: 51263 - DNA, 248 bp, Glycine max
  unsure (1)..(248): unsure at all n locations; Clone ID: 701139741H1
taattcctgaaaagcaagtaactaaggaaaagaaaacacaacacacacacaaaggaaaanacagaaaaaccatgtcttctccaagcaagcggcgagagatggacttgatgaaactgatgatgagtgactacaaggtggagatgattaatgatggaatgcaagagttttatgtgcatttccatggacccaatgagagtccttatcatggaggtgtgtggaaagtgagggttgagctgccagatgcttat

SEQ ID NO: 51264 - DNA, 251 bp, Glycine max
  unsure (1)..(251): unsure at all n locations; Clone ID: 701139742H1
atccttatcctgtttctttcaatanaagtcattctggttctagcttgaatcccaacgcnccgatgttcgtnccatcgcctatcggacggtggaggatttctccgaccagtggtgggacctcgttcactcctccccctggttccgcgatactggctccgcgagtgcttccaagatccccagttccaaaacgacgacgctttcgacttcgactttgactagatctccaagatgaagatganagggaacgaaag

SEQ ID NO: 51265 - DNA, 274 bp, Glycine max
  Clone ID: 701139743H1
cagccttatccggtttagggtttcggtttttgacccaacctttgacgtatcgaaaccttaagtttcggatcaggtctgagcaatctggttggtagaacctttggtcttagagagtcaagttttatgtctgaattagacgatcaaattcctactgccttcgatccttttgctgatgcaaatgctgatgactcgggtgctgggtcaaaggagtatgtgcatattcgcgtacagcagcgaaatggaaggaaaagcctgacaaccgttcagggattga

SEQ ID NO: 51266 - DNA, 279 bp, Glycine max
  unsure (1)..(279): unsure at all n locations; Clone ID: 701139744H1
gacgaatgancccaacaacaagtacgatgtttttctgtgtttagttggcccagatacccgctacaccttcgctggtaatctctataatgctttgcgccgcaacagaatcaatacctttttcacagaagataatcatcatgatgagctactactcatgaatggcgaccaaatttcaccctttgctctaagagcaattaaagaatcaaacttgttaattgttgttctctctccaaactacgcatcatccccaaggaatcttgatgaatttgtggccatcgt

SEQ ID NO: 51267 - DNA, 278 bp, Glycine max
  Clone ID: 701139746H1
gttgtctctaccaccctctcagccatggcaacaattccccctagccgatcatcatcacacgcgtttgttgccatgggcaaccttcacgactctgttgttgtgcacggcggcggcgaaggagagcgtgtacgagatactccccaagtacgggctcccgagtggtctgttaccggataccgtcaccgactacaaactcgacgaggatggccaattcgtcgtcgttttgccgaagccctgctacatacagttcgattacttggtttactacgagagcaaga

SEQ ID NO: 51268 - DNA, 271 bp, Glycine max
  unsure (1)..(271): unsure at all n locations; Clone ID: 701139747H1
agtttatagacaatctcttctctcgggcgatgacaaagttgtgtttcaatggacaanaataatattctgggtctttccaagcttcgaattaaaagaggcattaatcttgccattcgcgatgctcgtgccagcgatccttatgtcgttgtcaacatgggcgatcagaagctgaagactcgtgtcataaaaaaaaactgcaatcctgactggaatgaagaattgaccctctctgtaaaggacattaaaaccccaatacatctgacggtttatg

SEQ ID NO: 51269 - DNA, 280 bp, Glycine max
  unsure (1)..(280): unsure at all n locations; Clone ID: 701139748H1
ctctacttcacatactgtcacaacccacatgcagtattctctttttaaagcacagccaaacacacactcacacacacaacaaagatcnnnatcccatttccanaccattctttgaanctcaggcttcactactcccttagttcagtngcaatggaagaatggtactacaagaagagccaagtgccagcatttgggagttgggattggaacgataacctaccttccacacaacacannnnnngaaaannnaagctggtttgctacgatgtagtaatnactc

SEQ ID NO: 51270 - DNA, 226 bp, Glycine max
  unsure (1)..(226): unsure at all n locations; Clone ID: 701139749H1
tgagggaaccattcgtcggtgggattcgaaggcnacggcgtcgtttcttcgccgccgcaagctctcatcgagagactgaaagactacggccaagaagacgttttcgccctctggtacgagctctcccccgaggaacgcgagtntctcgtcaaggacattgagagtttagatctttcgagaattgaccggattattcgatgctcgctgcgatctcaaggactgccgg

SEQ ID NO: 51271 - DNA, 276 bp, Glycine max
  Clone ID: 701139751H1
tttacacatctctccaacctttcactttcgtttctcagttttattcgaatccctctctcaatctcctttccaaatggccagcgttgaggttgcacagcaaacaccaacaacagttccagaaaatgaaacaaccgaggtaagcaagacccaggaaacaaccccagtcactgaggctcctgcaacagaacaaccagcagctgaggttcctgcaacagaacaaccagccgctgaggctcctgccccagaatcaaccaccgaagcaccaaaggaagaaac

SEQ ID NO: 51272 - DNA, 274 bp, Glycine max
  Clone ID: 701139755H1
aaatgtctcccaaatacaagctagtgctgttgatagcattggttttggttgcaacctcccttgctggtcgcacaaaggaacatcctaagcatcctccatcccttcaagaacaacaacacaccccacaccttgatagctacccgccaaagcatagaccgaaaccacctcatcctgtacatggtgccggggaggaaccaacctccattcctcgaaagaagggaccaagaaggcctccgaactgatgagtgagtcaaaggtttcagattgcctcaaa

SEQ ID NO: 51273 - DNA, 276 bp, Glycine max
  unsure (1)..(276): unsure at all n locations; Clone ID: 701139756H1
gccattttcacatcaaaacgcttcaactaaaaaaatggcgttcttgtggaacaaaactagtatcgcttnccattttcgatctcactctcagaagactgagggtntgacttcttttccgcgccgtcgattccacgtcgaacccggggctcgtgaaaaagctctcttggcagaagatgcaacgctgaaaccgttcaaatcatataagaagagtgtaaaacagctcaggaaaattgggaatgctctgacagttgttgttgttgcaggatgctgttacgc

SEQ ID NO: 51274 - DNA, 274 bp, Glycine max
  Clone ID: 701139757H1
gggacacatcactagtgtttactgtgaggaggagtgaggcagagctgatagctccggcgaagcccacccctcgtgaagtgaagctactctcagacatagatgaccaagatgggttacgtttccaaattccggtgatacagttctatcgccacgacccatcaatggcagggaaagaccctgtcgatgtgataagaaaggctgtggccaaaacgcttgtgttttactatccttttgcaggtaggcttagggaaggacttggtcggaaatgatggtg

SEQ ID NO: 51275 - DNA, 281 bp, Glycine max
  unsure (1)..(281): unsure at all n locations; Clone ID: 701139759H1
tatctccacgccgnctaactntctctcacactccagtctctgtgtctanactcncttacacaannttncacttnnactctnctctctctggctaaaatgcaaggagcaatgagatcatttttgtcacatgggaatgtcattagaaatgctgttctacaacgcgtgcgcatggtgaaccccctgctacagacaattgcctcttcgcggtttgaatctgtnacgcctgctcgcattgaggagcatggttttgagagcaccacaatttcagacatcttgaatgc

SEQ ID NO: 51276 - DNA, 265 bp, Glycine max
  unsure (1)..(265): unsure at all n locations; Clone ID: 701139760H1
ttcctctcagaaccctcgatcactcccacgcgctcctatatcctctccttcaacgtcgtctctccaacgatcacaacaacatcgtcatcccatggcaaacgccgcatctggtatggcagtccatgatgactgcaagtnccagtttttggagctgaagacaaagaggacacaccgtttcatagtttttaagattgaggagcagcagaagcaggtcattgtggagaagcttggtggagccagcccaaggctatgaagatttcactgc

SEQ ID NO: 51277 - DNA, 276 bp, Glycine max
  unsure (1)..(276): unsure at all n locations; Clone ID: 701139762H1
aagaataagagcagnagtgcagggaagttggtgtgtgtcaccggtgctgccggttatattgtcttcatggattgtcaagttccnacttgaacgtggttacactgtcagggccactgttcgaaacccaaatgatcacacgaaggtagaacatttgctaaaacttganggtgcaaaggagagactgcacctttttaaggcagatcttttgggtgaaaattcttttgactccattgttgagggctgtgatggcgtctttcatactgcttctccttttat

SEQ ID NO: 51278 - DNA, 277 bp, Glycine max
  unsure (1)..(277): unsure at all n locations; Clone ID: 701139763H1
ggcacttcgttgcttggtgatgtccctttctgttctcttcactcttggtcttgcgagagaaagccatgccagagacgaagatttttggcatgctgtttggccaaacactcccattccaagttcattgcgagatcttctaaagcctggccctgcaagtgntgaaatcgatgatcaccctatgcaaattgaagaaacacagtacccgaaaacctncttctataaagaagaccttcatccaggcaaaacaatgaaagtacaattcagcaagcctcccttt

SEQ ID NO: 51279 - DNA, 86 bp, Glycine max
  unsure (1)..(86): unsure at all n locations; Clone ID: 701139765H1
cnttccgatacttctcacantccacngtcagcttctcctnctccttctccttcgtctccactcggaccgattccanacaacatang

SEQ ID NO: 51280 - DNA, 273 bp, Glycine max
  unsure (1)..(273): unsure at all n locations; Clone ID: 701139766H1
ggctctcaatcaggcgaagaaagtggtgctaagtctgtttctacttacaggtcttcttcacatcctataactgcaccgtcccccttgtgtggtctgcctganttttctcaccttggctggggacactggtttacgttaagggacctagaacttgcaacaaacaggttttcaaaagacaatgttattggtgaaggtggatatggtgttgtttatcagggccagttaatcaatgggagtcctgtggctgttaagaagctactcaataatctagga

SEQ ID NO: 51281 - DNA, 258 bp, Glycine max
  unsure (1)..(258): unsure at all n locations; Clone ID: 701139767H1
aataagagataaccagttttctcttannttcatcaatggcaaactgcgaggaccgtgaaggatgtttcgcctcacgatttcgtgaaggcttatgcttcccacctcaagcgttccggcaagatgnagcttcctgagtggaccgatattgtaaaaacagcaaaatttaaggagttggctccatatgatcctgactggtactacattagggctgcctcaatggcaagaaagatctatttgagaggtggtcttggtgttggt

SEQ ID NO: 51282 - DNA, 265 bp, Glycine max
  unsure (1)..(265): unsure at all n locations; Clone ID: 701139769H1
tacccctcttagtcccaattttctagggttttattcattttccgatggcttctgcagatgttgagtaccgttgctttgtcggtgggctcgcttgggccactgacgaccatgncctcgagagagccttctctcagtacggcgaaatcgttgaaacgaaggtctgtttgttgcaggcatcacatctgatctcacacgattcggattcggaattttctcgatcccgttctgatctgtgatctctgatctgtttgcgttacttgatctt

SEQ ID NO: 51283 - DNA, 88 bp, Glycine max
  unsure (1)..(88): unsure at all n locations; Clone ID: 701139770H1
ctttgggaggcctcaagnacctgaattatttgaggttaaataataacagccttacaggatcctncccctcagtctcttagcaacattg

SEQ ID NO: 51284 - DNA, 274 bp, Glycine max
  unsure (1)..(274): unsure at all n locations; Clone ID: 701139771H1
gcacttcgttgcttggtgatgtccctttctgttctcttcactcttggtcttgcgagagaaagccatgccagagacgaagatttttggcatgctgtttggccaaacactcccattccaagttcattgcgagatcttctaaagcctggccctgcaagtgntgaaatcgatgatcaccctatgcaaattgaagaaacacagtacccgaaaaccttcttctataaagaagaccttcatccaggcaaaacaatgaaagtacaattcagcaagcctccct

SEQ ID NO: 51285 - DNA, 274 bp, Glycine max
  unsure (1)..(274): unsure at all n locations; Clone ID: 701139772H1
tttacacttgtncttgatctcaatgaganattgattcantatatatggncgcgaganaccaggttggcagacttttnaaaganctggagntgatgccttcntggaacatttagctcagttctatganatagtnggtnacacagatgaacaaaatatgtttgtagaccctgttatagaaaggctggatactaagcattgcattagatacaggctatcaaggccggctacnaagtatcagatgggaaacacttcagagacctctcanaactaaacc

SEQ ID NO: 51286 - DNA, 274 bp, Glycine max
  Clone ID: 701139773H1
gccgcctcttccgtaggcagcagcaatggcctcaaatcccaaaactttgacctttgaggaggtagctaagcacaacaacaaaaaggattgctggattattatcaatggaaaggtgtatgatatcacaccatttttggatgagcatccaggaggtgatgaagttttgctgacgtcaacagggaaggatgccaccattgattttgaagatgtgggccacagtgattctgctatagaaatgatggaaaaatacttcattgggaaggttgacacttcc

SEQ ID NO: 51287 - DNA, 275 bp, Glycine max
  unsure (1)..(275): unsure at all n locations; Clone ID: 701139774H1
ggccagtcctaaaacaattggagtctgctaantcctcagagattttacttcgagaacaagcttgaaaatgctacaaaggncacaaataatatgaagttcaggaaccccaaatatttgtcaatattgaaccatttgaggttctacttgccagaaatgtatccaaagctgcataaaattttgtttttggatgatgacatagtggttcagaaggacctaactgggctatggaagattgatatggatggcaggtgaatggagctgtagaaacatgtttt

SEQ ID NO: 51288 - DNA, 191 bp, Glycine max
  unsure (1)..(191): unsure at all n locations; Clone ID: 701139777H1
gntcttnngtgttgggatttttcttcccattttactaataaataaataaaatccgatgntgggttgtcatttttccctcattttctcgagancaataaatntccaatntttacactgagnttctcttctcaaaatttcttcccactttaatttnttccccttctcattgtttgtttccacngancacnnga

SEQ ID NO: 51289 - DNA, 275 bp, Glycine max
  unsure (1)..(275): unsure at all n locations; Clone ID: 701139778H1
gacacagtattttctataagtaactaaagaaaatccagaattaaagccaacttaacaaaaccagcatccaccatatgtaattcaggaagaaattcaaagctaacaaatagaacctaagcctcggtagtaggatactcaaacacgacacctttgcctgaaagtttcctgtatactgcagcaaaagtctccctttctctctcaaaggaaagaaaaggaaaganaagaaaagaaaaagatcagagtgtaggtaaacagaagcacacactacacagtta

SEQ ID NO: 51290 - DNA, 269 bp, Glycine max
  Clone ID: 701139781H1
gccgcctcttccgtaggcagcagcaatggcctcaaatcccaaaactttgacctttgaggaggtagctaagcacaacaacaaaaaggattgctggattattatcaatggaaaggtgtatgatatcacaccatttttggatgagcatccaggaggtgatgaagttttgctgacgtcaacagggaaggatgccaccattgattttgaagatgtgggccacagtgattctgctatagaaatgatggaaaaatacttcattgggaaggttgacc

SEQ ID NO: 51291 - DNA, 186 bp, Glycine max
  unsure (1)..(186): unsure at all n locations; Clone ID: 701139782H1
gcaagagtatactgtcacagaattaagtggtcanatttgtcagatctntggggatgagctggaagttactgtgaatggggagccatttgttgcntgcaatgaatgtgcattccctgtgtgcagaccttgtnatgagtatgaaagaagananggcaaccaagtttgtcctcagtgtaaaaccagata

SEQ ID NO: 51292 - DNA, 270 bp, Glycine max
  Clone ID: 701139783H1
gaacatgcagctgcaaataacaagttcttcatgatgaacctttctgccccatttatctgtgagttcttcaaggatgcactgaataaagttctgccatatatggactacgtttttggtaatgagactgaagcaagaacattttctaaagctcaaggctgggagactgataatgttgaggaaatagctttgaagatttctcagttgccaaggcatcggaaacacataaaaggattacggttatcacccaaggtgcagatcctgtttgcgttg

SEQ ID NO: 51293 - DNA, 270 bp, Glycine max
  unsure (1)..(270): unsure at all n locations; Clone ID: 701139786H1
cgttgctnnaattttngtagcatggcaatgccatgcgtacgatatgttccctctccgaatgaacnactggctatggtgcccgtactccncnaggtgaaatgcgcaagttggaggcttgccgtggaagcacacaacatctttggctttgagaccattcctgaagagtgcgttgaagcaacaaaggaatacatccatggcgaacaatatagatcagactccaaaacagttaaccaacaagcttattttatgccagagnctcgaagtccatcc

SEQ ID NO: 51294 - DNA, 268 bp, Glycine max
  unsure (1)..(268): unsure at all n locations; Clone ID: 701139787H1
gcctctccattacaaaggtagctcattccatagaattattcctagctttatgcttcaaggaggtgattttacacaaggaaatggaatgggtggagaatcaatttacggagagaagtttgctgatgagaacttcaagttaaagcatactggaccaggacttctatcaatggcaaatgcnggtcctaataccaatggttcacaatttttcattacaactgtgacaactagcnggttggacggaaggcatgttgtttttggtaaagttctt

SEQ ID NO: 51295 - DNA, 269 bp, Glycine max
  Clone ID: 701139788H1
ttcaacattgcgaatcccaccactggttgtcagaagaagctggagatcgatgatgacctgaagctacgagcattttgggacaagaggatctcacaagaggttgttggtgatgctctgggtgaggaattcaaaggctatgtcttcaaaattactggaggttgcgacaagcaaggatttccaatgaagcaaggagtgttgacccctggtcgtgttcgcctcttgctgcatagaggaactccttgtttccgtggttatggaaggcgcaatgg

SEQ ID NO: 51296 - DNA, 269 bp, Glycine max
  Clone ID: 701139789H1
agactgcaaaatccaaaaccaaaaccaaacacaacacagcattcgtcattcaccgccttgtctcgtcttcttctgtctccgaacacggaatctctctgaatcgcgggattaagagaggaatatgcaacagaggcttaagttgcagcaacaacaacaagccctcatgcagcaagctttgcttcaacagcagcagatgtaccaccctggcatgctcgccgctgctatgtctcagttatgtaggaaatattcatgtaaatgtcaccgataac

SEQ ID NO: 51297 - DNA, 77 bp, Glycine max
  unsure (1)..(77): unsure at all n locations; Clone ID: 701139790H1
cagcaatcagcattcgcaggtcaaactgctctgaagcagctcaatgagttggtccgnaagancggnngcnncggcna

SEQ ID NO: 51298 - DNA, 269 bp, Glycine max
  Clone ID: 701139792H1
ggacaaggaaagtagctagacactttactgagaaacgcttcttaatgaaataactttctctcactctgaagatgatccacggtggctacaacctccatccttatctgaaactgccactaatatattagtactttctttagaatttatttatttatattatcatcatttttacttagcaccaaaaatgaatatataattaagccataccgatggagagtgtcagagtggtaacactagctaagtattagtggcaataatcgatcaatttt

SEQ ID NO: 51299 - DNA, 269 bp, Glycine max
  unsure (1)..(269): unsure at all n locations; Clone ID: 701139793H1
gtttggttgaaagtagcanagatgtttcctttcgggcaaaagggtnaaaagataaaggggactatggtggttatgcagaagaatgtgttggatatcaacagcatcaccagtgttggaggnntcgttgancaaggcttaggcttcatangcagtgcagtcgatgcacttacttttgcagccaccaaaatctcnatccagttgattagtgctnncaaggctgatggtgggaaaggaaaaattggaaagagtacaaatttaagaggaaagat

SEQ ID NO: 51300 - DNA, 271 bp, Glycine max
  unsure (1)..(271): unsure at all n locations; Clone ID: 701139795H1
ggaccgggtatcaaaggcagagaagagagtaacaaggttgcttcgaacagtttagaatcatgtcttggtgcaccattgagtccgatcccggtgtgtttacagaactcattcagcaaatgcaagtnaaaggagtacaggttgaggaactgtattcattggaccttgactctctcaacagccttaggcctgtttatgggttgatttttcttttcaaatggcgtccaggagaaaaggatgatcgtgtcgttatcaaagatcccaaccctaactt

SEQ ID NO: 51301 - DNA, 273 bp, Glycine max
  Clone ID: 701139796H1
cttaacaacagcacaaagcgggttactgtctgttcaagctaccatctcctctctctctttcttagtgcctccttgccagaagttaaaatggcccaagaaactttcctattcacatctgaatcagtgaacgaggggcaccctgacaagctctgtgaccagatctccgatgctgtgctcgatgcatgcttggagcaggaccctgacagcaaggttgcctgtgaaacctgcaccaagaccaacatggtgatggttttcggagagatcacaaccaag

SEQ ID NO: 51302 - DNA, 313 bp, Glycine max
  unsure (1)..(313): unsure at all n locations; Clone ID: 701139801H1
gtaatgattcacaccttgtggtatgaatcatttatataattttgtttcatcagtccaaggcatttttttattgcctctgtgagacgcaagttttacgcttacattataattattatagattccatgggctgccgtctcaaagtgtttgagatgcaaattggttgtatttgatggacagacattcagacaattactgagaactccaattgcattttgtctaagggacactggcctcgtgaacaggacaatagtgatctccccccattagtatatatatngaggncnccatgtatatgctagtttatctcaaaga

SEQ ID NO: 51303 - DNA, 170 bp, Glycine max
  Clone ID: 701139803H1
taataataattttgtgatcagaattattgagctgaagaaaagacaatgggattgtgggaagctttctcaattggctacgcagccttttcttcaagcaggaaatggagttatctctaataggacttcagaatgctgggaagcacttcccttgtaaatgtagttgctactgg

SEQ ID NO: 51304 - DNA, 221 bp, Glycine max
  unsure (1)..(221): unsure at all n locations; Clone ID: 701139804H1
gttcttccttgcgctcctcctcgttcgttcgttctccctcgcgtagatcggcaatggcggagaccgagacgtttgctttccagggctgagatcaaccagctcctcagtctcatcatcaacaccttctactccaacaaggaaatcttccttcgtgaatcatcagcaacgctctgatgctttgggacaagattagatttgaggnttngacgggaaaagagcna

SEQ ID NO: 51305 - DNA, 236 bp, Glycine max
  Clone ID: 701139805H1
agatggcattggtcaaccgatctagctttctgggtttcagattgagttggaagccaactaattaatagtacctccaaaaaaaaaccatgtcccgtgactgtgattcccttcctgaaaacaccattgttgtggggtgtggggcggcgggtgtggatttcttagctaccgttgcaacttatcccaagccagatgacaaaatcagaagcacttccttcaagattcaaggaggtggcaat

SEQ ID NO: 51306 - DNA, 315 bp, Glycine max
  unsure (1)..(315): unsure at all n locations; Clone ID: 701139806H1
ggggaacatatgcagtactgtgttgatcatcctgaagagataagcaagcttgcnnaaggtgaaagctcaggtttctgaagttaagggngtcatgatggagaatattgaaaaggttctggacaggggtgacaagatagaacttctggtggacaagactgagaaccttcataaccaggcacaagatttcaggacttctggaaccagaatccgtcgaaaaatgtggctgcaaaacatgaagataaagctgattgtattgggaatattgataggactattatcaggctctctcctcctcctgttctcatctgcatcgcc

SEQ ID NO: 51307 - DNA, 126 bp, Glycine max
  unsure (1)..(126): unsure at all n locations; Clone ID: 701139807H1
gnagaactnacagaagangggaagccttgntcgaagccattaaanggtncacaggtcntttccacttngccacncccgtngacttaagtccatagacccagaggatnaaatgataaagcctacaat

SEQ ID NO: 51308 - DNA, 234 bp, Glycine max
  unsure (1)..(234): unsure at all n locations; Clone ID: 701139808H1
cccaagatgtcgagcgccgatcccgagcaccgagaagaggaggaggcacccgccgtcggcgacgacgaggacaccggagcacacgtcgctcccatcgtcaagctcgaggaggttgctgtcaccaccggcgaggaggacgaagatgcaatcctagatctcaaatcgaagctttaccggttcgacaaggatgggaaccagtggaaggagcgangcgcgggcacgtgaagttcctga

SEQ ID NO: 51309 - DNA, 312 bp, Glycine max
  Clone ID: 701139809H1
gctaaggcttggactgcctggaaacgtaggaggcactggcactgaagaagtgctcatcaggaagagaggtttctctgagactgaaactgaaactgaggaggatgagtctgctaccactgtggatttgatgcttaatctttcttctaaggaagctgctgctgctgcagatccaactgataagcacaagactttgcctaaggagaagactcttctgcctgcagatcctgctaagcctccagccaaggcacaggtggtaggttggccacctgtgcggtccttccggaagaacatgttagctgtacaaagggcgtc

SEQ ID NO: 51310 - DNA, 305 bp, Glycine max
  unsure (1)..(305): unsure at all n locations; Clone ID: 701139810H1
aaaattttgacccacaccactgcatttgtccatatatatatatccctccctcacccttgtttggagacaacaaaagaacacacattactagaaagttagaaaacatgncagcggtggccggagcatcctcgtccgtgattaaggtggctgcactttccggatctttaaggaaaggctcttacaacagagccctcattcgttctgctattgagctaagccaaggtagattgaaggcttcaaatcgagtacgtngatattcgcttttgcccttctnaacaccgatcttggggtgatgggacctnccc

SEQ ID NO: 51311 - DNA, 308 bp, Glycine max
  unsure (1)..(308): unsure at all n locations; Clone ID: 701139811H1
gcgtcctcctggggctatccttgcacctggtgagagtatcatagcaacagtgttcaagtttgtagagcaaccagaaaataatgaaaagcctgaaaaaactggactcaaatttaaaatcatgagcttgaaggtgaaaggattaattgattacgtccctgaactgtttgatgagcagaaggaccaagtagcagtggagcagattttgcgagttgtttctctagntccagagcgtccctgtcctgtttggaaaaactgaaccgacagctggtgatgctgatgccgcccttggggcacncaagnanactgca

SEQ ID NO: 51312 - DNA, 302 bp, Glycine max
  unsure (1)..(302): unsure at all n locations; Clone ID: 701139812H1
attaatgactccggcgataaaagagccactttggcaaagaattcagaatttagaggcagtggtaactgagatggctaataaacctaatacaattcctcctgaaaaagaggatattcttcaagagtcattgagtcgcataaaatgtatagaatatgacttgcaaaaaacaaagaaggccctgctagccactgcttcaaagcaagttgagcttgccgagtcattggaaagcttaaaggagagtaatttgacggaagaattcatgttggcctaaaatagagtttnccccaggaagtgnnccgttt

SEQ ID NO: 51313 - DNA, 307 bp, Glycine max
  Clone ID: 701139813H1
tgatttgtagtttgttttgtgctttagataaaagttctgccaaatcaagaggggttttaagatcatagtgtgtgttttgcaacaatggctaagttctttgctgctatgatcttggcactctttgccatttccatacttcaaacagtggtaatggctgctaatgaacaaggaggccacttgtatgacaacaagagcaaatatggaagtggaagtgtcaagagttaccaatgcccatcacaatgctcgaggagatgtagccagacccaataccacaagccctgcatgtttttctgtcagaagtgctgca

SEQ ID NO: 51314 - DNA, 310 bp, Glycine max
  unsure (1)..(310): unsure at all n locations; Clone ID: 701139814H1
gggtgaggacaaccatagtgaccactccactcaacgtagccacggnntcgtggaacaataggaaaagagacagagacagatatagaaatcctgacggtgaaattccctagtgcagaggctggtttacctgagggatgcgaaaatacagagtcaatcccctcccctgacttggtactgactttcttaaaggcaatcaggatgttggaagcccccttggaacacctactccttcaacaccgtcctcattgccttatagccagtgctttcttccctngggcatctcattccgccactaaactcaaaatccngg

SEQ ID NO: 51315 - DNA, 304 bp, Glycine max
  unsure (1)..(304): unsure at all n locations; Clone ID: 701139816H1
cccaagcattgtgacattggctggatattgtgcagagcatggccaacgacttctagtttatgagtatatagcaaatggaaatctgcatgacatgctccattttgctgaagatagcagcaaggcattgtcttggaatgcccgtgtacgcatagcacttggcacagcccgggctttagagtacctgcatgaagtgtgcttgccttctattgtacatagaatttcaaatctgcaaatatattacncgatgagggcncaancctcactgtcgactgnggttnacggtttgacacnaaacctgggggag

SEQ ID NO: 51316 - DNA, 316 bp, Glycine max
  unsure (1)..(316): unsure at all n locations; Clone ID: 701139817H1
ggggttggaatcggtgggagatttagcgattaacgtgattctgaaaaaattaggagcccaagacattgcgagagtgggcgtgtgtgagcaaaaggttcagttcttccgcttccgatgacactctttggatcaatctctgcttcaatgaactcgctttgacacaacccctcgatcatctcggaaaccctctctcttccttcaaggatgctatctagcatggagaggagntttgttatgtacccttggtctcttgttaagcgtgtaaaaaggtgctgggatagaataaaaacctggttgaccaataattttcctgaag

SEQ ID NO: 51317 - DNA, 311 bp, Glycine max
  unsure (1)..(311): unsure at all n locations; Clone ID: 701139818H1
aggcatcattcatacactgaacgaacgctcagctcagtcaggtgccggcgttcctctttcacgttctcatggaaaacgacgacgtcgacatgcacgctgccgacaccagcgaagaattggatgacatgaagaagcgcttgaaggagatggaagatgaagctgctgctttgcgagagatgcaggccaaggtcgagaaggaaatgggatctgcgcaagatcctgcaaatgcttctgcaagtcaggccaataaagnggaatagattcncgatnatctttgtaggnatgnggactnttcnnnccccctgaggggg

SEQ ID NO: 51318 - DNA, 227 bp, Glycine max
  unsure (1)..(227): unsure at all n locations; Clone ID: 701139819H1
tgaaccaacacttctagtctctcttactttataaccatgtaaaaatgagtcacctaatgaaaaattagtagcttcttgttgtgctttttattttgtntgtgttgagataaatctgtntgtntgtntggtattgttttgtgttttatgaattatttgatgggtgaagaaggagaagtggtgagaaagcaaggacaaaggggtgttggtggagataagtggtacttgta

SEQ ID NO: 51319 - DNA, 290 bp, Glycine max
  unsure (1)..(290): unsure at all n locations; Clone ID: 701139820H1
ggctccctgagagagctcgtcgcggcggttgcagaagaagaangcaagatgaagttcaacancgcgaatcccaccactggatgccagaagaagctcgagatcgacgacgatctgaaactgcgagcattttgggacaagaggatctcacaggaggtcatcggagatgcactcggtgaggaatttaagggctatgtcttcaaaattaccggaggttgtgacaaacaaggtttccaatgaagcagggagtgctgactctggtcgtgttagacttttgcttcacaggggantcc

SEQ ID NO: 51320 - DNA, 310 bp, Glycine max
  unsure (1)..(310): unsure at all n locations; Clone ID: 701139822H1
caaccacggtcctctcgctataccctggcgacgagtcactcttcgaagagcttcttcgggtcgtgtcccgacccgtacccgtacccggattctccacgctcgaggatttccagagacgctgccanntggatgtttccactggctttgacgtcgtagnngaatcgtggccgttgcttcgtgacgagccaatttgctgaaaatacattaatcgttaatcactaactactttttttngggtttgtattttttaccctaattattgatttccggggtgtttttttttagttattagggaatgatgaaaagaagt

SEQ ID NO: 51321 - DNA, 300 bp, Glycine max
  unsure (1)..(300): unsure at all n locations; Clone ID: 701139823H1
ttcccaacaatgcagagnttaggtgttgtcaaccaaanttggaatccgtcttgcaaaagctgaagctattaattggncatctctggnatatgggcaagatacacttcccccantatnaataggccgatagtcaattctgaaagggcttcatacccatcaccaaaccaaggacaanagttgggatagttggaagctccagtgaaaaaagaggagaagnaganagcttgatggtgatgctgctttgaataaatgttccggatattaccaaaatgcngatgaggactgagggagcatgnncnt

SEQ ID NO: 51322 - DNA, 309 bp, Glycine max
  Clone ID: 701139824H1
gtgggaacttatccgatgtcttttatcaaaaatatctccaaggttcttccaaaatgttctcagaacgatcctacaacatgttcatgggaggcaacaaccagtttaacgttgctggttcagatgacatggatgatcttgatgatacaaccactgattcctcggaacctgacttgctttggcaatttaatcattccaaacttaccagcatagccatggcaacggatcaaaggctaggagacctgtctccaaagcccacaaatagcccagtattgagcaagatatgttcattcttccttggtccttcacctt

SEQ ID NO: 51323 - DNA, 300 bp, Glycine max
  unsure (1)..(300): unsure at all n locations; Clone ID: 701139825H1
tgaaatgggtcaatttcctcatgttacaagctatgttagcaaggcagaacagtcaccagatgcccttgaagcagtaacagttgcaaagctacgatgtgctgcaggattggctaatctagaagccaaaaagtacaagcttgctgcccgaaagtttctagaancaggacctgaactgggaagtcactataatgacgtaattgcacctcaagatgttgcaacatatggaggactttgtgcattgcaacatttgatcgggcagagttaaagagtaaagttatagacattcccaacttccgcatt

SEQ ID NO: 51324 - DNA, 294 bp, Glycine max
  unsure (1)..(294): unsure at all n locations; Clone ID: 701139826H1
ctccagattacaccatatttgttggtgacttggctgcagatgttactgattatcttcttcaggagacatttagggctcgttataactcggtgaagggtgcaaaagttgtcattgataggctaactggccggaccaagggatatggctttgtaaggtttcagatgagagtgagcaagtgagggtatgactgagatgcaaggggntctttgctcaacaaggcccatggggattggacccgcctctaataaancccccaccattcntnccagcccaaagcttnatatcagantcncc

SEQ ID NO: 51325 - DNA, 306 bp, Glycine max
  unsure (1)..(306): unsure at all n locations; Clone ID: 701139827H1
gggtatgttgagttcgaggagtcgccgccggacgatttcgatccggcgcatccgtacaaggacccggtggcgatgctggagatgagggagcacatcgtgagggagaagtggatccaaatcgagaaggccaanatcattagggagaagctccgatggtgctaccgcatcgaaggcgtcaaccacctcccagaagtgccgccacctcgtcaaccagtatctcgagtccacccgcggcaatcggttggggcaaggacggtctcatctttctctcnacgttcccaaaggttgagcctgtttgaatctgnt

SEQ ID NO: 51326 - DNA, 287 bp, Glycine max
  unsure (1)..(287): unsure at all n locations; Clone ID: 701139828H1
tttttttttacataatcatggccatgaacacgtgctgttcaatccctgcttgcctcatcttccaccctcaccaggaacnttcatgcctcaggagaaaaaangaagattgtaggggtgttctacaaagggaatgagtatgcttcgaatcccaattttgtgggatgtgttgaaagagcattgggtatacgtgagtggttggatcacagggtcaccagtacatagtcatgatgacaaaganggncccgattcagaactagnganacacttcntgatgccantgtttcttt

SEQ ID NO: 51327 - DNA, 301 bp, Glycine max
  unsure (1)..(301): unsure at all n locations; Clone ID: 701139829H1
gccgaactcagggcgagtgtgttcgaagccatcgaagaggaagatcgtgtgattganaaggaacaaggtctacctcctgcattgctaggtagttgcaacgatcgagctaagcagcttcacgcttctcctccagggagacttcttacggcaatgatatgtgaataccttgactgggcgcactcagtcatacgctaaaagtttatcttccggaatgtatttggagaaagatttttggaagacagagcttaaggatttagtaccaaaaatggatatgatctcaacagaaacagagatagtcctc

SEQ ID NO: 51328 - DNA, 180 bp, Glycine max
  unsure (1)..(180): unsure at all n locations; Clone ID: 701139830H1
gcaaaacttagggttgggcctttttttgaggttttcagcgcttctttctcacaatggttcttcagaatgatattgatttgctgaatcctccagctgagttggagaagagaaagcacaaactcaagcgtcttgttcagtcaccaaactctttcttcatggatgtaaagtgcnagggtgcta

SEQ ID NO: 51329 - DNA, 300 bp, Glycine max
  unsure (1)..(300): unsure at all n locations; Clone ID: 701139831H1
gatcctacaactatggaggaaagtcgtttaaggcttcatccggctcttctggtgcaagcttaaatgaatgcaaaagtgttgctcttagggctctcaaagttaatgagtcgacatgtactcatatgaagtgtacttttggtgggatatggaatggtggagggggggatggacagaagaacctttttgttgcctctttcttctttgaccgggctgctgaggctggttttgctgatccaaanttgccatcgcgatantccgcccgcaaatttgngggttcnattagcaacttgccaaanaaat

SEQ ID NO: 51330 - DNA, 155 bp, Glycine max
  unsure (1)..(155): unsure at all n locations; Clone ID: 701139833H1
ctcgancngnaaaaaaccaanaaaccatnnatactacaaatttttttcngtttctccgccgccgcacaaccaccacctcctccgttcggatctccggcggacctactatccctactactactctactctatttacacggaagagcaaaaaactat

SEQ ID NO: 51331 - DNA, 312 bp, Glycine max
  unsure (1)..(312): unsure at all n locations; Clone ID: 701139834H1
cgccactggtttcgatcccacacccacaaacgcaaaccctccatcctttgaatgctcttgcgttttcctttcactacctcattcctaactcacacacacacaacgggtgatatcaatgtcgactcctgctaggaagaggctcatgagagatttcaagaggctgcaacaagacccgcctgcaggaatcagcggggcacctcaggataacaacataatgctgtggaacgctgtcatatttggtcctgatgatacnccatgggatggaggcagtttaagtggncncccaantttaggggggttttcnaaacancc

SEQ ID NO: 51332 - DNA, 216 bp, Glycine max
  unsure (1)..(216): unsure at all n locations; Clone ID: 701139835H1
gcagtttcacggattttctaatcacactcatagcgttaggtttagggttttacacagagagagtgcatgaatggcganngcgcnagatttgtatccctcngaagangancttttgnacgantaggantnnccttcganancctntcagcctcaagctatggtggcgctacctgatngcgcgttctgaagctccgttcaagaagcgctcgtcatttt

SEQ ID NO: 51333 - DNA, 183 bp, Glycine max
  unsure (1)..(183): unsure at all n locations; Clone ID: 701139836H1
ggacgctgncagttgcctactgctggggacactgaactcnggnctaaatatangcttgaangatgccctaattngcaannnctnaaatcagggatagtcctttggggatggagctctganatccggttgcatnattattacaacatgagantcctctggatgncatcctgtaattgacgcgnc

SEQ ID NO: 51334 - DNA, 306 bp, Glycine max
  unsure (1)..(306): unsure at all n locations; Clone ID: 701139838H1
aaataaatgatggctcactgtgttttccctgttaatgcacttcctactccttcaccatgtttccactccaaagttggaatnncaatggcctcagggatttgccttgagtgtgaggccaacgaatccgaagaggctttcaagtgcctgcaaagtgagagcaactttgggtgcttctgataaatcaattggaattcccaaccaatggtacaatgtaattgcagatcttccagtgaaaccacctccaccattgcatcccaagacttatgaaccatcaaaccggatgacttgtcacccctttttctgatg

SEQ ID NO: 51335 - DNA, 310 bp, Glycine max
  unsure (1)..(310): unsure at all n locations; Clone ID: 701139839H1
aagccccactcaaccaccacactnactctctctgntcttcttctacctttcaagtttttaaagtattaagatggcagagacattcctatttacctcagagtcagtgaacgagggacaccctgacaagctctgcgaccaaatctccgatgctgtcctcgacgcttgccttnaacaggacccagacagcaaggttgcctgcgaaacatgcaccaagaccaacttggtcatggtcttcggagagatcaccaccaaggccaacgttgactacgagaagatcgtgcgtgacacttgcaggaacatcggttcgtnt

SEQ ID NO: 51336 - DNA, 307 bp, Glycine max
  unsure (1)..(307): unsure at all n locations; Clone ID: 701139840H1
cacaatgactcacaaganactaccgaggcaagttcatccacgattggttcaaatctaaatgagataatgggcagatagggcagagacgagcaaccaacagaatgctatggctaaaagcagtaatgatgagacattggatgaggaagtggaaagttaccagaagtatgccgaaaccagttatgaggagacagtagaagaggcaagtaatcacaactgtggtgatgggatggaggaagaggtagaggaattgaacagaattgttatgaaactaattatgactggntcagtgaatttctaggcctaggag

SEQ ID NO: 51337 - DNA, 305 bp, Glycine max
  unsure (1)..(305): unsure at all n locations; Clone ID: 701139841H1
gggctacctccatggtgaagcttatgcttttctctgctctcatactcttgtccttgcaagcagttgtgtctgtaacaccactgcattttcaacatccactagaccctttaaccaaacaagagataagtcttgtccaaaccatagtccaaaacaagtacccaagctcaagtaacaggttgagcttccactacattggactcgncgaacctgaaaaggatgccatcctcaaatgggaatccatcaaaccaatgttataatgtccctcgcaaagccttggccattgttatatcaacagccaaacccag

SEQ ID NO: 51338 - DNA, 292 bp, Glycine max
  unsure (1)..(292): unsure at all n locations; Clone ID: 701139842H1
atcccaattccccatcggcagttattcatagacggagactggaaagtccccgtcctcaagaatcggattcccatcatcaacccttccacccaacacatcatttnggatatcccagcagctactaaggaagacgttgatctcgcngtcgctgccgccaaagctgccctctcccgcaacaagggcgccgattgggctccgttccggtccgttcgggctcgctactccgcgccatcgctgccaagatcacgagaaaaagctgaatagaaaatcgagctattgatgtggaaacgct

SEQ ID NO: 51339 - DNA, 292 bp, Glycine max
  unsure (1)..(292): unsure at all n locations; Clone ID: 701139843H1
gggaagttcgaagagggaaaagctattgggacaactgaggttgaaaactgccaagactgaaaatgatgcaaagataatacttgggttgagccctggtgagctttcagtggtgaatcctaacaagaaaacctctgttggaatgatgtgggataccgtttgattccagcaatcccagctcatctcttctcacagatgacgatatccccaaatacgtggcgttttaccatttcatgtgtgggncatcccatacataggctganagtgggtggtgggctctagtgacacaccatgg

SEQ ID NO: 51340 - DNA, 305 bp, Glycine max
  unsure (1)..(305): unsure at all n locations; Clone ID: 701139844H1
gtaagcatgggagtcctcaaagatctatgctttacctctttcctttgcatgctcttcctctcctccgncaatcccattctcggttgtggtactgtggcaaaccccccaaaaagcacaagcctggtaaaacaccanagacacccacagtacccgttgttaagccaccagtcacaatcctcccattgttaagccaccagtcanaatccctcccattgttaatccaccagtcanaatccctcccattgttaatccaccagtcanaatccctcccattgttaatccaccagtgacagttccaccgttgt

SEQ ID NO: 51341 - DNA, 208 bp, Glycine max
  unsure (1)..(208): unsure at all n locations; Clone ID: 701139845H1
tttccaangctcataccttggngtgggactggttggtccatttcagaattcatctgggatgttnngtntgctggccttcaactcatggtctctaagttattaagcgaagaanancacaagangcatagggatatacttgancaatacncntcaaaagcagagtactatatttgttcangtctcaacaaanacaatgatagcaataang

SEQ ID NO: 51342 - DNA, 241 bp, Glycine max
  unsure (1)..(241): unsure at all n locations; Clone ID: 701139847H1
ggtcacccttcccttcccacaagacccacagttctacttccacagccatcgaaatgnctacagcagcacagtcactctttctatattccttgctttctgctttcatcttcactctgtttttgggggtcagatcttaataccgaaggcttcgtattctgtttgaatatngaatcattgggagtggagtagtattgngatcgagcgtaaaagaangggatnttttgttnnatggntttggggg

SEQ ID NO: 51343 - DNA, 306 bp, Glycine max
  Clone ID: 701139849H1
gggcttgtcgggtcaaacaagtgcaacagagcgagatctgagtcgtaattcggagtcccttttgaaaaaagaggtctttttgctgtaattcacttggttctccatttgggttacttggattttgtgaggttgtcttggagttggagtcatggcagttgaggttgtgggatttgagatggttcaaggaccagtggagaatggtactggaggaaaacctgttttaaatgagaaggagaatggcaagctggaaaaagatgtgggagctgcggatgccatcaaatttgggacacatggagaggatctgca

SEQ ID NO: 51344 - DNA, 309 bp, Glycine max
  Clone ID: 701139850H1
caaacttgaagcctctaattctcttcttttatctcctagccattgttgttatgatttcaataccatcaagccactgcagcagaaccttgcttccagaaaacgaaaagcttcatagagaacacttgcaagaaaactcccaactacaacgtttgccttgagtctctgaaggcaagccctgggagctccagtgctgacgtcacagggctggctcaaatcatggtcaaagagatgaaggccaaagcaaacgatgcattgaaaagatccaagagttgcagagggtgggagcatcggggcctaagcaaagaagag

SEQ ID NO: 51345 - DNA, 103 bp, Glycine max
  unsure (1)..(103): unsure at all n locations; Clone ID: 701139851H1
gcgatctgaggtncggaaattaaaagagcaatnctagcacagggattctaggacgaaganaaatngctcgccgaggggatcgncggcattcancncaacgcat

SEQ ID NO: 51346 - DNA, 304 bp, Glycine max
  unsure (1)..(304): unsure at all n locations; Clone ID: 701139852H1
aganatttctgaccctaaccgcgtgtcgttaaaatcctcaaacgcagagtagncnttagaattancaaaaancggggaaagggagattgaattcgatcctgggacgttaacgttgtttcaattcaattgtgcgtcctgtcggtgccctatctcagacgacgatgtcatctttatatagaggggaatccaggaggtacaacaatanaccaagaggactcataatttgacaacgcagaagangcaagagattaaggaagcctttgagttatttgatactganggctcaggtatattgatgccaagg

SEQ ID NO: 51347 - DNA, 118 bp, Glycine max
  unsure (1)..(118): unsure at all n locations; Clone ID: 701139854H1
atctgaaactacttgttttaactttgtctatncaacgacnccgttccgnactctgtntacttcntcggnaccctaataagcttcngcactncctgctgangnncacncagacagangg

SEQ ID NO: 51348 - DNA, 305 bp, Glycine max
  Clone ID: 701139856H1
ccagaacaatggtttctctggtgatttccccattggattgtggtcattacccaaaattaagctcatcagagctgaaaacaacagattctcagggaagatacccgagtcagtttcaggagctggtcagttggagcaagttcaacttgacaacaacacctttgctggtaaaattcctcaaggtcttggccttgtcaagagcttatacagattttctgcttctctcaaccgtttctatggtgaattcctccgaacttttgtgactctcctgttatgagcatagtgaatctctcccacaattctctttc

SEQ ID NO: 51349 - DNA, 299 bp, Glycine max
  unsure (1)..(299): unsure at all n locations; Clone ID: 701139857H1
cggcaacaaaggcatctgctgcgacctggcagcaaatggtgaatcagatgcaaaaggcagcattgtctactcgccttgggattccaatgatttatgggatagatgcagttcatggacacaacaatgtctacaatgctaccgtttttcctcacaatgttgggctnngagttaccagggatcctgtgctcataaagaagattggagaagcaatgcccttgaagttagagctactggaattccgnatgtctttgcnccatgcattgcggtctgcagagatccaagatggggagttgctatna

SEQ ID NO: 51350 - DNA, 152 bp, Glycine max
  unsure (1)..(152): unsure at all n locations; Clone ID: 701139858H1
atnagttgtcatggtagcaaggngaaaaantcaaacacttcctatggatcagcagccactggtagtggtannnnnnnnnnnnnnnnnnnnnnnttcaacactgttcagccatcaccacctactaccgatcaggttcaagcatcagcacagac

SEQ ID NO: 51351 - DNA, 300 bp, Glycine max
  Clone ID: 701139859H1
caaaatcggttttcttctgtctctgatctctcaaagcttcaaattctccttgtttggtttgtttgtgtgtttggagtatgatgtcgccgccggcggtggtaacggaggaggaggggcggagcaacgtgtcgtcgaccgtggcgtccggttcttcgcaatccttggaccgtttctctcagaatggggctggattgaaagaacgaaattacttagggttatctgattgctcatcagttgatagcagtgcctctactgtgccaagcttgtgtgatgagaaaaaggagaacatgaatttgaagg

SEQ ID NO: 51352 - DNA, 151 bp, Glycine max
  unsure (1)..(151): unsure at all n locations; Clone ID: 701139862H1
cggaagggtttgatggaacaagacctgagtaagttggatgtnacaaagttgcatccactttctccagaagtcatatctcggcaggctactattaatattggcactataggtcatgtggcacatggcaagtcgacagttgtgaaagcatanc

SEQ ID NO: 51353 - DNA, 207 bp, Glycine max
  unsure (1)..(207): unsure at all n locations; Clone ID: 701139863H1
aaaaaatccgcgattcgctcttctcttggaaaagtgaaaaccagaagtacgaacgaaagagaagagcgatttagaagtgagagaagatggggttgtcgttcacgaagctgttcagcaggttgtttgcgaagaaggaaatgaggattctgatggtangtctcgatgctgctggtaagacaaccatcttgtacaagctcaagcttggng

SEQ ID NO: 51354 - DNA, 305 bp, Glycine max
  unsure (1)..(305): unsure at all n locations; Clone ID: 701139865H1
gctcctcccactactcaattccccaacaaaaatgtacgcttttcggtcttcgctcaaaagaaggcaaagaaacttcgaaagattattttgaaggaagatgtggcttatgtaggaaagcaagggcaacttcttgatgtgaaggctggctttttcagaaattacctgcttcctatgggaaaagcacaacttgttactccacagcttctcaaggaaatgaagatagangaagaaagattgaggctgagaaaaaacgggtaaaagaagaggcacagcaacttgcctatttttgaaactgttggggcttt

SEQ ID NO: 51355 - DNA, 300 bp, Glycine max
  unsure (1)..(300): unsure at all n locations; Clone ID: 701139866H1
ccaccccctcttactcctcagatgttgacaatggtatagtgaaggatgtagtcctatggagaagaaagaaaataaatataagcgttcttgttgcggcaacagcggcatgggtgttgatggaagtgtttgaattcaacttcctcactctcatatcatgggtggccatactcggtcttgcttcaatattcctctatgccaatatgcttagacttttgggcaaggaaccaccgaacttgttggggttggaagtgagtgaaaaaacaacaacgagantagcccacacattcgagctngntgaag

SEQ ID NO: 51356 - DNA, 304 bp, Glycine max
  unsure (1)..(304): unsure at all n locations; Clone ID: 701139867H1
ggtgtagtagtagtggagagaaatcgcgatctggaacagagtttagctgaaanaaaaagnntcgagttgaaatgggtttctttggtaccattttggggtttttgggatttggggttgggatttcgattggtctcgtggctggctactttctcttcatctacttccaacccaccaatgttgnggatcctgaaatcaagccattggcggagcaagagcaagagactctgcaacgaatgtttcccgagattcctctttggatanaaaatccnggttttgatcggcttaactggcngaacaatttgnt

SEQ ID NO: 51357 - DNA, 158 bp, Glycine max
  unsure (1)..(158): unsure at all n locations; Clone ID: 701139868H1
tatttgaatgttcgaattaattgaatgtataagganataaaatccactacttgacattttagtatggaccatatattcattttgtatttgatgacagatgtgttttgtntgtntcctgtgtatcgatatataaagaagagaatcggttattccgtaaa

SEQ ID NO: 51358 - DNA, 264 bp, Glycine max
  unsure (1)..(264): unsure at all n locations; Clone ID: 701139869H1
agagtcagatacnccaacccaactctatgactatggaggagctatcttctcttagctcggtggagaggaacattcacatagcctctgtcctggaagccatggcggtggacactattttcgccgctgccaaatctctcctttgcttcnccattctgactggatctctgnngactgacatcaatcattcagtgtcccnaaaattgaccccaatggatgtaagattgctttngatgatctctgnaagggaaancatattatgttnaa

SEQ ID NO: 51359 - DNA, 281 bp, Glycine max
  unsure (1)..(281): unsure at all n locations; Clone ID: 701139870H1
ctccttgtattacccaacagatgcnnccagttcaacaagataatgaactacaagcntggtggacggaagctgtggagaagggtcatggtgacttaaaagaaaagccttggtggcctaaaatgcagacaactgaagatctcattcaatcatgctctattatcgtttggacagcttcggctctccatgctgctgttaattttggacaatatccttatgggggcttaatcctgaaccgtccaatctagccagaaggtttatcccagctgaaggaaccccagagt

SEQ ID NO: 51360 - DNA, 298 bp, Glycine max
  unsure (1)..(298): unsure at all n locations; Clone ID: 701139871H1
ccaacttcaaatctcacggcttaaacgtgaggnaccttgtggccctctctggaggccacaccatagggtttgcaaggtgcaccaccttcagaaacagaatctacaacgtaagcnacaacataatagaccccacgtttgcagcatctgtgaggaagacatgtccgaaaagcggangagacaacaacttgcatccacttgatgctacacccacaagagttgacaccacatatacacggnttgctgcacaaaaagggtttctccattctgatcaagagtgttcanggaaaaggcacagaaa

SEQ ID NO: 51361 - DNA, 301 bp, Glycine max
  unsure (1)..(301): unsure at all n locations; Clone ID: 701139872H1
cacatgcaaganagagaccggggaggtttacctcgcgctgttgccggtggtgttcggcatcgttgtcgcgagcaacagtgaacctttgtttcatttgttcgggtttttggtctgtgtcggttccaccgctggtcgtgctttgaaatccgttgttcaggggattttgttgacttcggaggccgagaagcttcactccatgaacttgcttctctacatggctcccttgggcggcgttnattttntggccgtttactctctacattgaaggaaatgtgttgncttngantttgaganggccanc

SEQ ID NO: 51362 - DNA, 293 bp, Glycine max
  unsure (1)..(293): unsure at all n locations; Clone ID: 701139873H1
cttccttctcaaatattcttgagatccccattttctccgaagcaaagccatggctaagggtcctggtctctactctgacatcggcaagaaagctagggatctgctgttcaaggactaccacagtgaccagaagttcaccatcaccacctactcaccgactggagtggctattacagcatcaggaaccaggaaaagtgaactgtttctggctgatgtcaacacccagttgaagancaaaaacatcatatgatatcaagttgatacagattctatctcttcanaatatcatgnca

SEQ ID NO: 51363 - DNA, 299 bp, Glycine max
  unsure (1)..(299): unsure at all n locations; Clone ID: 701139874H1
ccaattctagggttcctcttctcctcttcatctcttccatattcttcacctcttttcccgggttgacgtttggtgcaattgtgtcgctgagatcaattgagatttttaaaacgcacgantggctgaaagccactaacaacggtgtatttcctatgcaaaggggagaacgagacggtgcttccagatgtcaagaaaccccacgccatttatgctttcaatggtcaagaatcttggcagcctttaagcagcttttcaagtaaaaaatgcaagcggtgtggattctatgaggaggacagcat

SEQ ID NO: 51364 - DNA, 203 bp, Glycine max
  unsure (1)..(203): unsure at all n locations; Clone ID: 701139875H1
gttggaagggnggacttcagatgattgtggctggacctagagatgacacttcaactcttcaagctaaagatcaaaggatgatccgttgagagcctcgtcagcataanccccccacagaaggacagtgtctcangcagcttcctctcaggcttctcagaatggnaacnacatgnngggncgtgcacctgcattgattacngaat

SEQ ID NO: 51365 - DNA, 194 bp, Glycine max
  unsure (1)..(194): unsure at all n locations; Clone ID: 701139877H1
atagaaagcatctgctcancatgnnntgcaattacgcagggnncnattagcagatggcagangatgttgcagtcaagagactttcaagcagttctggacaaggaataactgagtttatgacagaagttaaactattgcgaagttcaacatcgaaatctggtaaagctctngggctgtngcattagggggaaaga

SEQ ID NO: 51366 - DNA, 220 bp, Glycine max
  unsure (1)..(220): unsure at all n locations; Clone ID: 701139878H1
cagggttcagattttacccccaatcaatgtttctccctctaactttttaattgaatttaatgtttatattgttttatcttctcgtacaagcactatacagagcaagctacgaaagtttcgtgttcttggcactcacaacaactacccccangattcagaagttgaagagaggantttgattatcaatggnngtacaanccgttngggggggaattatccc

SEQ ID NO: 51367 - DNA, 168 bp, Glycine max
  unsure (1)..(168): unsure at all n locations; Clone ID: 701139879H1
ctcatcatgcccatcacattcaccttagtttaggaatagagatttgngcagctagtagtgccaacagttgcttcttacttttgcaacagactctgggatcttgtagcttaaccactgaacagatggtcgctgtaattgcaacaagaaaatgggattggcttccagatc

SEQ ID NO: 51368 - DNA, 302 bp, Glycine max
  Clone ID: 701139881H1
gttcaccctatttacaaacttctgtttcctcactaccgtgacaccatgaatattaattcacttgcccggaaagccctggtcaatgcagatggtattatagagaaaacattcttgtggggtaggtactctatggaaatgtccgctgtcatttacaaggactgggttttcactgatcaagcattacctaatgatcttgtaaagagaggagttgctgttaaggacccatctgctccccatggagttcgtcttttgattgaggactatccttatgcttctgatgggctagagatatgggatgccac

SEQ ID NO: 51369 - DNA, 305 bp, Glycine max
  Clone ID: 701139882H1
gctctctcgatctaattttccgactaacactaacaatgacggatgcagctgaagacgctacacgacgccgtaatgcggtggccgagtaccgcaagaaacttcttcaacacaaggaattggaactccagagtacgatccgtcagagaaaatttgcgtgcctcgaagaaagagttcaacaaaactgaagatgatttgaagtctcttcaaagcgttggacagatcattggcgaagttcttaggcctctcgacaatgaacgcttgattgttaaggcaagcagcggacctaggtatgtggttggctgccc

SEQ ID NO: 51370 - DNA, 225 bp, Glycine max
  unsure (1)..(225): unsure at all n locations; Clone ID: 701139883H1
gtggttctgacttacataggctcctcactgggggcatganncagtgaactnnggataagtttttttgtgtnaagaatttgtatnataatggcaggcatggcaanaggaagagcagatgtgaaatctagaaaaaatttggtcactacaactgtgttggntttggtgactgttggtggtttttnctacttctattctcagaatagtgattcatcatctnctgttgag

SEQ ID NO: 51371 - DNA, 298 bp, Glycine max
  unsure (1)..(298): unsure at all n locations; Clone ID: 701139885H1
gctacccagaacaagatccgcagggtttttgctttcactgattctgagttgttgcacgaccagatntccatttgggaaaaaattggagatgcctcttttgacggcactgagagaaaggattctggaacttgccaacaattttgaagattttgttttaaaccttataccctctactgatcttgagcagccactgcatttggccaaagtagctattggacttgtcactttccctgtaaaggtgagatattgcttaagaactgttctatttgctgtgatgacaagccagtgccattatgat

SEQ ID NO: 51372 - DNA, 299 bp, Glycine max
  Clone ID: 701139886H1
gattatgttcacggcaagggtcttaagcttggaatttattcagatgctgggtattttacttgtagcaaacagatgcctggttctcttggtcatgagtttcaagatgccaagatctttgcatcatggggtattgattatttgaagtatgataactgtaacaatgatggatcaaaaccaactgatagataccctattatgactcgggctttaatgatggctggtcgtccaatcttcttctcactatgtgaatggggagacttacacccagctctatggggtgctaaagtgggaaacagctg

SEQ ID NO: 51373 - DNA, 298 bp, Glycine max
  Clone ID: 701139887H1
tcagtttcaactacaacaacccatgtctcttattcgcaaatgggtacccttcttcttcttcacttccactttctcttcagaataagcccagaaaatcagcatcagtgattgtgagtgcccgaaagaaagataagaaagaagatacccatagctctgttcccaaacccgatgaggtcacgggtttcttccccgaagccgtgctccttaaaaagagaacagttgaggaagaaggtaagcttctcccggagtttgaagacgctgaggaaagacaactctttgaagcgctgatgttgagtag

SEQ ID NO: 51374 - DNA, 297 bp, Glycine max
  unsure (1)..(297): unsure at all n locations; Clone ID: 701139888H1
tcccaagantggggagtatgttgaacaccatcttaagaatcccccttctgtcccgtctgacaaattatctcatgtgtacacggccattttgaagtctgacaatgagttgcaaatattgattgatggggaacagaagaagaaggtaaatttcttatctgctgatgattttgaaccccctcttatccctcccaagacaatcccagattctgatgataagaaacctgaggactgggatgagagagagaaattccagaccctagtgcagtaaagccagatgactgggatgaggatgcaccc

SEQ ID NO: 51375 - DNA, 293 bp, Glycine max
  unsure (1)..(293): unsure at all n locations; Clone ID: 701139889H1
cgggttgtgagtgtatacgcatcacgcatggcagctttccttcgacgctggattccacgatggaagattttntcttctccaccctgacgggatagcaaatctttcatgaaattgagaattgctgctgctaataaacaagcttccattgagatgggggagttcaccgggagtggtgagtatgtgactatcggcgaatttccttcctccaggacaaatcatcaaggnaagttcagttcttccnctggggnttcccaacttccatgnggttcaagggggcctttngggtggaggaa

SEQ ID NO: 51376 - DNA, 293 bp, Glycine max
  unsure (1)..(293): unsure at all n locations; Clone ID: 701139890H1
gaaacatgaaggtctcccccttagcattttcaatcctttttttgtccttcaccatagaactcttcattgggcattgcttcagcagcacaagaaccagtgcttgacacctcaggccagaagctgagaacaggtgtcaagtactacattctaccagtcttcagaggcagaggtggaggcctaacagtttcaagcagtggcaacaacacatgncccctctttgtggtgcaagagaagctgaagtctcnaaggggcaccccagttacttcacacctaaatgccgaaagtggtgtctt

SEQ ID NO: 51377 - DNA, 294 bp, Glycine max
  Clone ID: 701139891H1
gcacgaggtggtagcactacatgtttcttttcattcattgttgaacttcaactttcaacttgaacttgaacttgttgcatttggatctcatggcagaagaagcactactgcaaaacaagcaggttctattcaaagggtacatagatggtgttcctaaagaaaccgatatggaactcaaggtcgactcacatattgcgctcaagcctcccccacaaggctcatcagctattctcgttaagaacctttatctctcttgcgatccatacatgcgcggtcgcatgcgtgatttccagg

SEQ ID NO: 51378 - DNA, 188 bp, Glycine max
  unsure (1)..(188): unsure at all n locations; Clone ID: 701139892H1
ctttctcgtcactagctctgtgcattcttctctcgctctctgccttccatcacactcggcattncnctttcccaagatagtagaagatggcagacactgaggatattcaacctcttgtntgtnacaatggaacaggaatggttaangctggattnnctggagatgtgccccacgtnctgtgtttccca

SEQ ID NO: 51379 - DNA, 223 bp, Glycine max
  unsure (1)..(223): unsure at all n locations; Clone ID: 701139893H1
gtgatttctgggttcagtttggggcgttggantttctctccttttcctcactctcatcttggtgcaacaacactttccctctccgttcccaaggttcaagtgtttctccaaggatccgattccaattcctcttcttcttcattctcgtggcgttttcccttcacaaccactctttcttccaangcttcccgtgagtcctctgcataggggtgaagtgaagtgt

SEQ ID NO: 51380 - DNA, 190 bp, Glycine max
  unsure (1)..(190): unsure at all n locations; Clone ID: 701139894H1
gcgtcaagggtttctctgaaggcgaaggggaagagttcaaagggatcgaaggctgcggaagatcgatccgcgagcgagtgcctgaaggagtggacgacatgggcgatgcgaaaagcgaaggtcatcactcactacggtttcatccctttggtcatcgtcatcggtatgaattctgacccccaanccccnt

SEQ ID NO: 51381 - DNA, 191 bp, Glycine max
  unsure (1)..(191): unsure at all n locations; Clone ID: 701139895H1
ctcgctcctcgccagancattgtattgcagaggaaagaccgagaaaaaagaagaaggaattttgatggtaaagtaatattctaatttccnaaattcgattttgttgccgaaggaagaaaagaaggaaatgggaggttcatcggatacgaagctcctgcaagacctgttgttgtacgcagcgagcccgcctt

SEQ ID NO: 51382 - DNA, 222 bp, Glycine max
  unsure (1)..(222): unsure at all n locations; Clone ID: 701139896H1
cttgactgtcttagcaacatgagtaaaagcctagaccttacacagtctactggagataaagggtcaaagttggatgctgaccaagtactcaaactggttccagtatggtctaaaagtgttcaagactggaacttattaattggaccactggttgacaagatgtttggagatccatcaaatgcaactattgtcaaatttttgagttatatangtgcananccg

SEQ ID NO: 51383 - DNA, 287 bp, Glycine max
  Clone ID: 701139901H1
ctcagaatttcatgctgtgaaataaggatctggagcagaagttgtagatcctgaaattttcactgtgtagagtttggaccaaagttagagtttttgagagacatctttgagaatgagatacgtggaagacaaagggtgctataacaacaatggaccaacacaagagaccccaaatagcagtgccatgtactcagagtttcacaaaggaaaagatgctactagtgtctccaaccaccaccatcgagcaaccatgggaaaaccaacaccttctaagtgggacgatgcac

SEQ ID NO: 51384 - DNA, 282 bp, Glycine max
  unsure (1)..(282): unsure at all n locations; Clone ID: 701139902H1
tgggtggtgaggaattgtgtttgatggagaactcagggaaagggaagaggctgtggaagaaggtgaagtaccagctggtggagtaccactccttgcccggttatttgagagacnacgagtacattctcggtcactatcgatccgaatggcccatcaggcaggttttgttgagcgcattcaccatccacaacgaaactctcaacgtttggacgcatttgatcgggttcttcatatttctggcattgaccatatacactgccatgaatcttaattcgctacagg

SEQ ID NO: 51385 - DNA, 250 bp, Glycine max
  unsure (1)..(250): unsure at all n locations; Clone ID: 701139904H1
aggatagctaannttgtcttataaactacgtanaataaccgttacaaaagattatttgtaccaaagaanaaaataaaaaaagcaatgctataaagataaangaaaaacactcttgtaaggtaagtttattttaaaataagtaagaacttttattttatcataaattttggtgaatttaagtcatggtatacgttaaactaatttgaaatttacaattttttatttatttactcacattaaaaatgaattt

SEQ ID NO: 51386 - DNA, 278 bp, Glycine max
  unsure (1)..(278): unsure at all n locations; Clone ID: 701139905H1
ctctcaaggccactgattttggtctctctgtcttcattgaacaagggaaggtttaccatgatatggttggcagtgcttactatgttgctcctgaggtattgcgtcgtagttatggaaagganatagatatttggagtgcaggcatcatattgtatattcttctgagtggtgtaccacctttttgggctgaaactgaaaagggantatttaatgccatattggaaggtgaaattgattttgtnagtgaaccatggccatccatatcagacagtgctaaa

SEQ ID NO: 51387 - DNA, 278 bp, Glycine max
  Clone ID: 701139906H1
ctccgcaccagtttcaccgcacgaatatcttgttgtttggagcgatccgagaaaaactctgtaaacatgttggtttaccaggacctccttacaggtgatgagcttctctctgactccttccgttacaaggaaattgagaatggaatgctgtgggaagttgaggggaagtgggttgttaaaggagcagttgatgtagacattggtgcaaacccttctgctgagggtggaggagaagatgagggagttgatgatgcagctgttaaggttgttgacattgt

SEQ ID NO: 51388 - DNA, 278 bp, Glycine max
  Clone ID: 701139907H1
gtgatttctgggttcagtttgggcgttggagtttctctccttttcctcactctcatcttgctcaacaacacttccctctaccgttcccaaggttcaagtgtttctccaaggatccgattccaattcctcttcttcttcattctcgtggcgttttcccttcacaaccactctttcttccaacgcttccgtgagtcctctgcatagggttgaagtgaacgtgtcgtcaagtgagggttcggagaaaagttcggaggaaacccttttggggaatctcactg

SEQ ID NO: 51389 - DNA, 268 bp, Glycine max
  unsure (1)..(268): unsure at all n locations; Clone ID: 701139908H1
catcatgggtgtgcaagatgactcaacgcgatttgtcactacttgaaaatcagnttcccatgtttgtgttggaggaattgcacacaagggtcatccttggagacaatgacacaaaagataacagtgtcaaatttgttcagcttgcctttaactactttgaagattatttttcacacaagccaagttttaaagtggagatgatcaagaattgtaaatcttgcaaacactttactgatttgatcagattcacctcacttgcctacaaagt

SEQ ID NO: 51390 - DNA, 273 bp, Glycine max
  Clone ID: 701139909H1
tcccaccactggatgccagaagaagctcgagatcgacgacgatctgaaactgcgagcattttgggacaagaggatctcacaggaggtcatcggagatgcactcggtgaggaatttaagggctatgtcttcaaaattaccggaggttgtgacaaacaaggatttccaatgaagcagggagtgctgactcctggtcgtgttagacttttgcttcacaggggaactccttgcttccgtggatatggaaggcgtaatggagagcgtaggagaaagtc

SEQ ID NO: 51391 - DNA, 273 bp, Glycine max
  Clone ID: 701139910H1
accgaatctccgaagcgttcgttgtaaccgaaatccggtgcaccgagagagatccgaatgagggatacgaatctggagttgcaggaatcgggttgggaggagctgcgcaaggaagcgcgcaagatcgagggtgatctcgacgtcaagctctcctcctacgccaaactcggcgctcgtttcacccaaggaggttcaggttatgtagatagtggttcaccacctattgggtccagtaggtttggaagtccatggaaatggaaatccagtctttac

SEQ ID NO: 51392 - DNA, 273 bp, Glycine max
  unsure (1)..(273): unsure at all n locations; Clone ID: 701139911H1
ctctgttgctgcattcccccatggcttctggttcagattttgcgttagcggtttcttctgaactcgagtcagttttgaggctggagactgttaactactttgttacgaggaggccatggcttgatctttatggagttaacgtgagacctgttgcgccagttgggngtgctagtaggaggccttatgtggatcctgcacttatacatcgttccttncctgatgagctgctttttgaggtttttgctcgaatgactccatatgacttggggaggg

SEQ ID NO: 51393 - DNA, 273 bp, Glycine max
  Clone ID: 701139912H1
gctccggcaacctctcttccggcgccgccgctatctcggccgcgcaccaatcttcaatttgattacttgggtcaacgatttctgtcattctcaatcatggcaactagacttcagtttgaaaataattgtgaagttggagtcttctctaaacttaccaatgcctactgtttggttgccattggtggttctgaaagcttctacagtgtatttgaagccgagttagcaggtgttatccctgtggtcaagacatccattggcggtactcgtattatt

SEQ ID NO: 51394 - DNA, 273 bp, Glycine max
  unsure (1)..(273): unsure at all n locations; Clone ID: 701139913H1
gtcctcctttacctgcaaaaacagcaaatggctctgnttaacctcatacttgtctggttatttttcttgagtctgtgtctttattcgtgtcctacttcggcccagttaagtagacaccactatgcaaaaacttgccccaatgtagaaaacattgtcagagaagcagtcaaaaagaagtttcatcaaacatttgttacggtccctgccaccattcgtctcttcttccatgattgcttcgtgcagggctgtgatgcctcggttttggttgcatcc

SEQ ID NO: 51395 - DNA, 277 bp, Glycine max
  unsure (1)..(277): unsure at all n locations; Clone ID: 701139914H1
tgcttacctcttcctttgcatgctcttcctctcctccgccactcccattctcggttgtggctactgtggcaaaccccccaaaaagcacaagcctggtaaaacaccaaagacacccacagtacccgttgttaagccaccagtcacaatccctncccattgttaagccaccagtcacaatccctcccattgttaatccaccagtcacaatccctcccattgttaatccaccagtcacaatccctcccattgttaatccaccagtgacagttccacccgt

SEQ ID NO: 51396 - DNA, 280 bp, Glycine max
  Clone ID: 701139916H1
aaccctatcaaaggaacaaacccgaaacaacccacccaaccctaattcaactcttccgatctgatcactgtgagtaaaaattctaaatgagccgggcacaggatgcaaaccgatcattcttcccttttggaaatccttttaggatgatatcaccgaaaggcccaaaaatttcttcacagctgttgttaatattacatgcttttgaagcaactttggaagagaggctgaaaaagcttattcccaagagcaaggatgagatcctcagcttgtcttggatgac

SEQ ID NO: 51397 - DNA, 283 bp, Glycine max
  unsure (1)..(283): unsure at all n locations; Clone ID: 701139917H1
ctttgcgaggcggccagaaaaggtgacacggagaaagtgaggtctctcatagactccggcgctgacgtcagccacttcgacggcgaggncctcaatcctctgatgcacgccgcaaagcacggccatgcacccgtcctcaccctcctcctctccgccggcgctccctggaacgctctttccccctccaacctctccgccggcgactacgccatgcaagaaggccacaacgaagccttcgagcttctcgtcaacgccgggattcaagccgaactgatcctgggaa

SEQ ID NO: 51398 - DNA, 276 bp, Glycine max
  unsure (1)..(276): unsure at all n locations; Clone ID: 701139918H1
cagtacccaacagctacccaatccattgcttaacagtcacgcaagcagcaaggatcgcaattgcattttgtgggaatcggcggcgagaaaatgcagggttggttctcggggcagagtagcgaggaggaggcgaacgacgtcgtcgttgctcgccgattggaactcctacgcatccgcccaaacctctgaagattcatccactttccccttcgatatcgaatccgccgttaggtctgccaangacaccgtttccggcatttcagcgtggtttctaaa

SEQ ID NO: 51399 - DNA, 278 bp, Glycine max; identical to SEQ ID NO: 47176
  Clone ID: 701139919H1

SEQ ID NO: 51400 - DNA, 277 bp, Glycine max
  unsure (1)..(277): unsure at all n locations; Clone ID: 701139920H1
ggaatcccagatcttcatagccattgttccctcttgcttcttatgattggatctagatggcaaaaccaagttcagctgatggtaggactagaagccatgtgcaaatctttatagtagttggtctgngancncntcttctatatattgggagcatggcaaagaagtggttttggtaagggagatagtatagcattggaaattactaagannggtgcagactgtaatgtagttcccaatttgagttttgactctcaccatggtggagaagttagcaaaa

SEQ ID NO: 51401 - DNA, 275 bp, Glycine max
  unsure (1)..(275): unsure at all n locations; Clone ID: 701139922H1
ggagaatatgaagttgtttgtnttctttgttgctgcagtagttttggtagcatggccatgccatggcgcaggctaccaaaggttccctctccgaatgaaaactggctatggtgagcgttcttcggaggtaaaatgcgcaagttttaggcttgctgtggaagcacacaacatccgagcgnntaaaaccattcctgaagagtgcgttgaaccaacaaaggactacattaatggcgaacaatttagatcagactctaaaacagttaaccaacaagctt

SEQ ID NO: 51402 - DNA, 274 bp, Glycine max
  unsure (1)..(274): unsure at all n locations; Clone ID: 701139923H1
cgttcttcttgtccccaccactcgcgggtggaagtcgcgttttcgccactcgctggtgtagttgtgttgggccccancagcgcgacagggaacgcggccttggagtccgtattcttcttttcgaagctgtggaccccaggcttgcccgcggccacgggacccacctgccacacgtggctnacgttccctcgccgaatcggggatcttgacggagccgtagatggttacggcgccgttggattcttcggccgcgaggtcccacgagtcgaaggta

SEQ ID NO: 51403 - DNA, 272 bp, Glycine max
  unsure (1)..(272): unsure at all n locations; Clone ID: 701139924H1
aacctcttccttctttcattcggtgcctattcccattttcttcctctaaaccctaaacnactctttctcttcttccttcgctcgttgttctccctcgcgtagatcgacaatggcggagacagagacgtttgctttccaggctgagatcaancagctcctcagtctcatcatcaacaccttctactccaacaaggagattttccttcgtgaactcatcagcaacgcctccgatgctttggacaagattcgatttgagagtttgacagataaga

SEQ ID NO: 51404 - DNA, 273 bp, Glycine max
  unsure (1)..(273): unsure at all n locations; Clone ID: 701139926H1
gccaaatcaggaccagtacacaacttgccagaaaatcnnncntggcagtgaaggaaagcaacacaagccaaaatattnnnnnnnnnnnnnnnnnnnnnnnagaagcttgtgatccttgcaagtcttttggccaaaagtgcagccacattgtcaagaagcagcgnccaaaattctacattcttcgccgctgcatcgccatgctcttgtgttggcatgagcgtggtgacacataataaggcctgccacacagtatcatccttttctctatcattg

SEQ ID NO: 51405 - DNA, 271 bp, Glycine max
  unsure (1)..(271): unsure at all n locations; Clone ID: 701139927H1
ggnacttcagggtatcttgcaccgggagtatcttgacgctggaaaccttacatataaagtagatgtatatgcatttggaattgtattattagagttaataacaggtcgaagaattagcgagttggaacagttcaatggacactcgtatctttctgaatggtttcatcccatacgcatgttagagcccggtcatatcttacaaaacgttcgttctctcaaaccatgctttgattctaaggagtcagtggaatttaatcttcagttgcaagcc

SEQ ID NO: 51406 - DNA, 273 bp, Glycine max
  unsure (1)..(273): unsure at all n locations; Clone ID: 701139929H1
gttntancgcagttacttctncgatttaaggaanatgggtaaggaaaaggttcacatcagtattgtggttattggccatgttgactctgggaagtccactaccactggccacgcagatctacaancttggaggcattgacaagcgtgttattgagagatttgagaaggaagctgctgagatgaacaagaggtcttcaagtatgcctgggtgcttgataagcttaaggctgagcgtgaaagaggaatcacaattgatattgccttgtggaagtt

SEQ ID NO: 51407 - DNA, 212 bp, Glycine max
  Clone ID: 701139931H1
acaacagacaagtttgttgttcctgttctaatctctggaccatgtcatacaactgaatctaattgcaattcctgtgagccgtggcaaagcttttgaatttagtgcctctcctctctgtttacccttccagatattgcagatacagcaagatcatgagtgggacttcggaaaagaaacttgtaagaatcgatgttagttctgatactgtatgc

SEQ ID NO: 51408 - DNA, 280 bp, Glycine max
  unsure (1)..(280): unsure at all n locations; Clone ID: 701139932H1
gtgagacttcactttattttttttccaattcccttcactcctanacttttttttaggagggaagggaggggcaatggagatgcacacacaacctcatanganacaccattttggtgtacaacattgttgtcttattagcctcttcatcttcaccttcttcactactaacaaccanccaagcttttgattatgctgatgccctttcaaagagtcttctctactttgaagcacaacggctctgggaggataccttacaatcagcgtgtcattggcgtgacca

SEQ ID NO: 51409 - DNA, 280 bp, Glycine max
  Clone ID: 701139933H1
gcaccagctgttacaaccatacgtagacctaatgttcgtgttgcagaagattggactataacagttatataacatttccggttcgagggaggagtttaatgttcaaagttactgctagtgcacaacgagattttgtttctgtagttgagttgatatgaagttcagctgcaacgttggggtaagaagaaagaaaatcattaattttgaagaatgcatttgcaccaactcagtttgagcggcttatttaatgtaggactcgttgactggaaagatttaacat

SEQ ID NO: 51410 - DNA, 274 bp, Glycine max
  unsure (1)..(274): unsure at all n locations; Clone ID: 701139936H1
ttcattcatctatggccacccttattgctcccagcaaccactctccccaagaagatgctgaagctctcagaaaggcttttgaaggatggggaactgatgagaacactgtcatagtaattttgggnttcagaactgtgtatcagaggcagcaaatcagaagagtttatgaggnaatttaccaggaggatcttgtgaagcgcctagatcntgagatcaaaggagactttgagaaagccgtgtaccgatggatactggaacctgcagatcgtgatgc

SEQ ID NO: 51411 - DNA, 272 bp, Glycine max
  Clone ID: 701139938H1
ccattcccatcaaacaacaatcccaaaacctttcaaattaagagcatctatattctgggataatatataaagggaaaagctagaatggccctcctcaaacacctcctcctctcattcaccatgatcatcatttcttttgttgcttgttatagcactttgcaagaggacccacctagtagtatatatgttgatcattcaccttctattgacgatggtgggacagtcaagaacttgatcgagcaaagcacaaatgttttgagcttaaacaggtt

SEQ ID NO: 51412 - DNA, 270 bp, Glycine max
  Clone ID: 701139939H1
tttcaatccacattggtcaggccggtatccaggtcggaaacgcctgctgggaactctattgccttgaacacggcattcagcccgatgggcagatgccgagtgacaagaccgttggaggaggagacgacgccttcaacacattcttcagcgagaccggcgccggaaagcacgtgcctcgcgccgtcttcgtggatcttgagcccaccgtgatcgacgaagtccgaaccggcgcgtaccggcagctcttccacccggagcagctgatcagcg

SEQ ID NO: 51413 - DNA, 272 bp, Glycine max
  Clone ID: 701139940H1
ggggtgtggtagtgtggcagcgacacgtatcaacttcaataatcgcatcgcagaagcagtttccggtgcatctcatcgtctccgaaaatgaacgacgcagatgtctcgaagcaaatccagcagatggtgcggttcatccgccaggaagctgaggaaaaggccaacgagatctctgtctccgccgaagaggaattcaatatcgagaagctgcagttggtcgaagccgacaagaagaagatcaggcaagaatacgaacgcaaagagcgccaagt

SEQ ID NO: 51414 - DNA, 269 bp, Glycine max
  unsure (1)..(269): unsure at all n locations; Clone ID: 701139941H1
ctctccacgcccttcttgggtaaccgtctgaagtgcagcaatggcnnatggattgcattcgcagcatccatcggtagttcagaagttatctggacagtcttatcttgtgtccaggcttgctcctaatcactccagaaactgttctaccactggtagttacttcaatggnggtttgcagtcttcangtttggttccagtcacggcacacgcnccggctganaaaggggngtctggatttttgttggatttcctgatgggcggagtgtcgg

SEQ ID NO: 51415 - DNA, 81 bp, Glycine max
  unsure (1)..(81): unsure at all n locations; Clone ID: 701139943H1
caaacagagcgcagaaaaataaaaaggtgaaacgaatatcgatttcaattccgccacacaacatacnnncgnncaaaaaaa

SEQ ID NO: 51416 - DNA, 267 bp, Glycine max
  Clone ID: 701139944H1
ctagcctgagatcacattgaacaatggtgaaggctgtggccgttcttggcagcagtgagggtgtcactggaactattcacttcgttcaggagggaagtggtccaaccaccgtaactggatctcttgctggtcttaagcctggtctccatggtttccatgtccatgccttgggggacactaccaatggttgcctctcaactggatcacatttcaatcctaataacaaggagcatggtgcccctgaggatgagaatcgtcatgctggtg

SEQ ID NO: 51417 - DNA, 275 bp, Glycine max
  unsure (1)..(275): unsure at all n locations; Clone ID: 701139947H1
tggaactgctcggtatgcaagtgttaatantcatttgggagttgaacaaagcagaagagatgatcnagaatctctcggatatttgctcatgtattttttgagaggaagtctcccatggcaaggcttgagagctggcactaaaaagcaaaaatatgacaagataagtgagaagaagatgcttactccaatagaggtcttatgcaagtcatatccattggagtttacatcatacttccactactgccgaacgttgcggtttgaagataagcctgatt

SEQ ID NO: 51418 - DNA, 278 bp, Glycine max
  unsure (1)..(278): unsure at all n locations; Clone ID: 701139948H1
gaaagcaactactgtctcttactccacacacaatcccannaggtntctctctctatgagcntgctttacaaggagancccaatgtggnancccaccaagcgncatntctncagctgaaagcctcttatccatcaaacactcgtgtcccattacagtactgtctgttaggcagagaaagaggaaaaaaaaggatataattgagatggatgtgagtaggagaagagttggagttagatgcaggctggttgcagggtcagtgtgggagagcagaatgaaga

SEQ ID NO: 51419 - DNA, 273 bp, Glycine max
  unsure (1)..(273): unsure at all n locations; Clone ID: 701139950H1
cttctctctctcaccaaaacaatttgctcacaaaggaggaaaaatggcacctttcgtttccctctctttgttgcttctctttctcaaccaccccctcctttccctctcaaccaaccctgaagggaacgctctgcatgctttgagaagcaggctttctgatcccaacaatatgttgcagagttgggacccnacactggttaatccctgtacttggtttcatgttacctgtgactccaacaatcatgtgattcgcttagacttgggcaatctaac

SEQ ID NO: 51420 - DNA, 238 bp, Glycine max
  unsure (1)..(238): unsure at all n locations; Clone ID: 701139954H1
acgtnaacagcttcattcattcttnaaaattaaaacattatattaatatcaaaattcnanacagattaatacttaactagnatttnaaganccttattaccaggancctaggctattgnggagtttgttgngtccattacatnaaattatgaaaaactatgtnccacttatgnaatgngancacattaccccnaatcncatgttncttgttgccaactataaggngaagggncaaggg

SEQ ID NO: 51421 - DNA, 156 bp, Glycine max
  unsure (1)..(156): unsure at all n locations; Clone ID: 701139955H1
gcacaacangattgatgacanattagatctgtgtcattagtccttggtttatcaaaccaccacaattacaccggtcgaaaacacnnaacactactcatcncatcttattcanntcacatccacttncanggctacatcattttncacttcacaatc

SEQ ID NO: 51422 - DNA, 269 bp, Glycine max
  unsure (1)..(269): unsure at all n locations; Clone ID: 701139956H1
cgaactttgcgagttctagggttcccccacggccatggaccaggccgaattaacctccgaacaggttctgaggagggacatcccatgggagacctacatgtccaccaagctcatctcaggcaccagccttcagctcttaaggcgctacgatcaccggccagagagtcacagagcacagttgctcgatgatgatggtccctcttatgtncgcgtgtttgttcgtgttttgcgtgacattttcaaggaagataccgtggagtatgttttgg

SEQ ID NO: 51423 - DNA, 263 bp, Glycine max
  unsure (1)..(263): unsure at all n locations; Clone ID: 701139957H1
acactggaccagaccactgaggtttctctggtggagaaatccgtctccaccattcggttnttggccattgatgctgttgagaaggccaactctggtcaccctggtctccccatggggtgtgctccaatgggtcacattctctacgatgaggtcatgaggtacaatcccaagaatcccacttggttcaaccgtgaccgtttcattctctctgctggacatggctgcatgctccaatatgctctccttcaccttgcaggctatga

SEQ ID NO: 51424 - DNA, 139 bp, Glycine max
  unsure (1)..(139): unsure at all n locations; Clone ID: 701139958H1
ggaatnncctgnngcnctgantctnccatatcgnngtagctcctncctctaaaggcgntngcaattagagaaggagctacaacgataagaagaatcagagcaccaggnaattccgntcaatcagggaagtgtcttggaa

SEQ ID NO: 51425 - DNA, 266 bp, Glycine max
  unsure (1)..(266): unsure at all n locations; Clone ID: 701139959H1
gcgtcagcaatcactgtgcacagaacgtgaagtgcccggttttgattgttaagaagccaaaaccaaccaccggagnnnnnnnnnnnnnnnnnnnnnnnnnnattaatcgttactagctttgtttttatgtaaaaaatagacaaccagtttgcttctgtcgcttatgtgttatttgggctctgtgtgttttgtttgtttctcctctaaaggaatatctcgccaaatattaaatgttaaaggctaagtgaagatgaggatgcacgcct

SEQ ID NO: 51426 - DNA, 269 bp, Glycine max
  unsure (1)..(269): unsure at all n locations; Clone ID: 701139960H1
gggtaaancgcgggagtaactatgactcnccttaaggtagccaaatgcctcgtcatctaattagtgacgcgcntgaatggattaacgagattcccactgtccctgtctactatccagcgaaaccacagccannggaacgggcnnngcgcgcatcagcggggaaagaagaccctgttgagcttgactctagtccncactttgtgaaatgacttgagagnngtnggataagtgggagctggaaacagcgaaagtgaaataccactactttt

SEQ ID NO: 51427 - DNA, 272 bp, Glycine max
  unsure (1)..(272): unsure at all n locations; Clone ID: 701139962H1
ctagcacanaaaacttggnatagcagnaancaataactcatttgaggctcngtgagaattgagaaatggctaaagatgttgaggttcaagagcaaggaggagagtactactgccaaagactaccatgaccctcctccagcacctttgttcgacccagaggagctcgcncagtggncctncnatanagccctcatcgctgantncatagcaacccttctctncctgatgtcactgtgcttcaccattatnggctnacaaaaggcgcatgatac

SEQ ID NO: 51428 - DNA, 274 bp, Glycine max
  unsure (1)..(274): unsure at all n locations; Clone ID: 701139964H1
ggacnctacnactgctactccnattcccgacacgcctnaatttcattcccttnttggtggccttcttagaagattttgtccgttcatgtgttancccaccctnntacccttgacatatttggctcacatcatggattatattntattatangatgattttggnntgattnacatcatatgcaggcngttcattccggtgcagatcttgaatctgctatttcaaattgtatgggctacaaatctgagggtcagggcttcatggtaggggtgnnga

SEQ ID NO: 51429 - DNA, 198 bp, Glycine max
  Clone ID: 701139966H1
tatcccaacgtctctcctcctccgctcgctgatcctgtcggtgcttccgatctcgctgctgctgcctcggacgacgttgttgcggaacctgaaattcacgcgctgatttcagacgaagagcacgatcacgatcacgatcacgagcatgagcatgagcatgaccatgacctcgagcacgatcacgagcatgagcatgac

SEQ ID NO: 51430 - DNA, 271 bp, Glycine max
  Clone ID: 701139967H1
cgaatggctcattaaatcagttatagtttgtttgatggtatctactactcggataaccgtagtaattctagagctaatacgtgcaacaaaccccgacttctggaagggatgcatttattagataaaaggtcaacacaggctctgcctgttgctttgatgattcatgataactcgtcggatcgcacggcctttgtgccggcgacgcatcattcaaatttctgccctatcaactttcgatggtaggatagtggcctaccatggtggtgacggg

SEQ ID NO: 51431 - DNA, 113 bp, Glycine max
  unsure (1)..(113): unsure at all n locations; Clone ID: 701139968H1
tgnaatcaaagctgcggtggacaaagcctgcaaacgccatgtggtctcatgtgcagatatcttggccattgcagcccgtgattctatagccatatatgggggtccacacnaca

SEQ ID NO: 51432 - DNA, 263 bp, Glycine max
  unsure (1)..(263): unsure at all n locations; Clone ID: 701139969H1
cccaacctttcactnctngtttctcagttttattcgaatccctctctcaatctcctttccaaatggccancgttgtggttgcacagcaaacaccaacaacagttccagaaaatgaaacaaccgaggtaagcaagacccaggaaacaaccccagtcactgaggctcctgcaacagaacaaccagcagctgaggttcctgcaacagaacaaccagccgctgaggctcctgccccagaatcaaccaccgaagcaccaaaggaagat

SEQ ID NO: 51433 - DNA, 267 bp, Glycine max
  unsure (1)..(267): unsure at all n locations; Clone ID: 701139970H1
ttganttgacaatgaggcctgctcttgctttgcttcctcttctatttgctttcttgttagctgccactacagaatcaagaaaagatacangggaatattggaaaatgatcatgatagatcaggaaatgccagaaggacttcaaggtcttgtttcatttcaatctgaaaataaccctaagactcaagagcagcttggtnaaggttccaaaaaccattgtgaagagtctctagttacaaatacacaagttaatagtgacttcgaaccca

SEQ ID NO: 51434 - DNA, 257 bp, Glycine max
  unsure (1)..(257): unsure at all n locations; Clone ID: 701139971H1
aaaagccagaagnagcgaaatcgtaatcgcaatctagcggatatgaaggtcgtcgctgcatacttgctcgcagtgttgggagggaatccatctccttctgccgatgatatcaaaaacatcctcggcgcagttggagctgaggctgagcatgagttgattgagttgctcttgaccgaagtcaagggcaaagacttcaatgagctacttgctagtggaagtgaaaagatttctgcagtggctggtggtggtgcagcggt

SEQ ID NO: 51435 - DNA, 264 bp, Glycine max
  Clone ID: 701139972H1
ggggttgtattatcccattgcaaagactctagcagagaaagcgggttgggactttgcgaaggagacaggttttgatgttgtcatgataaaccctggtacagcattgggccctctgcttcctccaagaatcaattcaagcatggctgtgcttgttagtgttctcaaagggggcaaagagacctacgaggacttctttatgggaacggctcacttcaaagacatagcattggcacatattttggcattgagaacaagaaagcagca

SEQ ID NO: 51436 - DNA, 265 bp, Glycine max
  unsure (1)..(265): unsure at all n locations; Clone ID: 701139973H1
cgacgntgacgagntngncnggtctcatcaataanatccaacgagntgcaccgntntnggagatcacggnggcgagggttntcgctctaggcgnctcttccctctntcgccgncgncngtngatcnnagttcanggacancgncgggtgatataaagtgttgtcgggaganattttctgcctcgtgtgatctgnnnattgtnacacggaggccactagtgctgcaacttcacaagacggaagaagggacacatgagtatnctgag

SEQ ID NO: 51437 - DNA, 264 bp, Glycine max
  unsure (1)..(264): unsure at all n locations; Clone ID: 701139974H1
aacttcncactctctttccaaancacncccnttctgnntccccttacccntctnctgtgtgtgatgatgtagatagagaanaaaaagagaccagtgtgcagtgagaaagaggttggncacttcttgngtggctttgtnntgttctntgtgttggaatttgtngatgggtgaagagggagaagaggngtcaagagataaggaacagcaacacatgggagtctatggaaatgagtggntgtatagtagtccctgtgcaaatnggcg

SEQ ID NO: 51438 - DNA, 265 bp, Glycine max
  Clone ID: 701139975H1
ctcccgcagcagccatggttctcaaaactgaactatgccgattcagtggtgccaagatctacccaggaaagggcatcagatttgttcgtggtgattctcaggttttcctgtttgcaaactcaaaatgtaagaggtatttccacaatcgcctgaagccttcaaagctcacctggactgcaatgtacagaaagcaacacaaaaaggacattgctcaagaagctgtgaggaagaggagacgtgctgccaaaaagccttactctaggtc

SEQ ID NO: 51439 - DNA, 263 bp, Glycine max
  unsure (1)..(263): unsure at all n locations; Clone ID: 701139976H1
cggatccnaagagtaagcctgagtgctatggtgtcttcngccttacctatgatttgagggctgaagaagagacaagatcctggaagaaattnattaacattgcagtctcaggtgctgctggaatgattgcaaatcatctacttttcaagcttgcatctggtgaagtttttggcccagatcaacctattgctctcaaattattgggatcagaaaggtcaatccaagctcttgaaggtgttgcaatggaattggaggactctttg

SEQ ID NO: 51440 - DNA, 264 bp, Glycine max
  Clone ID: 701139977H1
ggtggaaagcttgaaggatgttatgtttgttttgcgaacggagacagtgaagatatggagagtagcactcccaatggctctgcttgcactgtttcagcttctcatggactcctcaacttccatctatgctggtcatattggagacattgaactctcttctatcggtgtttaccaaggtgtcatcggtgccatctatttttacttgctgtttggtatgtcatctgcactggcaacactttgtggccaagcttttggagcaggaaa

SEQ ID NO: 51441 - DNA, 118 bp, Glycine max
  unsure (1)..(118): unsure at all n locations; Clone ID: 701139978H1
gcttgtggtcatcccttacagcagtgttgatcagcncgaagactatataatagcctttgctccaatcacttcctcttgttcatgccatnaactaaaccctttctacagttacaaatct

SEQ ID NO: 51442 - DNA, 272 bp, Glycine max
  unsure (1)..(272): unsure at all n locations; Clone ID: 701139979H1
ctcacttccacaaattcctccaanccactaaccaaacccttcactactccaaattccaaaacttcttcacaactccttcttttccctcttctgttgcccgatcttctgcctccaagattttggtatttgggattgatcacctggagttggaaatggttaaaagttatggagtgttctgatttgcaaaagatatcatgttgcggtgcttagagggacttaagcctttatttgcttccatattacgatgttgtgacctggatatatataaccag

SEQ ID NO: 51443 - DNA, 271 bp, Glycine max
  unsure (1)..(271): unsure at all n locations; Clone ID: 701139981H1
gnagaagaagaagatggcattgggtgttcctgctcttcccctgacatacgtggctccacgttctggcacttgttgccagcatcttggtcgtgctctgggtcctcaattttaggggtggcttggcttgggattctgataacaaggccctcatcttcaatcttcatccagttcttattgtcattggcttactagtccttgggggtgaagctattataagctacaaagcattacccctgaagaaggaagtgaagaaattgatacaccttgtttt

SEQ ID NO: 51444 - DNA, 268 bp, Glycine max
  unsure (1)..(268): unsure at all n locations; Clone ID: 701139983H1
gtacgcacatacatacacatccattcgtacataaatacttatatctcttcttccttcgccgttaattctctgaatccctagctcttctgttctccgatcngatcatggcctcgcttgtcaacaacgctaacggcgccgtcaatggttttcctggaatatcccagaagctcattatcgataccgaccctgggatcnttgatagcatggccattcttatggcttttcaaagtccagatgtggaggttctgggtttgacnaccatttttgg

SEQ ID NO: 51445 - DNA, 266 bp, Glycine max
  Clone ID: 701139984H1
tgatttcgagaagaaggtttcgataaaggaatcgatgtcgatgtcgatgtcgacagagcttgatccagccaaagttcttcttttgcttcgtggtttcctccaaattcagcaacgcagggccgaagcatattctaagctcaaaagtgggttttctgactacatggcctctggaggggaattggcttacaagcagctctgcagtgaaatcacaatagagtttaacaattgctcgaaaaaagtccttgaaatggagtcactgtttagaa

SEQ ID NO: 51446 - DNA, 259 bp, Glycine max
  unsure (1)..(259): unsure at all n locations; Clone ID: 701139985H1
ctcgtgcctctagggttatcatatctccatttccatttcctctctctcagtttccaagaatcttaagctntgggaaagtcttacccaaccgtgagcgctgattaccagaaggccgttgagaaggcgaagaagaagctcagaggcttcatcgctgagaagagatgcgctcctctaatgctccgtttggcatggcactctgctggaacttacgacgtgagctcgaagaccggtggtcccttcggaaccatttntnnacccc

SEQ ID NO: 51447 - DNA, 264 bp, Glycine max
  unsure (1)..(264): unsure at all n locations; Clone ID: 701139986H1
caacgcctttcttctccgtttccgtttcctcgttcgaattcgctttttgatctgcgaaaatgagagagtgcatctcgatccacattggtcaggctgntatccaggtcggaaatgcttgctgggagctctactgcctcgagcacggcatcgggcccgatgggcaaatgccaagtgacaagacagttggcggtggtgatgatgctttcaatactttcttcagcgagactggtgctggaaagcacgtgccacgtgcagtgtttgtag

SEQ ID NO: 51448 - DNA, 264 bp, Glycine max
  Clone ID: 701139988H1
gtacgccattcctataataataataagtgacactataagaataggtacattgtcaaagtttcattcaccaactccttttggtttatacagagacagggagacaagacagagcagtacaggttactaccaatggctaccaaggtttatattgtttattattctacatatggacatgttgagaagctagctagagagatagaaaaaggggctgcttcggtggatggagtagaagcaaaactgtggcaggtacctgaaaccttgcct

SEQ ID NO: 51449 - DNA, 263 bp, Glycine max
  unsure (1)..(263): unsure at all n locations; Clone ID: 701139989H1
ctgagacataccatagactatatggtgtttctccacaattcccatggngcctaagacacaaccccaagcgaatagtcctaccaccaaaaccttgggaacaagcaggttcctcttcgggtccagcgcctttcaaacccccgtcagctggcaacacaagtgatgtagttgaggcttcagggactgcaaaacctggggaaattgtttctagttctgataggagtgcagctgtcaacaggaatactcttgggaggcctgttcccaca

SEQ ID NO: 51450 - DNA, 253 bp, Glycine max
  unsure (1)..(253): unsure at all n locations; Clone ID: 701139991H1
aaacgtttggaccgaagtcttncgtctggnaagggaggttgatgaggcttctgagnaggtgaggccaatggtttcgatggtcatgcagatgggaaanaagttccggaagcagttactgtggatgctgaaatggttgattcaactgacanggccagtgccaaaacatttgatactgctgaaaagggcaagggtggttttgttgatccaattgaaacgggaaatgtggaaaagattcaggagattgtggatcatg

SEQ ID NO: 51451 - DNA, 263 bp, Glycine max
  Clone ID: 701139992H1
ctccaccaaccaccactaacaagacctatttcactgatatgctagccaaactttcttcgaccaggaatggtgtacccattggcacaccgactcctctgagctggctctttatctatccggagggaatttataagctcatgacatacataagggacaactacaataatccaccagtgtacattaccgaaaatggcgttgcggaatcaaagaatgactcacttgcaatcaatgaagcccgaaaggatggtattcgaattagatac

SEQ ID NO: 51452 - DNA, 265 bp, Glycine max
  unsure (1)..(265): unsure at all n locations; Clone ID: 701139993H1
aaaaaagcaatgtcacctccaccattttcccnccctctctctatttcccttctctttgtcttcctgttagcaccattactncttagctcaatctccacnnnnnnnnnnnnnnnnnnnnnnnnnnnnnnnnnnngttgcctgcaaaggcacactatatccaaaactctgccgttccattctctcagccattngttcatccccttcagacccttatggctatggcaagttctccataaaacaaagcctcnaacaggcaagaaaactt

SEQ ID NO: 51453 - DNA, 266 bp, Glycine max
  unsure (1)..(266): unsure at all n locations; Clone ID: 701139994H1
cacacacacactctccccgaggtttgagagggtactggcatccaaaaaatgggttctaaaactaatgcttcgggccatagagcacgaaggccgctgtcaatatttgctgtgcttggtctttgctgtttcttttatcttttgggagcatggcaaagaagtgnatctgggaagggagataaccttgcattgaaagttaataacctgatgactgactgcactgttttacccaatttgagttttgaatctcatcacaatgatgtngaaat

SEQ ID NO: 51454 - DNA, 267 bp, Glycine max
  unsure (1)..(267): unsure at all n locations; Clone ID: 701139995H1
ggtgttgttactgctgctcttttctcnnttcttttctctttagttctctcttcccctnnnnnnnnnnnnnnnnnnnnnnnnngagcttgtttaagcttttcttccattaacatattatcanaatgtgtggtattcttgctgttcttggttgttctgatgactctcgagccaaaagggtccgcgtgcttgagctctctcgcagattgaagcaccgtggccctgactggngtgggctccatcaacatggtgactgctttttggcacatc

SEQ ID NO: 51455 - DNA, 270 bp, Glycine max
  Clone ID: 701139996H1
cccctacacaaaacatggctttgcccaatcagcaaaccgtcgattaccccagcttcaagcttgtcatcgtcggcgacggtggcacaggaaagacaaccttcgtgaagaggcatctcactggtgaattcgagaagaaatatgaaccgaccattggtgtggaggttcatccgttggattttttcacgaactgtggaaagattcgcttctattgttgggatactgctgggcaagagaagtttggtggcctcagagatggatattatatccatg

SEQ ID NO: 51456 - DNA, 283 bp, Glycine max
  Clone ID: 701140001H1
ctgtgtttgcggctgaggattccgaacgagcgaccttcttcgtttctcgcaaagtttaagtcatcatgggtaaggaaaagactcacatcaacattgtcgtcattggacatgtcgactctgggaagtcaactaccactggtcatttgatctacaagcttggaggtattgacaagcgtgtgattgagaggttcgagaaggaggctgctgagatgaacaagaggtcattcaagtatgcctgggtgcttgacaagctcaaggctgagcgcgaaagaggaattaccat

SEQ ID NO: 51457 - DNA, 279 bp, Glycine max
  unsure (1)..(279): unsure at all n locations; Clone ID: 701140002H1
gaagccctttcccttgtttttagaagaaactggctacagcgaagaaaacgttctccttcgagaagccanagcaggagtaagtcttgtttganttttaggaaaaaatgataataattcaatatctgtactgtgttgactaagtcattgatagttattaacacacattctcttttgaggaaggatggaaggctgaaagcaacagaggatgttgtnttatttagactgataaaatatgggataaaaaattgatgatagatgcctctttttgcttcactttta

SEQ ID NO: 51458 - DNA, 275 bp, Glycine max
  unsure (1)..(275): unsure at all n locations; Clone ID: 701140004H1
anagatgtttcctttcgggcaaaaggntnaaaagataaaggggantatggtggttatgcagaagaatgtgttggnnatcaacagcatcaccagtnttggagggatcgttgaccaaggcttaggcttcataggcagtgcagtcnatgcacttacttntgcagccaccaaaatctccatccagttgattagtgctaccaaggctgatggtgggaaagganaattggaaagagtacaaatttaagagganagataacattaccaaccttgggagctgg

SEQ ID NO: 51459 - DNA, 275 bp, Glycine max
  Clone ID: 701140005H1
gccagttttccattttagaaatggagatagaacaagccactaccaatgaaaagggtgttaccgactatggtgatgctgaaatgatttcagataataataagagagggatgtatcttgtgtgggaagatttaactgttgtagttccaaattttgggaatgggcacacaagaagattgcttgatgggttgagtggatttgctgaacctaacagaatcatggctatcatgggtccttctggctctggaaaatctactcttcttgatgctctagcaggt

SEQ ID NO: 51460 - DNA, 275 bp, Glycine max
  unsure (1)..(275): unsure at all n locations; Clone ID: 701140006H1
ggcacccgaacatggagatacactgttaatgtgaatttcactgctgttattgattccactcgccttgcgatntgaaatcatggaagcttccaaaaggcctggtgtgattatcaacttgggttctgcttctggtctttatccaatggtggctgacccaatttacagtggntctaaaggtggtgttgttatgttttctagatcacttcgtctatacaaacgtcaaggaattcgagtcaatgtgctttgccctgagtttgttgaaactgagatgggaa

SEQ ID NO: 51461 - DNA, 275 bp, Glycine max
  Clone ID: 701140007H1
caaagagcgacagtacttttggacctagacctggacctgctgggcatccaggcaacccttttgatcctctcagcaatgtctggtctgctcaatgatccaagtatcaaggaattggctgaacagatagcaaaagatccatcgttcaatcagatggctgagcagcttcagaaaacttttcaaggagctccacaagatgctatccctagcttcgataatcaacaatatttttcaaccatgcaacaggttatgcagaatcctaattttatgaccatggc

SEQ ID NO: 51462 - DNA, 274 bp, Glycine max
  Clone ID: 701140008H1
ttctgacaagactttaatagcagttgcgaagaactgtccgaatctggctgagttatccatagagtcatgtcccaacattggtaatgaaggtctacaagctattgggaagtgtcccaatctgaggtcaatctcaatcaagaattgctccggggttggtgatcagggagttgctggcctcttgtcttcagcttcttttgctctaacaaaggtgaagcttgagtcactgactgtttctgatctctctctagcagtgattgggcattatggtgttgca

SEQ ID NO: 51463 - DNA, 276 bp, Glycine max
  Clone ID: 701140009H1
gttttgaagagctatgcatcaagaaagaagccattgagggagaagagaagttttgtgcaaaatccttgggaacagtaattggttttgccatttcaaagctgggaaagaacattcaagtactttcaagttcctttgtcaataagcaagaccaatacactgtggaaggagtgcagaatcttggagacaaagcagtgatgtgtcataggctaaatttcagaactgcagtattttactgccatgaagtccgtgaaacaacagctttcatggttccattgg

SEQ ID NO: 51464 - DNA, 264 bp, Glycine max
  unsure (1)..(264): unsure at all n locations; Clone ID: 701140010H1
ctnnngcngaatggggncnnntgcagtgagagatcaatgaaaatccttagtacagaaaggccatatgttgaggatccgttataaggtcagtcacaaagtaatacatgcataggcctaacttaacaagtccttattgtagaagataagaaagtaaaataaatcaaacttctctcataagttaaaatcaacttatgcatttcagctttttttagaaaaattctcttatctaacttcttcaaagattgaatgcataatctaatttta

SEQ ID NO: 51465 - DNA, 255 bp, Glycine max
  unsure (1)..(255): unsure at all n locations; Clone ID: 701140011H1
atcagcattcacataggtcaggaccgggatccaggttggacaactcctgctgggaactcanctgcctggaacatggcatccagcccgatggcatgatgccaagtgactcctccttcggtgtagcccacgacgccttcaacaccttcttcagcgaaaccggatccggcaagcacgtccctcgcgccgtcttcgtcgatctcgagcccaccgtcatcgacgaagtccgttgtggcacttaccgtcaactcttccacc

SEQ ID NO: 51466 - DNA, 275 bp, Glycine max
  unsure (1)..(275): unsure at all n locations; Clone ID: 701140012H1
gggcccctagaaaagtccatgcctagatttccaaggccatggaagatgaaaganggagtctcctactaccaaagaacatggaggagcaccacccagcacatgatcgtggaacacacgaaactatacaatccaagaagagggtgtgaatgtgtaagggcgttgttgtacatggtggcacagtgtgccggtgctatctgtggtactggattggccaaggggttccaaaaagcatactacaacaggtatggaggtggtgccaatctgttgctgatggc

SEQ ID NO: 51467 - DNA, 276 bp, Glycine max
  unsure (1)..(276): unsure at all n locations; Clone ID: 701140013H1
ctcctcctcaattgcaaggtggagcaaaatgtgatgcagaagtntcaggttctgatgatccagcagctggactaaagtatcctacaagcggtgccgaatgggtagagctttttgttattgaaatgatgaatgcttcaaacatggatgatgccaaatctcgagcttcaagaatgctagaggcattggagaagtccatttgcgcaagagcaagtgttgaaaccgagcgaaacattcaccaggaaaatatgatgctgaaggaacaagtggaggccctta

SEQ ID NO: 51468 - DNA, 277 bp, Glycine max
  Clone ID: 701140014H1
gcgcactagagttcgcaacgaggctcaaaaggctaggaatgagggtaatatacccgggcctggaggagcacccacagcaccagcttctgaaatcaatgcacaacaaggactatggctacggcgggctcatgtgcgtggacatggaaacggaggagagggccaaccgcttcatgagccacttgcagaactacggccagttcggcttcatggctgtgagcttgggctactacgagaccctcatgtcctgctccggcagcagcaccagcagtgaactcag

SEQ ID NO: 51469 - DNA, 268 bp, Glycine max
  Clone ID: 701140016H1
ctctccacccaaaccctaactcccgaccctgttcccctctcgtatccgtcatgaaaggaggaaagtccaagaccgaatctaagagagccgatcccaaacttgctgtgaataagaagggagccgccaccaaggctaggaaacccgccggcaaggggaaggcagcgaaagaccctaacaagccaaagaggctccaagtgctttcttcgttttcatggaggagttcaggaaggtattcaacaagaacatcctgaaaacaagcagtgtctgt

SEQ ID NO: 51470 - DNA, 276 bp, Glycine max
  Clone ID: 701140018H1
gaataatagatagaatatgaaagaatttggtggacctgcggggctaatcaagccatcaagggcactcttcatgacgacagtccgtgagtatttttgccatgggcgacctagaaaggttctgaaagagccctgcactgctttcaagtccccagctgcagttatacgacagttatggatgatgatccctgtgttctcattaggatcggttcttccttgtgccgttaccgtgttctgctggttgctcatcggtttcctcacatagatgttgcagttttg

SEQ ID NO: 51471 - DNA, 275 bp, Glycine max
  unsure (1)..(275): unsure at all n locations; Clone ID: 701140019H1
tttccccccacattaactcanccaacccctctttctaaaaggcctcaaggatacactccggacttaattacgttattttgttagggtcaccgtttcgagatattctaaacttgtactgaaaaatatggagggaaaagaagaggacgtaaganttggagccaacaggtacggagagaggcagccaatagggaccgctgctcaggctaaagactacagagagccaccgtcggcgcctctcttcgaaccgggagagttgtcatcgtggtctttctata

SEQ ID NO: 51472 - DNA, 274 bp, Glycine max
  unsure (1)..(274): unsure at all n locations; Clone ID: 701140020H1
caaagattaagccatgcatgtgtaagtatgaactaattcagactgtgaaactgcgaatggctcattaaatcagttatagtttgtttgatggtatctnctactcggataaccgtagtaattctagagctaatacgtgcaacaaaccccgacttctggaagggatgcatttattagataaaaggtcaacacaggctctgcctgttgctttgatgattcatgataactcgtcggatcgcacggcctttgtgccggcgacgcatcattcaaatttctg

SEQ ID NO: 51473 - DNA, 169 bp, Glycine max
  unsure (1)..(169): unsure at all n locations; Clone ID: 701140021H1
gtttaagtgggttggattcggaaacttatcaagactcaatgagtttaagngagttggattccgaaaaagtttaagccgttgggttgagatgctgagtttctatgttaagattcanttgtatttttatgttgtatgtgttggtttcaatccaaaaggaattactcttttc

SEQ ID NO: 51474 - DNA, 273 bp, Glycine max
  unsure (1)..(273): unsure at all n locations; Clone ID: 701140022H1
gcagttcagtatcacatcacaattccttcatatcttctctcgtaccatcttcattatcattaccctcttcactttcacaatccagccagttntgtgatgcgggaactgaaattccatcatccaagctgttgatcaagggtggcacggttgtgaatgctcagcaccaccagattgctgatgtttacgtggaagatggcatcattgttgcagttaatcctaacatcatggttggtgatgacgtcactgtcattgatgccaccggcaaatatgtca

SEQ ID NO: 51475 - DNA, 276 bp, Glycine max
  unsure (1)..(276): unsure at all n locations; Clone ID: 701140024H1
agctgtgncatcgccaagtttngccgcatcaacatcctcttagacaatttgancaaggacctttctgcagaagttcactcttaactaatgttttttcactgtattccctagctatatttcagactggtgtgtgnnagtctttttttgttcatagatattgcngaancttgangaacgtggggctgacctagaccgcttgtatgagatggaggaaaannacattggggcattaattcgttatgcgcctggaggaaggttggtcaagcaacacctagg

SEQ ID NO: 51476 - DNA, 272 bp, Glycine max
  unsure (1)..(272): unsure at all n locations; Clone ID: 701140025H1
agatgtgtggaggagctatcatctctgatttcattccggcngcggcgatcgccgggtctcgccgcctgaccgccgattacctgtggncatgatttgancaagcggaagtctgacttggacgttgacttcgaggctgatttcagggattttaaagacgattctgatatnnnnnnnnnnnnnnnnnnnnnnnnnntcaagccctttgctttcgccgcctcttctcgtctgtctacggcagcgaaatctgtggcattccaaggtcgggctgagat

SEQ ID NO: 51477 - DNA, 273 bp, Glycine max
  unsure (1)..(273): unsure at all n locations; Clone ID: 701140026H1
caaagatgtttcctttcggggcaaaagggtcaaaagataaaggggactatggtggttatgcagaagaatgtgttggatatcaacagcatcaccagtgttggagggatcgttgaccaangcttaggcttcataggcagtgcagtcgatgcacttacttttgcagccaccaaaatctccatccagttgattagtgctaccaaggctgagcggtgggaaaggaaaaattggaaagagtacaaatttaagaggaaagataacattaccaaccttggg

SEQ ID NO: 51478 - DNA, 272 bp, Glycine max
  Clone ID: 701140027H1
accaggctctggctcggaaccttcgacacggcggaggaagctgctttggcttacgacaaagccgcgtataggctccgaggcgacttcgcgaggctgaacttcccgagcctgaaaggctcgtgccccggggaggagtacaagcctgtgcattccgcggtggacgctaagctcgacgcgatttgcgccaacttggcggaaatgcagaagcaagggaagacggagaaaggtgccaggtcagcgaagaaatcgaagcaaggtccgaaccaggaggc

SEQ ID NO: 51479 - DNA, 272 bp, Glycine max
  Clone ID: 701140028H1
gccactctcaaacctcattgcttcactaccaatccacccatccaaaacttgcttcgtccatcgcttgatgcgaatcatgatccattctggcttcttctctcaacaaaagcatgacttggagaatgagctagaagccaagtatgtgctaaccgatgcatctgtactattgcttaagaaccatccgatgagtgtgacacctttctgcatgccatgcttgatccagttttgacaaatccatggaatcaattttctacttggttcaaaaatggtga

SEQ ID NO: 51480 - DNA, 127 bp, Glycine max
  unsure (1)..(127): unsure at all n locations; Clone ID: 701140029H1
gcatatatcatggctacctccatggtgaagcttatgctnttctctgntcttcatactcttgtccttgcaagcagttgnngtctgtaanacnactggcnttttcaancatcnaactagagncncgtag

SEQ ID NO: 51481 - DNA, 280 bp, Glycine max
  unsure (1)..(280): unsure at all n locations; Clone ID: 701140030H1
gaagctccnccgtatataatcaangctaacgacactcgtgcctaaccattnaaacacacactctctgctcaccaaattcttattagaacgaaaaaagaaaaganaagacaaaagagcgatttttccctcaccaaagaagaaccaaaacaatggcggatcaactcaccgatgaacagatctccgagttncaaggaagccttcagcttgttcnataaggacggcgatggttgcatcacaaccaaggagcttgggaactgttatgcgttcattggggcaaaac

SEQ ID NO: 51482 - DNA, 275 bp, Glycine max
  unsure (1)..(275): unsure at all n locations; Clone ID: 701140031H1
taaggcttggactgcctggaaacggaggcactgaagaagtgctcatcaggaagaggggtttctctgagactgaaactggtcatgaagatgagtctgccaccactgtggatttgatgcttaatctttcttctaaggagnnnnnnnnnnnnnnnnnnnnnnnnnnnnnnnnnnnngataagcacaagactttgcctaaggagaagacccttctgccagcagatcctgctaagcctccagccaagacgcagtggtgggttggccacctgtgcggtcct

SEQ ID NO: 51483 - DNA, 279 bp, Glycine max
  Clone ID: 701140033H1
cttgggaagaggctctccctacactacaggaagatttgtgatgggtggaagttctattggtgatgactgggagctcacttcctcatctaacgagggtcggacagtggtcttagttggacgaactggcaatggcaagagtgcaacaggtaataccattcttggaaggaaggtcttcaagtcaagggctagctcctctgctgtatccacctcatgtgaattgcagacaacagaattaaacgacggacaaattgttaatgttattgacaccccaggattatt

SEQ ID NO: 51484 - DNA, 275 bp, Glycine max
  Clone ID: 701140034H1
gaaaatggcggtacccttgctctccaagaggatcgtgaagaagcgcgtcaagaagtttatacgcccccagagtgatcgcaagatctccgtcaagccaagctggcgcagacccaagggtattgattctcgtgtcaggagaaagttcaaaggatgcactttgatgcccaacattggttatggctcagacaagaaaacccgccattatctaccaaatggtttcaagaaatttgtcgtgcacaatgtgaaagacctggaattctcatgatgcataacag

SEQ ID NO: 51485 - DNA, 264 bp, Glycine max
  unsure (1)..(264): unsure at all n locations; Clone ID: 701140035H1
acctcaacgcgtgcgtgcgttctcatagattttcnctttggtcgacnaatctggctcggacattgcagtttaaggaaacctggcatgggagttattactgtttctacctcagctgctaggactccattaagattgaatacaaggttgatcagtcatcagcaggtgcataaacgacccataattttagcttttaaaggaaataaatcgaataaaaccactttggtttcacctcaggagaaaattcctctacccctagaaacagcg

SEQ ID NO: 51486 - DNA, 276 bp, Glycine max
  unsure (1)..(276): unsure at all n locations; Clone ID: 701140036H1
cttttcaatccagttacattttctttggtattccaatggccactgttgaggttgtgtcagcaaaggtttccctcccagaggacacaanagaggcatcattgaaggctgatgagaagaagaacacagaagaagttgttgagactccaacaccaacaccaganaatgtcgtccactgagcaaacaaaggaggaaagtactgaggccccacaacctgcagctgccagaagacaagccctcggttgaagttgtgtctggaactgtcacagaagagccaac

SEQ ID NO: 51487 - DNA, 272 bp, Glycine max
  unsure (1)..(272): unsure at all n locations; Clone ID: 701140037H1
ctctctcaccctcatatccatcatcttccacacccatggagcgtnctctgagcaatcaataatcaagttacccacagaccaaccaagggtagagaaactgacccacttgcattttttctaccacgacatcttagagggcaagaacatcacggtggtgaaaatcatcgagccatcagcgagcgaggttcgtgaagcaactgggtttggaaccactttcatgatggacaatgttttgaccgagggtccagagctgagctcgaagcacgttggga

SEQ ID NO: 51488 - DNA, 276 bp, Glycine max
  unsure (1)..(276): unsure at all n locations; Clone ID: 701140038H1
ttgggtcctcttccacctcgccttcttctcccaatgccttccctccgcctgggncccacttcggcgatcctccctcccgggtcaacttcgcccgtgactcaccgcagagctgccccgcccctgaccccaacctctactacaagccagtcatcggaatcgtcagccatcccggcgacggcgcctccggccgcctcagcaacgccaccggcgcctcctacatcgccgcctcctatgtcaaattcgttgaggccgccggcgcccgtgtcgttcccctca

SEQ ID NO: 51489 - DNA, 270 bp, Glycine max
  unsure (1)..(270): unsure at all n locations; Clone ID: 701140039H1
tttctctcttttctctctctcttttttttttctctctctctgtgcaaaactatgcttgatattaatgaataatgttgattcttatctgccagtttgctactactacttgggacaattttgatatgtaaagctgggtttgcttctattaattatttttnattattattaataatttcatttttccatagccgcctaatgtgattctcgcgttctttcttcagcagctcctcctagctgcttcttcttttgcacaccccagattccgagaaa

SEQ ID NO: 51490 - DNA, 271 bp, Glycine max
  Clone ID: 701140040H1
gggggccccggaaagagttatcttttctgtttaacagcctgcccaccctggaaacggctctgctaatataggttcgtttgaagaacacactactggttttggttcaaaaatgatggctaaaatgggatacacggaaggagcaggattggggaaaaatggtcaaggtatggcacagcctattgaggttattcaaaggcctaaatcacttggtttaggtgtagaattctacaacaattcagctgagccagctaggaacaaatcttcaagagtt

SEQ ID NO: 51491 - DNA, 125 bp, Glycine max
  Clone ID: 701140041H1
ctgaccatacttaaggttgtgagtgctatgttgttttaatcataactacaacaaaagtgtctcgcaaagccagttatcagatgtcaaattttaagtctttgcctgactgacttagaccaggcttt

SEQ ID NO: 51492 - DNA, 273 bp, Glycine max
  unsure (1)..(273): unsure at all n locations; Clone ID: 701140044H1
ggcgtcacgatgcagatcttcgtgaaanccctaaacgggtaaaacgatcacgttggaggtggagtcttcggacaccatcgacaacgtgaaggccaagatccaggacaaggaaggcatccctccggaccagcagcgcctcatcttcgccgggaagcagctggaggacggccgcaccctcgccgactacaacatccagaaggagtccacgcttcacctcgtcctccgcctccgtggcggcgccaagaagcgcaagaagaagacctacaccaagcc

SEQ ID NO: 51493 - DNA, 274 bp, Glycine max
  unsure (1)..(274): unsure at all n locations; Clone ID: 701140045H1
ggaaancntcaattcantcctcnttgcttntatntaatattanccgaacaccagtgatggnnangtntggctccagaaggatcgcantttgatgctcggcaatatgcactctaagatgaanngaattgntttccgcngatgganaagaatttttcacttcanatgatgaagtcnatgatagttttgatgcaatgggccttnaagaaaatcntntcagaggcatatatgcttatggttttgagaggcctctgcaatacancaaaggggattgttc

SEQ ID NO: 51494 - DNA, 273 bp, Glycine max
  unsure (1)..(273): unsure at all n locations; Clone ID: 701140048H1
tttggnttaaatgctcttgctggaaaatctatgaagtctggttctgctgttggaccttggaactacaccaatgctgaatcgttaatacgatacacagtcagaaagaagtacaccattcatggttgggaacttggcaatgaattgtgtggaagtggaattggagcaagtgttgcagcagatcaatatgcttctgatgttgctgctttaagaaacatagttgaaatgcatatagagggattgaacctaagccactagtcattgcacctggaggct

SEQ ID NO: 51495 - DNA, 272 bp, Glycine max
  Clone ID: 701140050H1
gccttaccttaccctcgcagaggaagaaccggaagaggaaaaactagaaaagatcccaacagtgagaagccgagcgattttgtttaccttccaagagatgaagcatttggtcacttgaagtcatcagattttctcgcttatggaatcaaatctgtatcccaagatgtcttgcctgtcttgactgatgcattcgatggaaatattttgagccttgagtttgataattttgctgaagtgcacaaactctatgaaggtggagttacactacctac

SEQ ID NO: 51496 - DNA, 271 bp, Glycine max
  unsure (1)..(271): unsure at all n locations; Clone ID: 701140053H1
gnaggcgtcttcataaacgcctttcttctccgtttccgtttcctcgttcgaattcgctttttgatctgcgancaatgagagagtgcatntcgatccacattggtcaggctggccatccaggtcggaaatgcttgctgggagctctactgcctcgagcacggcanccgggcccgatgggcaaatgccaagtgacaagacagttggcggtggtgatgatgctttcaatactttcttcagcgagactggtgctggaaagcacgtgccagtgcag

SEQ ID NO: 51497 - DNA, 269 bp, Glycine max
  unsure (1)..(269): unsure at all n locations; Clone ID: 701140054H1
tctgtgcttccaaaaccctaactaaactcgcgtggtagctccaatggggggaaagaggaggaagagcnnnnnnnnnnnnnnnnnnnnnnnngaggcttcagcttcaggttggaagaagnaaacgagaacgacggagaaggaggagaaggagaagaaggagccattgcgtccttcgatgataaagaacaaggagaagcgatcggagctgcacgccaagctgaagcagcagaagaagctcgacaagcgcgccaaggccaaggctcgagacg

SEQ ID NO: 51498 - DNA, 269 bp, Glycine max
  Clone ID: 701140055H1
cttctttcttcaccatgtcacttgctgggaaaatcaccactgaaattggggttcatgcaaccgctgcaaagtggttcaacctctttgcaacacaacttcatcatgttcaaaaccttactgatagagtacatggaaccaagctgcatcaaggtgaagactggcatcacaacgagacagtcaaacactggacttataccatagatggtaaggctacaacatgtctggagagtattgaatccattgatgaacagaacaaaacaatcacctac

SEQ ID NO: 51499 - DNA, 269 bp, Glycine max
  unsure (1)..(269): unsure at all n locations; Clone ID: 701140056H1
gtcgatatgaagtttattggggatgatganaaattccttgctcttgctaacaaatcttgaacagattcgggtttatgaccttcatctatgtcctgttcgtatgtcttatctggtcacactgaaattgttctatgccttgactcctgtgtatcaagttctgggaaaccactgattgttactggaagtaaagacaacagtgttaggttatgggaaccagaaagtgcaaactgcattggagttggtataggtcacatgggagctgttggagc

SEQ ID NO: 51500 - DNA, 272 bp, Glycine max
  unsure (1)..(272): unsure at all n locations; Clone ID: 701140057H1
ggccctcattgggatatgcgacagttgagtcgggacggacggatgaggaacccggatgaaaagccaatcctggaagaaccaaaacctgctgaagctgaagcattaccaaaaactttcacaaaacagccaaagtcaggagcctaagccttctccacaagaaactttgtcctgctcagaaagaatccaaaaacaaggggngggatttgaaatccaaaccggagagtaaggatgtagcagaaactgatgaatatgaatttaaaaatccccaaaag

SEQ ID NO: 51501 - DNA, 116 bp, Glycine max
  unsure (1)..(116): unsure at all n locations; Clone ID: 701140058H1
gnaagatcnccagaaagagaattcatctttctttgcgaacagctaaaaacctcaaagggaaagaaggcatgaatagaggtgttcttcagagctcaccagtgcaacaaatgatgact

SEQ ID NO: 51502 - DNA, 271 bp, Glycine max
  unsure (1)..(271): unsure at all n locations; Clone ID: 701140059H1
ctttgaangcagggtgtttgcttgattttggagatgtcgctgctctcagatctcatnaancttaacgtacgcagacactacnngagaaggtgatcgcagagtacatatggatcggtgnatcaggaatggacctgaggagcaaagcaaggactntcccaggaccagttantgacccttcaaagcttcccaagtggaactatgatggttccagcacaggccaagctncctggagaagancgtgaagtgattatatacccacaagccatttcag

SEQ ID NO: 51503 - DNA, 270 bp, Glycine max
  unsure (1)..(270): unsure at all n locations; Clone ID: 701140060H1
gctaactctctctcactctcgcgctctctctttcacaaccttcactttatctctctctgacagctaaaatgcaaggaggatttcaatcatttttgtcacacgggaatgtcattagaaatgctgttctacaacgggtgcgcatggtgaaccccctgttacagccaattgtctcttcgcggtttgaatctgttacacctgctcgcattgaggagcatggttttnagagcaccacaatttcagacatcttgaatgataaaggcaagggtgctg

SEQ ID NO: 51504 - DNA, 273 bp, Glycine max
  Clone ID: 701140061H1
caaagcaaagctcatccttgagttaaaaaatggcagcagctttcttccatgggctctctcatccccatccttggctggcaagggccgtgaagctgggcccatcagccccagaagtgggaagggtgagcatgaggaagaccgtcaccaagcaggtctcctcaggaagcccatggtacggcccagaccgagtcaagtacttgggcccattctctggcgagcccccgtcctactaaaccggtgagttcccaggcgactacggctgggacatgctgg

SEQ ID NO: 51505 - DNA, 271 bp, Glycine max
  Clone ID: 701140062H1
ccccgccaccgggtctgccgaaggttacaccatttatggtcgagtgaagatccccagtgtgggaacaaaagattatattcttcctggaaaaatttcaaatgtcaaagtcatactcaatggtggtcaaagagttacttttctgaggcctgatggatatttcgcattccacaatgttcctgccgggacacatctaattgaagtggctgcaataggctatttcttttctccggtacgagttgatgtaagtgccagacaccatggcaaaattcag

SEQ ID NO: 51506 - DNA, 270 bp, Glycine max
  unsure (1)..(270): unsure at all n locations; Clone ID: 701140063H1
aggaatcccaatggctttggggctcttggcgatgatcctcttcttcattgcttccttcttcctctcacctcgttcgcncttccgatgacgccgacgacgcgatcttctacgagtcgttcgacgaggattttgatggacggtggattgtatccgacaaggaggattacaatggtgtctggaagcatgccaagagtgatgggcatgatgattatggacttcttgttagtgaacaagccaggaaatatgctatagtcaagaacttgccgagtc

SEQ ID NO: 51507 - DNA, 265 bp, Glycine max
  unsure (1)..(265): unsure at all n locations; Clone ID: 701140065H1
ctctgctatcccncatattcctgtgtttcctttgaaaaaaaaagaagaagaaanaacatgtctaggttttttggattcttctttgtgggtcttacgttgatgttggtcggtgtggcaaatgctatggctaactcttccaacaaatttgatcaactcttccaaccaagttgggcttttgaccactttattcatgaaagggatcttctcaaactcaaacttgacaaattttccggggctggttttacttccaagagcaagtatatgt

SEQ ID NO: 51508 - DNA, 268 bp, Glycine max
  unsure (1)..(268): unsure at all n locations; Clone ID: 701140066H1
gggagtgatcaaccaagggaggaaggaaaatataccggatatgaaggttgtagagttggccatgcagagatggtctgggcagcatagccgtccatttctttttgggattttgagtgatggaactattctttgttaccatgcttacctttatganagtccagatagtcacttctaaagttgaggattcagcatcagccggaggatccatggccttagcagtaccaatgtttccaggcttagaaatttgagatttgttcgtgtgccttgg

SEQ ID NO: 51509 - DNA, 268 bp, Glycine max
  Clone ID: 701140067H1
agcagatcaatctctctctctgtctcccaatcaaaacagacatgggtttgaaggaggattttgagcagtatgctgagaaagcaaagactttgccaccgactcaatcaaacgaagacttgcttatcctttatggattgtacaagcaggccaccgttggacctgtcaacaccagccgtccgggaatgttcaacatgagggacagagctaaatgggatgcatggaaggctgttgaagggaaatccaaggacgaagcaatgagtgattacat

SEQ ID NO: 51510 - DNA, 269 bp, Glycine max
  unsure (1)..(269): unsure at all n locations; Clone ID: 701140069H1
gnagattgtgagttcacttatttgtccacncancntaaaaaannaaaanggaatcgaaggaccanaaacatcagacccgagcaaatatnttcgttacatttntaatagagtacatcttgagaatgcaattgttagggcccagtgctgtgagcacactggcaaaatttggtgctgctgttgatgtgttaaagccccgcatatttgttctgctaaggcgatgtctttttgacagtgatgatgaggtccgtgatagggctacactttacctg

SEQ ID NO: 51511 - DNA, 265 bp, Glycine max
  Clone ID: 701140070H1
ggcttttaaaacagtacctgataatcctttgcattaaccagatggcatcttcgctatttcgattgatggcagcatttggaagggatgttatagttgcaaacactgctggaagttttgcattacttatagttctggttttgggaggatttgtgatttcccgagagaatgtgcacaaatggtttctgtggggttactggtcctcaccactgatgtatggacagaatgctatagctgtgaatgaatttcttggtcatagttggagaaa

SEQ ID NO: 51512 - DNA, 257 bp, Glycine max
  unsure (1)..(257): unsure at all n locations; Clone ID: 701140071H1
agggactatgcaaganaagtggtggaaaataaagcaagagatgaagctggaaagattctgatacgcatgaaagataggtnctctactgttttcaatcatgataatgattcactacctagagtttggactgggaaggaagatgtcagagctattacaagggatgctcgctctgcgtcgctgaagcttctatcagatatggctgctatacgcttggatgagaagccagatcgcattgaaagtgcactttattcatctct

SEQ ID NO: 51513 - DNA, 267 bp, Glycine max
  Clone ID: 701140072H1
ggagctatagccataaggagaaaaactttcaaagaagtgaaagcaaaaaagagttgttcttttcctttctgctgataagctgtgtgagtgagttcattgacaagcctgaaatgacaactatgctgacaaatgagcatggtctgagtttgaacctcaaggagactgagctttgcctcggtttgcctggcgggggctctgaagtggaaactccaagggccactgggaagagagggttctctgagaccgttgatctgaagcttaatcttc

SEQ ID NO: 51514 - DNA, 80 bp, Glycine max
  unsure (1)..(80): unsure at all n locations; Clone ID: 701140073H1
tttattcaaaccaagnggaacangcnaatgaccatngtaatttgaaccctcctggaaccatcatccacacancanacgnt

SEQ ID NO: 51515 - DNA, 266 bp, Glycine max
  unsure (1)..(266): unsure at all n locations; Clone ID: 701140075H1
tctatctctagaactagaatggctgaccatgatgcnaaagaagnacaaaggcccctncaancaatggagnannagcaaagggggattcanggcttccatgttcatttttgtcttntcagcattggacaacatgggntttgtggcaaacatggtaagcatagtcctatactttnatggagtgangcactttgatctagccagttcagccaacacactcacaaacttcatgggctcaacctacttgctttcccttgttggtggcncca

SEQ ID NO: 51516 - DNA, 76 bp, Glycine max
  unsure (1)..(76): unsure at all n locations; Clone ID: 701140076H1
ggcncagtcatctctngtaccattctcngcncgcttgctcttgcaggagagagtcatgttcatgcancgctatncg

SEQ ID NO: 51517 - DNA, 268 bp, Glycine max
  unsure (1)..(268): unsure at all n locations; Clone ID: 701140078H1
cagaactgatgttattggcagtagaaggaggaggattcttctctgcttcggcttcagggtatactaagggcctgagccttctcctcttgggtcagaggaatgaggataaacccatgagagtagcgccgtggaaccagtatcagttggtagaccaagaatctgaccctgagctccagctggcttccacaaagaatcgcntccacgcggctgtgcctcctttgtttgctttggtcgcacttccgcaggacttgatactccgtctcctctt

SEQ ID NO: 51518 - DNA, 270 bp, Glycine max
  unsure (1)..(270): unsure at all n locations; Clone ID: 701140079H1
ctcgagccccaaccggttcgggttctatactgcggggtgtgcagcttgccccccgaatactncgaattcggatccgatttcgagaaatgcaaaccctggttgatccaaaacgtccctgacctataccctgatcttctcaaagaggcaaatgagaaggaagctgataaagttgctgacaaactacaaagtaccggtatatcaggagctggcgatggagctgcttcctcagcaccgaagcaagaagaggtgaagcgtcttcctggtgggaag

SEQ ID NO: 51519 - DNA, 270 bp, Glycine max
  Clone ID: 701140080H1
atcctggatttggatctggggcaaatagttggctcattcaattggagggaggaggatggtgtaataccatcagtagttgtgtctttagaaaaactactcgtcgtggttcctcaaaatacatggaaaagcaactagcattcacagggttgttgagcaataaagctgaagaaaaccctgatttctttaactggaacagagttaaagtacggtactgtgatggagcatctttcagtggagatagtcaaaacgaggttgcacagcttcatttcg

SEQ ID NO: 51520 - DNA, 248 bp, Glycine max
  unsure (1)..(248): unsure at all n locations; Clone ID: 701140082H1
gttgagttgaggctaatcaatgctactatagagcgcaatcancagtccctctttcttctcttacgccatcgttttctttgaaacgcacagcttcaatcaccgaccacaccacccatcaacgacatgcttcctctttcccttctcaagactgcccaaggccaccctatgttggtggaactgaaaaatggggagacatataacgggcatttggttaattgcgacacatggatgaacatccatctgcgaga

SEQ ID NO: 51521 - DNA, 270 bp, Glycine max
  unsure (1)..(270): unsure at all n locations; Clone ID: 701140083H1
gggaattctaattatggtgacatggatcctcgtagactttctggtcttcctcgaggtagcttaagtgcaaaggntggtcagtctncccagaaatgaaggatctatttgctctcaaatgcagtcagattcacctagcnatgaagatggctcagtcacaacaatcattatctcattctcnacagcaggagcaantacagcagcagagtaacatcnaaaagaaaatctggagctgccaatagcactggtactggtaacactgctgctccgtcc

SEQ ID NO: 51522 - DNA, 266 bp, Glycine max
  unsure (1)..(266): unsure at all n locations; Clone ID: 701140084H1
ggggaacaaccacaacaacaaatttnnnaattagccactatgantaagnnttggaataaatgaagcacatgnctaggcaagagtacgttgcgtcattgagaaggaagagtantgggttttctcgcggtgcatccatttatcgaggagtgacgagacaccnccaacatggaaggtngcaagcgaggattggaagagttgctggcaacaaggatctttacttgggaacttttagcacccaagaagaggcagcggaagcatatgatgta

SEQ ID NO: 51523 - DNA, 265 bp, Glycine max
  unsure (1)..(265): unsure at all n locations; Clone ID: 701140085H1
ggaggatgccaactttgagactgctaagtttgatgctactcatgtaaganagaatatagggctttggnagggagatgcggatggcctaaaaccgtgttgggttaagncatctgctgatgatgtggaacagacccaaggatttgttacttttgcgttgaccaatggcccagagtaccatatttctcagtgattgttgctagaagtctgggggcaacacttgtcatacctgacatcagaggaagccaacctggtgacaagtggaatt

SEQ ID NO: 51524 - DNA, 256 bp, Glycine max
  Clone ID: 701140086H1
tgcaaattgtgcagatggttgtattcttagttttgttaatggctacctttgtacactactgctctttgtttatttaattctgatacacttcagactttttagatagaaaatggtttatgcgtcttttttggtttcacttcctctgtttttgtagaacgtgtatttttacaccttgcctagccgattcttcctttaaacacctctctttagtatgggatgaatgtattcaatttcctcttccatggcaacctctgtc

SEQ ID NO: 51525 - DNA, 62 bp, Glycine max
  unsure (1)..(62): unsure at all n locations; Clone ID: 701140087H1
aaaccctgcaaactttaatgtggnncaacgttcgtgttgcanagctcttggnncngggttng

SEQ ID NO: 51526 - DNA, 267 bp, Glycine max
  unsure (1)..(267): unsure at all n locations; Clone ID: 701140088H1
gaagaaatggaggaagcaaagggagttgtgaagcacgttttccttgcaaagttcaaggacgacgtcactccagagcggattgaggagctcatcaaggactatgccaatcttgtcaatctcatcccacccatgaagtcattccattggggcaaggatgtaagtgctgaaancatgcatcaaggcttcactcatgtgtttgaatcaacctttgagagtacagaaggcattgcagagtatacagctcatcctgcccatgttgaatatgca

SEQ ID NO: 51527 - DNA, 244 bp, Glycine max
  unsure (1)..(244): unsure at all n locations; Clone ID: 701140089H1
ctcctaccttcttcctctatccccacnacttaactttgctacacaaacaggcaacaaggctcaaggaactagtattgtttctatcatgggagtttgtttgagcacccnaattaaagctgggttaaattcaaagcatgttagtgccgatgcaaaagatcacagcagtccaattagcaataaaattacaaaagatgtcagcacaccaatcagtaaagtctcagaggtatcagtgcctcagactcct

SEQ ID NO: 51528 - DNA, 232 bp, Glycine max
  unsure (1)..(232): unsure at all n locations; Clone ID: 701140090H1
aggatagctaatactgtcttataaactagncnnaataanacgttacaaaagattatttgtcaacagaaaaaaataaaaaaagcaatgctataaagataaaagaaaaacactcttgtaaggtaagtttattttaaaataagtaagaacttttattttatcataaattntggtgaatttaagtcatggtatacgttaaactaatttgaaatttacaattttttatttatttact

SEQ ID NO: 51529 - DNA, 266 bp, Glycine max
  unsure (1)..(266): unsure at all n locations; Clone ID: 701140091H1
ctcttcttggtttggttgctggaatactatggaatctaatccaacaaccatggacgcaaaacgcgaactcgaagtggaagactgggaactgctccacccaaacgacgacgtcatcaatcgtgttcggtgggcccccactcgactctatcctccccgatcacttctcccttaatcccaattccagttgcagttccaattccaattccaattcctcctccgaggtcgatcgcaacttcgacgattcctatgttgccaatcnnatattc

SEQ ID NO: 51530 - DNA, 256 bp, Glycine max
  unsure (1)..(256): unsure at all n locations; Clone ID: 701140092H1
cttgaactcaaacatggcagatgaggtggttctgctagatttctggccaagtccatntgggatgagggtcaggattgcacttgctgaaaagggtatcaaatatgagtacaaagaagaggacttgaggaacaagagtcctcttctcctccaaatgaacccggttcacaagaagattccggttctcatccacaatggcaaacccatttgtgaatccctcattgctgttcagtacattgaggaggtttggaatgacaga

SEQ ID NO: 51531 - DNA, 264 bp, Glycine max
  unsure (1)..(264): unsure at all n locations; Clone ID: 701140093H1
accatcctatcagctaaanacgttgaatcatttttacaagctgtaggagacattccagtgctagtcattgcaggtgctggaggttcccttgtctctttggaatcctgtcaagctatggcctcaaaacttctcaattctgtaagtatgcttttaccatcttgtcatgaattgtatgcaaaacttataaatgctgttagtgtgtattaaaggatgaaaatcggaagtggaaaatggatagggagaaaatgaaagctgttagatgtg

SEQ ID NO: 51532 - DNA, 265 bp, Glycine max
  unsure (1)..(265): unsure at all n locations; Clone ID: 701140094H1
gaaaaacttagagtggtagttgtaggaaagcaagaacagtgaagtgttctcctaattcagtgagtgaggttctgaattcttcaacttgagatgatggcatcatttgcagggactactcagaagtgcaaagcatgtgagaagactgtgtatttggtggatcagctcactgctgacaacaagatctatcacaaatcatgtttcagatgctaccactgcaagggtaccttaagttgagtaactattgttcctngagggtgtgttatac

SEQ ID NO: 51533 - DNA, 268 bp, Glycine max
  Clone ID: 701140095H1
ggcgtcgagtataggcatgatggacagtgcctactttgtcggcaggaaccagattctgacctggatcaacaacaggctccacctcaatctctcacgcattgaggaggctgcatctggggctgtgcaatgccagatgatggatatgacgtttccaggggttgttccaatgcacaaggtgaactttgatgcaaagactgagtatgatatgatccagaattacaaaattctgcaggacgtgttcataagctgaaaattgacaaacatgttg

SEQ ID NO: 51534 - DNA, 268 bp, Glycine max
  unsure (1)..(268): unsure at all n locations; Clone ID: 701140096H1
cttgttctcaagggattcgattttctctgcactcacttctagggtntcctccgcgctatcagcaatcatgggccgacgaaacaccaaatgagatgaaggaggaggttccagaaattgttccttttgatcctaaccnnnnnnnnnnnnnnnnnnnnnnttacaattgtagatcctgctgatganccctgtggagaaattggctgagaagacagaaaacctctcagttctgaggggttgagactgcattgctggttgaaaagaagagaag

SEQ ID NO: 51535 - DNA, 266 bp, Glycine max
  Clone ID: 701140101H1
ctctgagttcaaagccggagctagcgtttacgattattatgcaaccactccaagggactttgttgatcatgcagattttgaagatctacatgtaaagaagctttacatgaggcttcaagcacttgaggctgatagggaatcaatgaggcaggcaatcatttcaatgcgcactgataaagcacagcttgttttgttgaaggaaatagctcaagaattgtgcaaagagatgtcacagcagaaaaaaatgacagcgagatcctttatta

SEQ ID NO: 51536 - DNA, 252 bp, Glycine max
  unsure (1)..(252): unsure at all n locations; Clone ID: 701140102H1
caggatgtgtcgctgggagcgaacaagttcccggaganacagccgattgggacggcggcgcagagccaagacgacggcaaggactaccaggagccggcgccggcgccactggttgacccgacggagtttacgtcatggtccttttacagagcagggatagcagagtttgtggccacttttctgtttctatacatcactgtcttaaccgtcatgggagtcgccggggctaagtctaagtgcagtaccgttggg

SEQ ID NO: 51537 - DNA, 263 bp, Glycine max
  Clone ID: 701140103H1
atccatccatcgggattgcaacttcatcccatccagaacagaacagaacagaactggtggttgcattgaatcggaggggtaagtgggaagacgtgtcttgttttgtagctttcccttccctctctcttttccccgccgcatgtgccggattagacgcgaactgcttccataattcacctcctccaatcaaccatcacaagatttcccactgattggatggaagaagcatgtgaatttcgaagttgggctgaattgattcctga

SEQ ID NO: 51538 - DNA, 227 bp, Glycine max
  unsure (1)..(227): unsure at all n locations; Clone ID: 701140105H1
tcacagtgccaatggcggatccaatcgcgaaggttctgatcgcgtttgcgctcttagcttccctcttgctgtgttcgcacgcttcctccgacgttcccttcatcgttgctcacaagaaggcctccctcantcnactcaagtccggcgccgaaagggtctccgtcaccatcgacatcttcaaccaaggaaccttcgacggcctatgatgtaagcttatcagacgatag

SEQ ID NO: 51539 - DNA, 262 bp, Glycine max
  unsure (1)..(262): unsure at all n locations; Clone ID: 701140106H1
agccaaactgcattatcttagctatctctcctgcaaatcaagatancgccacttcagatgccataaaaatcgccaganaagttgacccttcaggtgaaagaacatttggtgtcgttaccaaacttgatcttatggataaaggaactaatgcagttgatgttctcgagggaaggcaatacaggctgcagcatccatgggttggaattgtgaaccgttcacaagctganattaatagaaacgtagacatgatcgctgctcgtag

SEQ ID NO: 51540 - DNA, 260 bp, Glycine max
  unsure (1)..(260): unsure at all n locations; Clone ID: 701140107H1
ttcacntcaaacacacccttaattacatcgcattctcttcctccntctcttaccgtntgaattagattgcacctactcctcnctctttcactcttctttttctgnatcttcaacttctccctgattttgctgatttgggggattgagttgnaaggggaaacatggctgcttcttctgcatctctttctggtgcttctgcttcggatcttctgaggagttcaaccagcggtttcaatggtgttcctttgagaaccttgggg

SEQ ID NO: 51541 - DNA, 263 bp, Glycine max
  Clone ID: 701140108H1
gttctttttaggatactatatcaacctaaagcatatttacccttctgaagacttgcgctttttctttgctatttcttctttttttgggaatcatcacctccaataatttccaacaacacatttaccaagctacacaagtagaaacaggatatttccatatttgaagtgccacggtgctaccccaagaggcttgtggcaacttaaagtagatcaaaaagtgataaagtgtgtgatgaagaaaagttctggtacctcccagaaac

SEQ ID NO: 51542 - DNA, 267 bp, Glycine max
  unsure (1)..(267): unsure at all n locations; Clone ID: 701140109H1
ccgatccatccccgaaggtgnccgtcatctgcaacgtcgagcaccacgtccggcgaccgcggcgttttcgccagagcctccggtgactatgctattgttataagccacaaccctgataacgacacctctaggatcaagcttccttctggtgcgaagaagattgtgccaagtgggtgcagggcgatgattgggcaggttgcaggtggagggaggactgagaagcctcttctgaaggctggtaatgcttaccataagttcagagtgaac

SEQ ID NO: 51543 - DNA, 144 bp, Glycine max
  Clone ID: 701140111H1
cacagatagagtgcaacttggtttctaacaaacaagagaagatatcacattcttaaagattcacaatttcagataaatattatatgtatctgagacttttttaataagaagaatgccaggcattcctgtttccacacaacatac

SEQ ID NO: 51544 - DNA, 271 bp, Glycine max
  unsure (1)..(271): unsure at all n locations; Clone ID: 701140113H1
gataattnatgaggatatttaacatagtgtacattgtgctcctgtaattatnttcatcagttggtgttgtgatggatggtgataatggccttaacatacgtaattngggttactatgaacccgccacgtcgtttaagagccacctggggctgcaactgatgtcatccatgccggaaaaactctaattgggagggcgcaatgctgcggttttaggctggtactcatgggggcatttcaccatagggacatttgtggtaatgcccccagctac

SEQ ID NO: 51545 - DNA, 254 bp, Glycine max
  unsure (1)..(254): unsure at all n locations; Clone ID: 701140114H1
gaagggcagatcaaacaagnctcataccgacatttttatcagacngattggaaagtacnatcnctcggtcttactttactaattggcctaaaacagtggagcctaggctttatgaggaaggcaaagaaaaagtggcagccatattcaagcaccagggttatgaggtgaaagagttcnctgaagaagacaatgagccatctatagattgcagtggcacaataaagtttggcgggtggatggtgatggattgtccc

SEQ ID NO: 51546 - DNA, 278 bp, Glycine max
  Clone ID: 701140116H1
caaacatgaaggacccagagaggaaccggctatgcaaaaccattgattgtcagaaactgtctcaagaagcatgcagccatgcagcacagaacgaaaggctaccggtgcagatggtggttcaagttctttacttcgagcaaatgaggcttcgcaatgccatgaatggagggcacaaccaactcttctttggtcagttccctcaccgttcagggagtggtgcagggagtggagccatttccccaagagataactatgcatctgttagaagagagaacaga

SEQ ID NO: 51547 - DNA, 233 bp, Glycine max
  unsure (1)..(233): unsure at all n locations; Clone ID: 701140117H1
gttgatggtagtcaacccacgaaggcctgttactcataggctgagttttgtggagatggttgttccctatggagatccaaatgatccacattacagaaaaaacgcttttnatgctggggaagatggattgggaaaaaatgcacattccctcaagaagggatgtgattgtttgggatacatcaagtattttgatgctcacttcacaaatttcactggtggggtggaaacaattg

SEQ ID NO: 51548 - DNA, 253 bp, Glycine max
  Clone ID: 701140119H1
acacactgtctctgtacactacaaagtgtaagttaacaaaaagaaaggaaggagcatagacacaaagatgagcaaagactccacgagaggttcaaagaagaaagtttcatgcagaaggcttggagggtacctcaaagagcagaaaggaagactatacattatcagaagatgtgtagtcatgcttctctgctggcatgactagaatcattctcatcaacaaccattatagtgtttaacgttcttctttgctcat

SEQ ID NO: 51549 - DNA, 259 bp, Glycine max
  Clone ID: 701140124H1
gaaaatggcaatactgatcctaggcctgctggccatgttccttttggtctcctcagaggtggcatccacgaattcaaaagaggtgacaaatggagttgaagatgccaaatatcctggtggaggctatggtgggggttacccaggcaatggcggtggtggctatcctggccgtggtggtggctaccctggtcgtggtggtggctatccaggtcgcggtggtggttaccctggtcgtggtggcggctatccaggccgtgga

SEQ ID NO: 51550 - DNA, 262 bp, Glycine max
  Clone ID: 701140125H1
gagttccgcaggggtgaggaggagcccagtgaacttgaggttgtttgtttggaggcaaggaagatagtggtggaaagagacagggaggaactgtctcccaggtctgagatgagagatgatgagtttctgtttgatatagattattatgatgaatttggatcagattttacgccaaagatggcaatagatgaccctttaaccagagcaacttttctgcctgcacttgggaatgggcagtctcgtaacccgctttccaaattgg

SEQ ID NO: 51551 - DNA, 81 bp, Glycine max
  unsure (1)..(81): unsure at all n locations; Clone ID: 701140126H1
cggatggantcagtatgagntcatgnagcagatcggtagaggagcatttggagctgctattcttgttctncacaacatatg

SEQ ID NO: 51552 - DNA, 268 bp, Glycine max
  unsure (1)..(268): unsure at all n locations; Clone ID: 701140127H1
cttgcttctttcttcaccatgtcacttgctgngaancatcaccactnaaattggggttcatgcaaccgctgcaaagtggttcaacctctttgcaacacaacttcatcatgttcaaaaccttactgatagagtacatggaaccaagctgcatcaaggtgaagactggcatcacaacgtcacagtcaaacactggacttatactctagatggtaaggctacaacatgttctggagagtattgaatccattgatgaacagaacaaaacaat

SEQ ID NO: 51553 - DNA, 274 bp, Glycine max
  unsure (1)..(274): unsure at all n locations; Clone ID: 701140129H1
cttggaaganaaaaatggcaacaaatggcaagacacctgcgataggaatcgntttgggcacgacatactcatgcgttgcagtgtggcagcgtgatcgagtggagatcatcgcgaacgaccaaggaaacagaacaacaccctcttatgttgctttcaatanccacccaaagggatgattggtnatgctgccaagaaccagggctgctaccaatccaaaccaacactgtctttgacgcaaagcgcctaattggtangagatttagtgatcaaggag

SEQ ID NO: 51554 - DNA, 271 bp, Glycine max
  unsure (1)..(271): unsure at all n locations; Clone ID: 701140131H1
ggggaganaggaattttacttggtgctgttcatggagttgtggaatccttgtttaggagatacactgataatggaatgaacgaagatctggcctataagaatactgttgagtctataacagggattatatctaaaaccatctcaactaagggcntgctagctgtatacaatgctttatctgaagatgagaaaagggaatttgagaaggctatagtgcttcttattatccttgcatggaaattctgtatgagtgctatgaggatgtagccat

SEQ ID NO: 51555 - DNA, 255 bp, Glycine max
  unsure (1)..(255): unsure at all n locations; Clone ID: 701140132H1
atgcttcattccaagatggttaggnctctgtaggctgataaagacaacactcataccgttngaaagaaggatgctgctggccatgttgcttaatttagttcttgcttcctttgtcttcttgagttttatcagagacgggagtgcagggatcactagctctttcattcggtcagagtggccggcagttgacatcccccttgatcntgaagcatttgcagttccaaagggttataatgcacctcaacaagtgcacat

SEQ ID NO: 51556 - DNA, 262 bp, Glycine max
  unsure (1)..(262): unsure at all n locations; Clone ID: 701140133H1
gcacgccctatggtcaccgccgttggtgtctcgtggtagagccttgttgatgtccctctctagtcattgtncgttctcgccgttgccgatcacgttctctagttgctagagccaccaaaaaagggtgcagtaagcaacttggaggttcaggaagtaacaaccttgtagatactgctatattgcgttccgtatctgtgtgtctgagcgtgaaaggagcatgcagtgccacactcttcctctggagttgattcgagaaattctt

SEQ ID NO: 51557 - DNA, 259 bp, Glycine max
  unsure (1)..(259): unsure at all n locations; Clone ID: 701140134H1
aaagaaagagttgagtgatggcggcttgtctgcaactgtggcaatgcaaactagcgagaccctttgactcattaccggtgcgaaggtcaattcctttgagtctgaggtgttcggncgcgccctcttcttccaagccgacgcgctcctacagcatcactctcatccccggcgacggcatcggccccgaaatcatctcggtggccaaagacgttcttgtcctcgccggttatctcgaagggattaaatacgacttccgcga

SEQ ID NO: 51558 - DNA, 257 bp, Glycine max
  Clone ID: 701140136H1
caaaccccgacttctggaagggatgcatttattagataaaaggtcaacacaggctctgcctgttgctttgatgattcatgataactcgtcggatcgcacggcctttgtgccggcgacgcatcattcaaatttctgccctatcaactttcgatggtaggatagtggcctaccatggtggtgacgggtgacggagaattagggttcgattccggagagggagcctgagaaacggctaccacatccaaggaaggcagcag

SEQ ID NO: 51559 - DNA, 260 bp, Glycine max
  unsure (1)..(260): unsure at all n locations; Clone ID: 701140141H1
ctctctctctctctacaaatccttctttcttctcttcgctgctcactgtagcgtanccatggctttcagagttggaggagcgggaggaggaaatgcctcttctggcatgggtgttgctgagcatagcgtaagcacgttcctggaattgcagaggaagaaagttcatcgctatgtgatttttaaaattgacgagaaaaagaaagaggttgttgttgaaaaaactggaggccctgctgagagctatgatgatttcatgcatc

SEQ ID NO: 51560 - DNA, 173 bp, Glycine max
  unsure (1)..(173): unsure at all n locations; Clone ID: 701140142H1
agaatatgaagttgtttgttttctttgttgctgcagtagttttggtagcatggccatgccatggcgcaggctaccaaaggttccctctccgaatgaaaactggctatggtgagcgttcttcggaggtaaaatgcgcaagttttaggcttgctgtggaagcacacaacatncga

SEQ ID NO: 51561 - DNA, 241 bp, Glycine max
  unsure (1)..(241): unsure at all n locations; Clone ID: 701140147H1
gggcacccttgccaattgggttcgctgtgttcttacntcaactggcaaccatccccatcaccgnaactgntatcaaccctgctcgtagtcttggtgctgctatcatcttcaacaaggaccttggttgggatgaacactggatcttctgggtgggaccattcatcggtgcagctcttgcagcactctaccaccaggtcgtaatcagggccattcccttcaagtccaagtgattcaatcaaac

SEQ ID NO: 51562 - DNA, 272 bp, Glycine max
  Clone ID: 701140148H1
ggcacaacaatggaatccaagcggaatgcaactcccaagcaaaaatgaaaacattgtacagagacatattcttgctgattctgttctggctgatgactacccccaaaacattgattataaaaattcatcttttggataccaatagatccactctctcaaaaaattgcatgtgtttgaagatttcttcaagaaacaagattggatgagtgtttgtaacaccccttccccctttttgttgggttggctagggtgttcattgagttcgatttgat

SEQ ID NO: 51563 - DNA, 257 bp, Glycine max
  Clone ID: 701140149H1
aaacgcctttcttctccgtttccgtttcctcgttcgaattcgctttttgatctgcgaaaatgagagagtgcatctcgatccacattggtcaggctggtatccaggtcggaaatgcttgctgggagctctactgcctcgagcacggcatcgggcccgatgggcaaatgccaagtgacaagacagttggcggtggtgatgatgctttcaatactttcttcagcgagactggtgctggaaagcacgtgccacgtgcagtg

SEQ ID NO: 51564 - DNA, 254 bp, Glycine max
  unsure (1)..(254): unsure at all n locations; Clone ID: 701140155H1
atcctaatnacattgatgcantgttgagcataggagcggatgaactanaagactttgacgangaagaagtcagcacagcaaggactcgtgaaaaatatganagtttatccgatacttgctccagttattgctcaaaatcaaggaagaagaggnnnnnnnnnnnnnnnnntgtacagaagtcttctggggctgggggttactgccacaatgaanggaagcaccaggagataaagaggatggtgaggatgttgaga

SEQ ID NO: 51565 - DNA, 250 bp, Glycine max
  unsure (1)..(250): unsure at all n locations; Clone ID: 701140157H1
ttggttttgtggatatagcacttgttccattctacacttggttcaaagtctatnagacttttgggcagcctcaacattgagaatgagtgccccaggtttgttgcttgggccaagaggtgcctacagaaagagagtgttgcaaagtctcttcctgatcagcacaaggtctatgagttcgttgtggagataagaaagaagttagtcatcgagtaggtttcatgttggatcttaatagccatagtgaagtatt

SEQ ID NO: 51566 - DNA, 260 bp, Glycine max
  unsure (1)..(260): unsure at all n locations; Clone ID: 701140158H1
aagagggtatagacatgggctagcgcaattgcagcttcttttttggttctgcttctggctttccccactgtatttgganctnaccatgaagttggtgacactagtggatgggccctcggagttaattacaacacctgggcctctgggaaaactttcacagttggtgacactttggtgttcaagtatgactccactcatcaagttgatgaggttgatgagagtggatacaacagctgcagctcaagcaacagcatcaagaa

SEQ ID NO: 51567 - DNA, 271 bp, Glycine max
  unsure (1)..(271): unsure at all n locations; Clone ID: 701140163H1
gctctcttctctnccaaatgctnccattccangatggttaggactctgtangctgataaagacaacactcataccgttggaaagaaggatgctgctggccatgttgcttaatttagttcttgcttcctttgtcttcttnagttttatcagagacgggagtgcagggatcactagctctttcattcggtcagagtggccggcagttgacatcccccttgatcntgaagcattgcagttccaaagggttataatgcaccttcaacaagtgcac

SEQ ID NO: 51568 - DNA, 261 bp, Glycine max
  unsure (1)..(261): unsure at all n locations; Clone ID: 701140165H1
ctgccctccgccatgactgaggataaggagatgtcttnctctgtcacncaatggnnatgattccctcactggtcacatcatatctacaactattggaggcaaaaatggggaacccaaacagactattagttacatggcagaacgggttgtangaactggatcatttggaattgttttccaggcaaaatggcttggaaactggggaacnatgggctattgaaaaaggttttacaggacagaagataccaggattcgcnaact

SEQ ID NO: 51569 - DNA, 109 bp, Glycine max
  unsure (1)..(109): unsure at all n locations; Clone ID: 701140166H1
gaaaatgcgacgatgatttctctgtctccgaattagaaatgttgaatggaaaagtaaaggatcaagaaaaganaaccaccaacatttcaagctctcacgcaacanngnc

SEQ ID NO: 51570 - DNA, 251 bp, Glycine max
  Clone ID: 701140167H1
tgaatacattccttgtagtttatactgaaagatgggtttgaagatggcgttactgatcctaggccttccctcatgctccttttggtctcctctgaggtggcatccacgaatacaaaagaggaggcaaatggagtggatgatgccaaatatcccggtggaagctatggagggggttacccaggtcatggcggtggcggttatcctggccatggcggtggcggttatcctggccatggcggtggtggtggcta

SEQ ID NO: 51571 - DNA, 258 bp, Glycine max
  unsure (1)..(258): unsure at all n locations; Clone ID: 701140169H1
gccgaagttcgacccctcccagatcgtccgacgtcttcgtacgcgtcaccngnggtgangtcggcgcggcgagttccctcnccccgaagatcggtcccctcggtctctcccccaagaagatcggagaagatatcgccaaggaaaccgccaaggactggaagggcctccgcgtcaccgtcaagctcaccgtgcagaaccgtcaggccaaggtcacggtggtcccatccgccgccgcgcttcgttcatcaaggccctcaa

SEQ ID NO: 51572 - DNA, 254 bp, Glycine max
  unsure (1)..(254): unsure at all n locations; Clone ID: 701140170H1
atagtttttcgctatgttcgcaggcaagtgagacgatnccatcaatgcccttatctgcttcgaaagaaccggtgtcatccaaacatggtgaagagntggcaactggatcaataatagctgaaacttctactgtacagggttcggcttgcccaactgtccaagcttgagatctattttagaatatgcttaacacaacacatgcaattcgaacgttgttttttcggaaagatttgaaagtaactccgttgggttca

SEQ ID NO: 51573 - DNA, 221 bp, Glycine max
  unsure (1)..(221): unsure at all n locations; Clone ID: 701140172H1
ggcttgagaagtnaaagaaaggatctagntngaagangtggtattcgtcgggtgaagantctttgatttacacaactgaaagtgnnnngtgaganagatgaanagaagaggncggaggagagcgaanaagaaaagngtcgatggttcgtcangtgnttctgggngaaaggtnaaaaggaagattcacnatccaggagtggtaagaaagatatcncatntga

SEQ ID NO: 51574 - DNA, 257 bp, Glycine max
  unsure (1)..(257): unsure at all n locations; Clone ID: 701140173H1
attccctccttcttggaaaancatnngccctcaaatgtccagnatcatcaccgggttcaagtaccacttccttcnttntcttgtaggnntgcttggnatagctnnattcttctttgcaatttgcaccttcacttggtcanacaatcttttcacatactcaactntgtacctgtgcatnctnatgctgagtctcntggggcttgttgtnntaagtnggnctgttaggcaatgaagcttctagaaggacatgagaaatc

SEQ ID NO: 51575 - DNA, 263 bp, Glycine max
  Clone ID: 701140176H1
cgcagagcaactcaacacaacgaaccaaaagcaacaatgtcgcagccgcagcctcagtcgcagccgcaacacgggcaagcggcgctggagcaggtgcagtgcttcggtcgcaagaagacggcggtggccgtgacctactgcaagcgcgggcgcggcctcatcaagatcaacggctgccccatcgagctcgtcgagccggagatcctccgctttaaggccttcgagcccatcctcctgttgggaaagagccgcttcgccggcgt

SEQ ID NO: 51576 - DNA, 241 bp, Glycine max
  unsure (1)..(241): unsure at all n locations; Clone ID: 701140177H1
ggaggcgattgtnccagtggtggaatccanaggntttcagacgaagaggagcgcaagaagcngagaaaaacatgtgagaaaccagggtgtttcagaatcatcaacnactcaattccactaaaaataanacgngacatgaagtcagtggttaaatanttgcatgacttcccacggaaatnaaaatgcgcaacaaaccctccgtcntgagagtggntatagggngggcaatgccaacaagtct

SEQ ID NO: 51577 - DNA, 122 bp, Glycine max
  unsure (1)..(122): unsure at all n locations; Clone ID: 701140178H1
tgcttggtagatgtccctttcngttctcttaactcttggtcttgccgaganaaagncatnccagagacgangattttnggcatgcngtgtggccaaacactcccattccannnncattanga

SEQ ID NO: 51578 - DNA, 174 bp, Glycine max
  unsure (1)..(174): unsure at all n locations; Clone ID: 701140180H1
ttttcaccatatatgtatcataaganagcgtttcttttcaaaagatctagacttntgtaccaaagcaactagtcggacgaagagacggaaaagtatgcgtcggatgcaattgcttttattctttagattgatctacatctgcatatctataatcaaattttgggcttggaaatc

SEQ ID NO: 51579 - DNA, 253 bp, Glycine max
  Clone ID: 701140181H1
ctccagtagccggcactaaacaacatggcggacaaggcagtcaccatccgaaccaggaagtttatgacaaacaggcttctctccagaaagcagttcgtcgttgatgtccttcatccagggagggctaatgtttccaaggctgaactgaaggagaagctgggaagaatgtatgacgtgaaagacaccaacactgtatttgtcttcaagttccgaactcattttggtggtggcaagtccactgggtttggtttga

SEQ ID NO: 51580 - DNA, 252 bp, Glycine max
  unsure (1)..(252): unsure at all n locations; Clone ID: 701140182H1
gttgtgctgtgccgcctcttccgtaggcagcagcaatggcctcaaatcccaaaactttgacctttgaggaggtagctaagcacaacaacaaaaaggattgctggattattatcaatggaaaggtgtatgatatcacaccatttttggatgancatccaggaggtgatgaagttttgctgacgtcaacagggaaggatgccaccattgattttgaagatgtgggccacagtgattctgctatagaaatgatgg

SEQ ID NO: 51581 - DNA, 230 bp, Glycine max
  unsure (1)..(230): unsure at all n locations; Clone ID: 701140183H1
atgaaggtctcccccttagcatttacaatcctttttttgtcctcaccatagaactcttcaanggcattgcttcagcagcacaagaaccagtgcttganacctcaggccagaagctgagaacaggtgtcaagtactacattctaccagtcttcagaggcagaggtggaggcctaacagtttcaagcagtggcaacaacacatgccccctctttgtggtgcaagagaagctt

SEQ ID NO: 51582 - DNA, 153 bp, Glycine max
  Clone ID: 701140184H1
caaacacaaataccgtctcccatcattccttacagtttcaaacacttgtttttcttctctcttctccttttttttctgtgtggatctacacccactaagcatctatggataagatgagtggttgatgagctattatgattccacacaacatac

SEQ ID NO: 51583 - DNA, 255 bp, Glycine max
  unsure (1)..(255): unsure at all n locations; Clone ID: 701140185H1
gcactctcattcatcttccttcaacaacncctnaaagcatnttctncntcttatncnnntctgcaatccaacatgttcaantacccttctctcnctctaacgatggaccactcagatccattganttgatagttgcaaaggaaaagatacgnccatgnagagtcattaccattggtttgattctgaagctaaaatacgggtgttatntaattgtatanccagtntctattgcaatgataagccactntcaaggtg

SEQ ID NO: 51584 - DNA, 252 bp, Glycine max
  unsure (1)..(252): unsure at all n locations; Clone ID: 701140187H1
gtttganaatggcaacgatcagcgcggttcaggtggagttcctggagtttccagcggtggttacttcaccagcctccggcaagacctatttcctcggcggcgcaggggagagaggattgacgattgangggaagttcataaagttcacaggcataggagtatacttggaggataaggcggtgccatcactcgccgctaagtggaagggtaaaacttcagaggagttagttcacaccctccacttctacaggg

SEQ ID NO: 51585 - DNA, 129 bp, Glycine max
  unsure (1)..(129): unsure at all n locations; Clone ID: 701140188H1
tgttaatatgcgtttcagcactgtcactgagtccttctgttgcgggggaagggcaaaataatggccttgntatgaacttctacaaggaatcatgccctcaggctgaagacatcatcacagaacaagtca

SEQ ID NO: 51586 - DNA, 254 bp, Glycine max
  unsure (1)..(254): unsure at all n locations; Clone ID: 701140189H1
ctcgctcgcaacttctacagaatccctttcaccatggatattgaggaggacatccgttctttacagctcgattcagcagaagacaataatggggtggtaaatgcagaggatggaaggccagaagaagttganaaatctgataagatggatgaagatccaaagcaggatgttgaggctgagccaaaggctgttgaggctgagccaaaagtgaaggataaggaggttccttctgttcaagatgaagaagatgaacc

SEQ ID NO: 51587 - DNA, 255 bp, Glycine max
  unsure (1)..(255): unsure at all n locations; Clone ID: 701140190H1
caaactctcacactgcctcttcctctcagattcagcaattttctattttctcctctcatggcttcagattccaaaaaggatttccctgctgatgacaaagctggaacagaagagagtaaaacatccaaagatgagatctcatctaaagattctccagcagaacaaagagcgacagtacttttggacctagacctggacctgctgggcatcnnngcaacccttttgatctctcagcaatgtctggtctgctcaatg

SEQ ID NO: 51588 - DNA, 257 bp, Glycine max
  unsure (1)..(257): unsure at all n locations; Clone ID: 701140191H1
agagagaaagaggagaaggagtagtgataaggtgatcatagagcatattataaganagtgaaaactaatggaggttggcctcaagaaggagaacatnnggtttgaggaaactgagttaaggcttggactgcctggaaacggaggcactgaagaagtgctcatcaggaagaggggtttctctgagactgaaactggtcatgaagatgagtctgccaccactgtggatttgatgcttaatctttcttctaaggagggcc

SEQ ID NO: 51589 - DNA, 240 bp, Glycine max
  unsure (1)..(240): unsure at all n locations; Clone ID: 701140192H1
ctagtatccgatcctctgtcctctcnnaagctttcatcgttcaaccatattctcaccatctcagacatgggcctgctatcttgttttaggtctaccgtcctgagaaaatgttccaaaggaagctctggcatgtcaagattcctgtatacgaacaattttcaacgaaacttgatttcgtctggtggcaatgaatcgtattatgggtattttaacaggagatcatacattcactttatatgg

SEQ ID NO: 51590 - DNA, 265 bp, Glycine max
  unsure (1)..(265): unsure at all n locations; Clone ID: 701140195H1
cactgaactaacaaagcaaccctatgtcgaaggtggtttgtntcaccggagccagcggcnccttcggatcatgggtggtcctactcctcctccagcgtggttacaccgtccatgccaccgtccaagatatcaaggatgaaaatgagacgaaacatttggaggaaatggaaggagcaaagagtcatctccatttttttgaaatggatcttcttgacatcgactccattgccgctgccataaagggttgttccggcgtaatccacct

SEQ ID NO: 51591 - DNA, 265 bp, Glycine max
  unsure (1)..(265): unsure at all n locations; Clone ID: 701140201H1
gcgagtgcaagtngtgcggtatcatttagaaacagcttcggtgtgagtaaaccctcggatcttgggttcttgagctctcgtctgaacggcctcagaatctgcttccccaaattgccacccacacccctcactgcttctcccttccccacacccctccctatcgttgccaagagagtgtgtcccttcactggaaagaaatcaaacagggccaacaaagtatcattttcaaaccacaagacaaagaaactgcagtttgtgaaccttc

SEQ ID NO: 51592 - DNA, 255 bp, Glycine max
  unsure (1)..(255): unsure at all n locations; Clone ID: 701140203H1
tggcctgtgaaccagaagctcttcactttggatgttntgtaccttcatgataaacctggaccagataactgcccccaggaggtttacgatacactggtggaggcacttgaacatgttagtgaatatgagggttatatcttggagagtggacaggggttggcacgtgttctattccgtcatgtgctgatactattgtcacatcctcagcagcgttgcatccaagagtatgttgacataccaaagtcaattgcaaag

SEQ ID NO: 51593 - DNA, 255 bp, Glycine max
  Clone ID: 701140204H1
aaccacactctcactctctcctttacttctcttcctactcttctccctagtccaaggactcacccccaaatgtgacacccaagaccatggctcaacccttgaagttttccatgtgttcagcccatgttccccatttaggccatcaaagccactctcatgggcagagagtgtcctccagctgcaggccaaggaccaagccaggctacagttcctggctagcatggtggctgggaggtcaattgtgcccattgcctc

SEQ ID NO: 51594 - DNA, 252 bp, Glycine max
  Clone ID: 701140205H1
ttttgcatcatttctggttttcattatcatccatgtagtggctcttgtgcactatatcaaaggaattctttcaccaaaaatgttcaaagtagctgtggcactagttgtttctgttggccttgcagtgtgttgtgcaatggtggcagtacttgtagcattggtagcttcaagcccaacaaaaggatggagtggaagaagtttaagtctgcttgatcctacttatgcaagcaagtatataccaatcattgctag

SEQ ID NO: 51595 - DNA, 251 bp, Glycine max
  unsure (1)..(251): unsure at all n locations; Clone ID: 701140207H1
ttgagatttatgatgattcttttttctctttttttctaccttaaagcnaaaatggagcagaagcggtagtcacaccaattcaatagtggatttccacttgtactatttttctttttctacattattttgttccctttttcattgtttcagtccctttggtcacttagttatttctgatttgaagcaaatgcttcttgtaatttcttgggcatattttagaaaaatgccatttcgtctgtttgtatacttgg

SEQ ID NO: 51596 - DNA, 241 bp, Glycine max
  unsure (1)..(241): unsure at all n locations; Clone ID: 701140208H1
ctcagacatggcatctcaaggtntgtgtccttcganaaaaaatattcttctnctggactctgaagggaagcgtgtggcagtcaagtattactcagatgactggccaacaaacaatgcaaagttagcttttgagaagtttgtatttactaagactgttaagacaaatgctcgtacggaagctgaggtaacactacttgagaacaatatcattatttacaaatttgtacaagacctgcatttc

SEQ ID NO: 51597 - DNA, 251 bp, Glycine max
  unsure (1)..(251): unsure at all n locations; Clone ID: 701140209H1
ttcattccttgtgcttgtgcttgctatggtgatcacattgatgaaccctntncaatgcaaccctctctccccatttctatgataaagtttgccctcaggcattgccagttataaagtcagtggttcaacgagcaattatccgtgagcgacgcatcggagcatctcttctgcgcttgcatttccatgattgtttcgtaaatgggtgtgatggatcaatattgctagatgacacccgaaacttcactggcgag

SEQ ID NO: 51598 - DNA, 249 bp, Glycine max
  unsure (1)..(249): unsure at all n locations; Clone ID: 701140210H1
caaatttagataaganaacaggnagactctccctcagccctttgacatggaacatacggatgaacattatattgggaactgcaagaggattggcctatcttcatgagggtcttgaaccgaaagttgtccaccgagatgtgaaatcaagtaacatacttattgatcgccaatggaactccaaggtttccgattttggacttgctaagcttttgtgttctgagaatagttacgtcacaactcgagtgatgg

SEQ ID NO: 51599 - DNA, 257 bp, Glycine max
  unsure (1)..(257): unsure at all n locations; Clone ID: 701140216H1
tctctcctctgtctttttctctctcttgctatccttttggctagtngcactgctgcaagtgcaactccaagaagcgcagtgccaagccaccatgtttcaacattcaacagaagcctttttccttccacttntctctttggngnntggttcttctgcttaccaggcagaaggagcagcaagtgtagatgggagaggaccaagcatatgggacacctacactagacagcatactgaaaagatttgggatcatagcaccg

SEQ ID NO: 51600 - DNA, 160 bp, Glycine max
  unsure (1)..(160): unsure at all n locations; Clone ID: 701140217H1
ctcaatttcaattatcaaggngtggtgaacatcaatctcctcccccgccgtgctttggacggacaacatgggaggtgatgacgctgccgctgagagtgccaccacagagcggaacgccgcaaacgaatcaacatcaacatccgctgttccaatggttcca

SEQ ID NO: 51601 - DNA, 261 bp, Glycine max
  unsure (1)..(261): unsure at all n locations; Clone ID: 701140218H1
cctctgtggcaccaccgctctctctgncgttnttggagaanaatcagangnanaagattggagggtgaaccgngaaaaacaattcagaaaatggagaacnangcattcagagatcaaatcatggaggacaatgaanatgaancaaatgcctgattccttgtttnctgngtttgtctggatacgnttatannngnccattgtganatnttgtggttacatgtgctgtttctggtgtgtctatanttcaatgagttatctncg

SEQ ID NO: 51602 - DNA, 258 bp, Glycine max
  unsure (1)..(258): unsure at all n locations; Clone ID: 701140219H1
ctcgttcccctgacggtgctgatggctatggccttgctcgcatctcttccttcttccccaaactcatgtggtctgagggattcacaattgttggatcccctcttgagcattttcgtcaactctggccccaagattaccacaaatactgtgatnnccgtcaagcacctatgatgaagccatgaaaaagctagtgggaaagctgatgtggctgatgttggattctctgggtattacaaaggaagacctgaaatgggccgg

SEQ ID NO: 51603 - DNA, 250 bp, Glycine max
  unsure (1)..(250): unsure at all n locations; Clone ID: 701140223H1
tcagcttgtggccatagtctcattatttatccttttgcttccaaatatccatgggtggggagacgatgggcatgtcattgtttgcaagattgcacaggctcgcctcagtgaagcagctgcagaggctgtgaagaaactgctgccaatatccgcaggaaatgatttgtccacaaagtgttcttggnccagatcatgttcatcatatctatccttgggcctctgctttgcactacgcaaataccccagaggc

SEQ ID NO: 51604 - DNA, 250 bp, Glycine max
  Clone ID: 701140224H1
gcacccgctgtgctgtatctccctcgagagtccaggaatcggcaaacattcgccggagcgggagccggcggcgcttttccgaaccagtagcctcccggcggcgggatctcatggcaatgctgctcagggatcggagaccaccgtcgccggcgttctctacaaatggaccaactacggcaaaggctggagatcccgctggttcctcttgcggaatggcgttctctcctacgccaagatccgctgtccggag

SEQ ID NO: 51605 - DNA, 250 bp, Glycine max
  unsure (1)..(250): unsure at all n locations; Clone ID: 701140225H1
gctagaaataataatatgggaggaaaagggtatgctctatggctcttcattattgaaatcctggtgcatttttccacatcaagaagtgccacaagttccttcaataatagtgttnggagactcctctgtggactcaggtaacaacaacttcattccaaccattgcaaggagcaactttgagccttatggtcgtgactttttcaatggaaaccctactgggagattctccaatggacgcattgcccctgac

SEQ ID NO: 51606 - DNA, 259 bp, Glycine max
  unsure (1)..(259): unsure at all n locations; Clone ID: 701140233H1
aagaatggcaaagttaataaaattctttgagttgaacacaggggccaagattccttctgttgggttaggcacttggcaagctgagcctggtgttgtagccaaagctgtcaccacagccattctggttggatacaggcatattgattgtgctcaagcgtataacaatcaagcagagattngttctgctcttaagaagctttttgatgatggtgtggtgaagcgtgaggncttatggatcacctccaaactctggtgttca

SEQ ID NO: 51607 - DNA, 245 bp, Glycine max
  Clone ID: 701140236H1
ctcccctacacaaaacatggctttgcccaatcagcaaaccgtcgattaccccagcttcaagcttgtcatcgtcggcgacggtggcacaggaaagacaaccttcgtgaagaggcatctcactggtgaattcgagaagaaatatgaaccgaccattggtgtggaggttcatccgttggattttttcacgaactgtggaaagattcgcttctattgttgggatactgctgggcaagagaagtttggtg

SEQ ID NO: 51608 - DNA, 244 bp, Glycine max
  unsure (1)..(244): unsure at all n locations; Clone ID: 701140245H1
cgattttncactaactacanggctttaaataaggngactatccctgacaagtttcccattcctgtcancgaggagttactagatgaactaaagggaatttgttttggttttcttcgatgacatattgatatatagcgcanccatgggaacctaaaaagtctagagagagaaacactggatgggagagagataggtttagaggttaggcagctgagagagtgagcttcagggaggaccttcgncg

SEQ ID NO: 51609 - DNA, 248 bp, Glycine max
  unsure (1)..(248): unsure at all n locations; Clone ID: 701140246H1
ttggactgncctggaaacgtagggcngcactggcactgaagaagtgctcatcaggaagagaggtttctnctgagactgaaactgaaactgaggaggatgagtctgctaccantgtggatttgatgcttaatctttcttctaaggaannnnnnnnnnnnnnnnnnnnnnnngataagcacaagacttgcctaaggagaagactcttctgcctgcagatcctgctaagcctccagccaaggcacaggtgg

SEQ ID NO: 51610 - DNA, 250 bp, Glycine max
  unsure (1)..(250): unsure at all n locations; Clone ID: 701140247H1
ggcggagaaacacaaccttaagaatccagctgtgaagcncattctccaagagctcaaggagatgcaatcaaacccatccgatgactacctgagcctccctcttgaggaaaatatatttgaatggccaatttgctataagggggcctcgtgatactgaatttgaaggtggtatttatcacggacggattcagctgccttcagaatatcccttcaaacctccttcgtttatgttgctcacacctagtggccg

SEQ ID NO: 51611 - DNA, 224 bp, Glycine max
  unsure (1)..(224): unsure at all n locations; Clone ID: 701140248H1
ctcacttctagggttttctctgcgctataagcaatcatggcggatgaaacaccaaatgagatgaaggaggaggttccagaaattgttccttttgatcctaccnnnnnnnnnnnnnnnnnnnnnntancaattgtagatcctgctgatgaacctgtggagaaattggctgagaagacagaaaacctctcagtttccgagggggttgagactgcatttactggttt

SEQ ID NO: 51612 - DNA, 252 bp, Glycine max
  unsure (1)..(252): unsure at all n locations; Clone ID: 701140251H1
gggaaacaacagtggtgggtctgagtctaatattaaaactgttgctcctgagactgctggctccactgcagtggttgccattttaagccaaacccacatcatagttgcaaactgtggagattcaagaactgtcttataccgtggaaaagaagccatgccattgtcttctgaccacaaaccaaatagagnggacgagtgggctaggatagaagctgcgggaggaagagtcatacattggaaaggatatcgagt

SEQ ID NO: 51613 - DNA, 248 bp, Glycine max
  unsure (1)..(248): unsure at all n locations; Clone ID: 701140257H1
cgagcaggtactgggcagtgtctcttcccgtccacaactcggcatcatctcagctctggaaccaattgcaggaacgaatctccaagcattccttcgacacacctctctacancttcaacattcccaacctccgcgtcggaaccctagactctctcctctccctcagcgatgacctcgccaagtccaacaatttcgtcgaaggagtcacgcacaagatcaggcgccagattgaggagctcgagagagtt

SEQ ID NO: 51614 - DNA, 84 bp, Glycine max
  unsure (1)..(84): unsure at all n locations; Clone ID: 701140259H1
ctttaatnccctcgcctatatcttcagaaaattngatctgnnctcagatctagggtttacccttttccaaatacaacgagtncg

SEQ ID NO: 51615 - DNA, 248 bp, Glycine max
  unsure (1)..(248): unsure at all n locations; Clone ID: 701140261H1
caaatacggtcaccctgttaaccataaaggtcatgctgaaatttcgtctagggacagatttgcaacgggtaatggnattcccatttctataagatgtaagangttaggcaacgagganatnagnatgcaacgagntcacaaccggagagataggntgcagcagacatttagggaanccaccttccatggagcttgagccanagcaccttnaaagtccgagggcccttcatttttaggcttagagagca

SEQ ID NO: 51616 - DNA, 244 bp, Glycine max
  unsure (1)..(244): unsure at all n locations; Clone ID: 701140262H1
tttgattctcctctaatgatattgtgtattattggatcttatgcaaaatttcattacttttattcaaaaatgcctactccatttttgtattggtccttctcaatttgtcttatatgatgtatttctcagggaggaatcagagggcaagttgaagggaattcttggttacactgaagatgatgtggtctccactgactttatcggcgatngcagatcaagtatttttgatgcaaaggctggaatg

SEQ ID NO: 51617 - DNA, 255 bp, Glycine max
  unsure (1)..(255): unsure at all n locations; Clone ID: 701140264H1
ccctactcattctccatacctcaacgaagangttaaagagacggcaacactttgctgtccgccttgaccgagcagagcttcgtcttggccctcgattttgccctaaagtactctcagtcacaacagacacnnnnnnnnnnnnnnnnnnnnnnaatggcaccgaagcagaccaaggctgagaagaagatcgcttacgatgcgaantgtgcgacctaatggaggagtacggccagatcctcgttgtgaactccgata

SEQ ID NO: 51618 - DNA, 258 bp, Glycine max
  unsure (1)..(258): unsure at all n locations; Clone ID: 701140265H1
gccgcccaaaacttctcatacccttttattcattccattcgtttctagggtnttcttttctttgccgagaaaatgagagagtgcatttcgatccacattggccaggccgntatccaggttggaaacgcctgctgggaactctattgccttgaacacggcattcagcccgatggacagatgccgagtgacaagaccgttggcggaggagacgacgccttcaacacatttttcagcgagaccggcgccggaaagcacgtg

SEQ ID NO: 51619 - DNA, 251 bp, Glycine max
  unsure (1)..(251): unsure at all n locations; Clone ID: 701140268H1
gttcttttcctctttgctcttgtctcgttnacttcccatgcttctgtcaatganttctgtgtagcagacctaaaaggtccaganagcccttcaggctatcagtgcaagccanctaacacagtcacgcntggatgactttgtgttctctggctttgtagctggaaacaccacaaacactttcaatnctgcattaacctccgcatttgttactgatnttccaggtgtgaatggtctnggtgtatctgtggcag

SEQ ID NO: 51620 - DNA, 250 bp, Glycine max
  Clone ID: 701140269H1
acttctcaaatctcgaaccctctcgttcgtgccgatcactaggtcacacttcatcaatggcgggtagaggcaaaaccctaggatccagcgccgctaagaaggccacctcaaggagcagcaaagccggcctccaattccccgtcggtcgtatcgccaggttcctcaaggccggaaagtacgccgagcgcgtcggcgccggagcccccgtctacctcgccgccgttctcgaatatctcgctgctgaggtttt

SEQ ID NO: 51621 - DNA, 250 bp, Glycine max
  unsure (1)..(250): unsure at all n locations; Clone ID: 701140270H1
tggtaccatngccctgtgtntggctgtgtcctcggcagtgcttgngcggtntgaacaagcacttaaacaagatgggtncacttagcttcttgatcatnggagatnncgggaaganaaggagcttacaaccaatccaaagtngcattccagatgggagtnatgggacaacaattggacatcgattttgtgattnccnccggcgacaatttggcagcncagtggcttgacaggcanagatgatccaganttt

SEQ ID NO: 51622 - DNA, 250 bp, Glycine max
  Clone ID: 701140271H1
cgagagtgaagcacacgccagcttctcgcaaatccgctaaaaagcaagcgccacgcgcataccacttccacgcagccgccaccaccaatcccaatcgcctgcaactagagagaggaggagagctcaacaagtggagccgcagcaggagcctgaggctcagggaaggaagaagaggcgcaataggtcgggaactgtggcgcttcgtgagattcggcattttcagaggagttgtgagcttctcatcccggct

SEQ ID NO: 51623 - DNA, 244 bp, Glycine max
  Clone ID: 701140272H1
cgatctagaacttgccaaacggtgttcgaatttgtgatctggtgaatcatgaatgctaggagagatggtcgtaacaacagagttgctctttttgatggtattgaggagggtggcatcagagcatcgtctctttactcctcaacttcttcccatgaaattgatgaacatgataatgaacaagcattggatggattgcaagatagagttaatctgctgaaaagattgtcaggtgatataaatgagg

SEQ ID NO: 51624 - DNA, 245 bp, Glycine max
  unsure (1)..(245): unsure at all n locations; Clone ID: 701140273H1
ttggtctcaattttaattgttgttcagaaacgaatagccgttattacggattcaaaaacgacaaagaaaacactgtgcagtggtcgttgggagctacggatggttctcaacaagcgaaaacgggaaggaaagcgatgtcagaagagnttaattttgcggctaggcctctggatctcaacactgatgtgtgcaaaagtggagggtgtgagangcaagaaaaaggacatgctaatttagtagtctcg

SEQ ID NO: 51625 - DNA, 244 bp, Glycine max
  unsure (1)..(244): unsure at all n locations; Clone ID: 701140274H1
gctattagttcgattttgtagtaagtgaggtgccaatatggtgaagatagctcttggtactttggatgactcttttagcgctgcctctcttaaggcttatttcgcagagttccacgcaactctgatttnccgtgttcgctggtgttggatcagccatcgcttacaacgagcttacaaaagatgcagccttggatccaacggggctggtggcagtagctgtggcacatgcatttgcactgtttgt

SEQ ID NO: 51626 - DNA, 241 bp, Glycine max
  Clone ID: 701140275H1
gtgggattctattctaagattttgagaatgtctagctgtgggtgtggcagcagctgcaactgtggcagcaactgcggttgcaacaagtactcttttgacttgagttacgttgagaagacaaccacagagactctagttttgggtgttgggcctgtgaaggcccaattggagggtgctgaaatgggtgttgcatctgagaacggtggctgcaactgtggatcaagctgcacctgtgacccat

SEQ ID NO: 51627 - DNA, 246 bp, Glycine max
  unsure (1)..(246): unsure at all n locations; Clone ID: 701140276H1
ctaccatattgaaacatatgatgtgactacaattagagcaagcacacctatgtttctacatgtctcggaagattaaatcacttggtgtcaaatgggttatctcaggagaaggatctgatgagatctttggagngtatttgtacttccacaaggcacccaacaacggaggagttccacagagaaacatgccgccaagatcaaagcacttcaccaatatgattgcttgcgagccaataaatcaacatt

SEQ ID NO: 51628 - DNA, 246 bp, Glycine max
  unsure (1)..(246): unsure at all n locations; Clone ID: 701140278H1
gagcgtgncnggcaccggccgccggccatngacattcaagcgcaggaacggaggtcgcaacaaacacggccgtggccatgtcaaattcatccgatgctccaactgcggcaaatgctgccccaaggacaaggccatcaagaggtttcttgtgaggaacattgttgaacaggctgcagtcagagatgtgcaggaagcctgtgtctatgaacaatacacgcttccgaaactatatgtgaagatgcagta

SEQ ID NO: 51629 - DNA, 109 bp, Glycine max
  Clone ID: 701140280H1
ggggtagtaagttcaggtttctacccgaattccatgaacatgtccatgttagcagttgaagcaagttcgtggaataatgaactatgcaataaccctaacccaactttct

SEQ ID NO: 51630 - DNA, 256 bp, Glycine max
  Clone ID: 701140281H1
aaacgacgtttggcatagcatcgcattgcttttgccagcacacagttgcatccttcatccaactccaaaataaaatcgacacaaacacaacacaacagatcgaatgtataatgttgcgtaaggaactataaaatctctcatttctgttctcttcacgcacaccaacaaaacctctctctctcatcggaatctcccaaaagaatggacgacaaaacgcagcagtccgagagtaagcaaaacgacaacgacgaggagt

SEQ ID NO: 51631 - DNA, 251 bp, Glycine max
  unsure (1)..(251): unsure at all n locations; Clone ID: 701140282H1
ttcccatccatttcgaatgaagtttaaaactgtcatggaatctgattctcacgtataaggtttgcatgcctggtgggtttcctgggggcttcccaggggccgggggcatgccagggggcttcccaggggccgggggcatgcctgggggcttcccaggggctgggggcatgcctgggggattcccaggggctggtggcatgcctgggggattcccaggggctggtggcatgcctggaaacnttgattttagc

SEQ ID NO: 51632 - DNA, 89 bp, Glycine max
  unsure (1)..(89): unsure at all n locations; Clone ID: 701140283H1
gcaggttccgaggggagaacgaccnnatgagaactgcatttgctcaaaatgttacttttacgattngancgtgaaaagataatntntgg

SEQ ID NO: 51633 - DNA, 68 bp, Glycine max
  unsure (1)..(68): unsure at all n locations; Clone ID: 701140285H1
gttgtctagaaggattttncntcgagtgtagctttcttacaattctattttcaatattgttttctttc

SEQ ID NO: 51634 - DNA, 248 bp, Glycine max
  unsure (1)..(248): unsure at all n locations; Clone ID: 701140287H1
cagacgcaaacgcaaacgcaaacgcaaacgcaaacgcagagcgtggatccattgacgaagatggtgcagcgtctcacctaccgcaagcggcacagctatgccaccaagtccaaccaacacagggtcntcaaaacccctggtgggaagctcgtttatcagactaccaagaagagggccagcggacccaagtgccccgtcactggcaagaggattcaggggattccacacttgaggcctgcngagtacaa

SEQ ID NO: 51635 - DNA, 247 bp, Glycine max
  unsure (1)..(247): unsure at all n locations; Clone ID: 701140288H1
ccgaaccctaatcctaatcctccatcatcgattcgattctcttgctctttgttatnnccttctttggtgaacaaagcaaaacaattccatcgatgaatcgggcgtcgcagctttcctgataatgatcttggcgctgcgaatcgattgcatgggtttggagaatgtcggagctttgtagtggaccgtgacgacgtcgtgctccgattgctcgtaaaagctccgaaccaccgtctctggcggggagata

SEQ ID NO: 51636 - DNA, 244 bp, Glycine max
  unsure (1)..(244): unsure at all n locations; Clone ID: 701140289H1
gaacacaccgcgtttcggagagagacgtcgcaatggggaggaggcctgcaangtgttatcggcagataaaaaacaagccataccccaaatcacgcttttgccgtggtgttcctgatcctaagatcagaatttatgatgttggtatgaagaagaaaggtgttgatgagtttcccttctgtgttcatctggttagctgggaaaaagaaaatgtttcaagtgaagcattggaagctgctagaattgc

SEQ ID NO: 51637 - DNA, 243 bp, Glycine max
  unsure (1)..(243): unsure at all n locations; Clone ID: 701140290H1
ggacatgnacanagacgcgcttcccgaggacacttccaacgccgtcctcgccttcaaggaagctctccaatccgctagggaactcctcagattcggaagcgaaggcagcaagctttacttggtccttgagcgggacgatattangaataagttctacgaggtgacagctcagttggaacantcattgggtggtatttcccatgataaacttgatatatcagatgaagttaaagagcaggttga

SEQ ID NO: 51638 - DNA, 241 bp, Glycine max
  unsure (1)..(241): unsure at all n locations; Clone ID: 701140291H1
atcgccggcggcaccctccgaagacggagatacacccactcactcaccaccactttcccagaaaataaccaccgcctacaatttctgcgaatttattttgcggtgagggagctcgtgtcgtgtgtcgtttagggttaaaaatggggtttaagtgggtgcactgatgtcatngttgtggcttgtgattcgtcaacttgcagaaatcgaggcaatggctgcatctaagaaactgataacaaga

SEQ ID NO: 51639 - DNA, 244 bp, Glycine max
  unsure (1)..(244): unsure at all n locations; Clone ID: 701140293H1
agttctgccaaatcaagagnggttttaagatcatagtgtgtgttttgcaacaatggctaagttctttgctgctatgatcttggcactctttgccatttccatacttcaaacagtggtaatggctgctaatgaacaaggaggccacttgtatgacaacaagagcaaatatggaactggaagtgtcaagagttaccaatgcccatcacaatggctcgaggagatgtagccagacccaataccacaa

SEQ ID NO: 51640 - DNA, 226 bp, Glycine max
  unsure (1)..(226): unsure at all n locations; Clone ID: 701140294H1
gggaaaatgtcaggtncagaggttnccgttgcagctgagccacnctgctgccatcccaggcncgcctatggatatcatgactgccttgcaacttgtgctcagaaaatctctggcttatggtggtcttgcacgaggccttcacgaaggggcaaanntgattgagaagcatgctgcacaactctgtgttctagcagaagactgtgaccagcctgactatgttaaactg

SEQ ID NO: 51641 - DNA, 250 bp, Glycine max
  unsure (1)..(250): unsure at all n locations; Clone ID: 701140295H1
ctccctgttgccacctcctccgacgcccacgcgccaaacccgcgcgtgctgccactttatgacatcnttagttttctcagcaccacaatcagcagcggcatcataacctacctcgcctacaccaaaaacgacaacccaatgctcctcttcgccgccttcatctacgtcgtttacttctccgtcgacttctccccaccaccacaacaacccaaggcgcgtgggctccacgccgtgaaactcgcgtcgtggg

SEQ ID NO: 51642 - DNA, 254 bp, Glycine max
  Clone ID: 701140296H1
cgcgaatcccaccactggttgtcagaagaagctggagatcgatgatgacctgaagctacgagcattttgggacaagaggatctcacaagaggttgttggtgatgctctgggtgaggaattcaaaggctatgtcttcaaaattactggaggttgcgacaagcaaggatttccaatgaagcaaggggtgttgacccctggtcgtgttcgcctcttgctgcatagaggaactccttgtttccgtggttatggaaggc

SEQ ID NO: 51643 - DNA, 275 bp, Glycine max
  Clone ID: 701140301H1
caccatgtcacttgctgggaaaatcaccactgaaatcggggttcatgcaaccgctacaaagtggttcaacctcttcgcaacacaactccatcatgttcaaaacctaactgatagagtgcatggaaccaagctgcatcaaggtgaagactggcatcacaacgagacagtcaagcactggacttataccatagatggtaaggttacaacatgtctggagagtattgaatccattgatgaacagagcaaaacaatcacctacaagctcttcagtggtg

SEQ ID NO: 51644 - DNA, 124 bp, Glycine max
  unsure (1)..(124): unsure at all n locations; Clone ID: 701140302H1
cttgagatctcatatatcatggctacctccatggtgaagcttatgcttttctctgctctgcatactcttgnccttgcaagcagttgtgtctgtaacaccactgcattttcaacatccactagac

SEQ ID NO: 51645 - DNA, 267 bp, Glycine max
  unsure (1)..(267): unsure at all n locations; Clone ID: 701140303H1
ctgcttagtactaatctagtgtaccctgcagtactgaatgctgctattgagctcaacttgtttgagatcattgctaaggcaacaccagctggttcttttatgtcatcccatgaaattgcttctaagctcccaacacaacaccctgacctgcctaataggcttgaccgcangctgcgtttgcttgctagttattctgttcttactacttccactcgcaccacacaccatggtgccactgaaacagtttatggactctcacaagttgga

SEQ ID NO: 51646 - DNA, 267 bp, Glycine max
  unsure (1)..(267): unsure at all n locations; Clone ID: 701140304H1
ctaacacacttaaaacgaccaataatggcgttcgctcacgactnggagttggaatcctcttcttcccctctggtgttctcagtacggaggagtgaaccggagctggtggctccggccaagcccactccccgcgaaattaagatcctatctgagatagattctcaggcgggtcttcgtacccaaattccaatcatacagttctaccgtaacgacccatcattggcaggcaaggacccagttcaagccattcgaaacgctcttgcggaa

SEQ ID NO: 51647 - DNA, 265 bp, Glycine max
  Clone ID: 701140305H1
ccgggtcaaccccatgttcagtttcatcagttttcaggttatgtaaccgttgatgacaaaaaccagcgtgcactcttcttctactttgctgaagctgaaaaagatgcactttccaaaccccttgttctttggctcaatggagggcccggttgttcttctcttggagttggtgcattttcagagaatggaccatttagacccaaaggagagggctggttagaaaccaattcagctggaacaaagaagcgaatatgctgtatttgga

SEQ ID NO: 51648 - DNA, 268 bp, Glycine max
  unsure (1)..(268): unsure at all n locations; Clone ID: 701140306H1
cacttcgttgcttggtgatgtccctttctgttctcttcactcttggtcttgcgagagaaagccatgccagagacgaagatttttggcatgctgttnngccaaacactcccattccaagttcattgcgagatcttctaaagcctngccctgcaagtgttgaaatcgatgatcaccctatgcaaattgaagaaacacagtacccgaaaaccttcttctataaagaagaccttcatccaggcaaaacaatgaaagtacaattcagcaagcc

SEQ ID NO: 51649 - DNA, 266 bp, Glycine max
  Clone ID: 701140307H1
gtccctccccttccgccgaggaacacaaacaacaacctcaacttaacgcattgtgtgcatgatggaggagatgaaagtttctcggcgggtggagtggtggcagaacatgatgttccccgttcggagggtttggtttgtcgttgccaagcgcctcggcattcgcaaaactgggttactgaagctaagtaatgatgtgagggcatgcgaatatgaggacattcaagtgatccgggagatactaaacagaaacgaatcagagtttggtc

SEQ ID NO: 51650 - DNA, 265 bp, Glycine max
  unsure (1)..(265): unsure at all n locations; Clone ID: 701140309H1
aaatctttgacattatagggcattttgctcagcccaatcccggtgcagtcctgccaaagacaccaattgtttgcaagccatcagaaaatgccattgaattggccatcaagatagccaaccttaacccacaaagaactttgttctttgaggacagtacccgcaacatacaagctggaaaacgtgtggggttcacactgtggnngttggtacatcacaaagatgtaaaggagcagattatgcttggaaagcattcacaaccttaggg

SEQ ID NO: 51651 - DNA, 267 bp, Glycine max
  unsure (1)..(267): unsure at all n locations; Clone ID: 701140310H1
atctctacagcaagagcaaagttctagttgatgtggaganagttaagccatactatgtgtcactcattgagaagtatttccctgccaaggttagatggtgacaccatttgaattcaagccaaggttttgaggagattgatagataattattctggcgagcgagcaatgtatcaaataattttagttcttttttcttttatacaaggattcagactgcaccttattatattgaattcacctgcaaaattgcaatcttcaaatagtaaa

SEQ ID NO: 51652 - DNA, 248 bp, Glycine max
  unsure (1)..(248): unsure at all n locations; Clone ID: 701140311H1
ttgggtttgattctgaatctncgtgntgtgtgcaatggncgcacaagcaaccccttcgtcaggaaagttgagaaggctgtagatatgccacttgacagcgatgtctttgctattcctcctggttataatgncccccagcaggttcatataacgcaaggtgacctagtggggaaagcagtgatcgtgtcatgggtnactgtggatnanccggggtcgagcgaagtgcgttactggagtnagaacantna

SEQ ID NO: 51653 - DNA, 269 bp, Glycine max
  unsure (1)..(269): unsure at all n locations; Clone ID: 701140312H1
ctccagtatggcttctactcacaatgagtttncatgcacttatgctagtggtggtggttggctccatggtggcttcctgtggtgctaacttcaaccaagactttgatctaacatggggtgatcaccgtgctaagatattcaatggtggtcagcttctatctctttctctggacaaagtctctggctccggcttccaatccaagaaagagtacctatttgggaggatcgatatgcaactcaagctcgttgctggcaactctgccggcact

SEQ ID NO: 51654 - DNA, 125 bp, Glycine max
  Clone ID: 701140313H1
agccggtgttgttttgttcggaatctgaaatcggaaatcggaagaatagtcttcacttcagaggcagaagagaagggaaaatcgatgagtaggaacgattccaagtacttttccacacaacatac

SEQ ID NO: 51655 - DNA, 252 bp, Glycine max
  unsure (1)..(252): unsure at all n locations; Clone ID: 701140314H1
gtgancatggagggagggaanagnaaagggtacgcgtggaccactatctgctggattcaacgccgctcttgcagccatttccgttaagctccctcttcaccantttgttaggtatgggatggtgttattgttcaatgtgaccatgtgggcttgttatgtgaacagcctcaaagcgctctcctctcttcaggcaactgtcancaatttcgccaccaattncatctcttccggtttagccggtttctncttctt

SEQ ID NO: 51656 - DNA, 273 bp, Glycine max
  Clone ID: 701140316H1
attccaagatggttaggactctgtaggctgataaagacaacactcataccgttggaaagaaggatgctgctggccatgttgcttaatttagttcttgcttcctttgtcttcttgagttttatcagagacgggagtgcagggatcactagctctttcattcggtcagagtggccggcagttgacatcccccttgatcatgaagcatttgcagttccaaagggttataatgcacctcaacaagtgcacatcacgcaaggtgactatgatggaaaa

SEQ ID NO: 51657 - DNA, 274 bp, Glycine max
  unsure (1)..(274): unsure at all n locations; Clone ID: 701140317H1
ctcccctcacttgtgcctagccttatgtcatagtattatcattcattctcatcctttctctcttctctctccacccaaaccctaactncccgaccctgttcccctctcgtatccgtcatgaaaggaggaaagtccaagaccgaatctaagagagccgatcccaaacttgctgtgaataagaagggagccgccaccaaggctaggaaacccgccggcaaggggaaggcagcgaaagaccctaacaagccaaagaggcctccaagtgctttcttcg

SEQ ID NO: 51658 - DNA, 94 bp, Glycine max
  unsure (1)..(94): unsure at all n locations; Clone ID: 701140323H1
atctgattggnctagncagnagtagnncaatttgttggagctggntgggaatgngcgtcnaaaancgaaatcaaatggaaattcnaaatgtcat

SEQ ID NO: 51659 - DNA, 84 bp, Glycine max
  unsure (1)..(84): unsure at all n locations; Clone ID: 701140324H1
gtttgatncccttttctttcctattaggtcacnccacaccagaaccanatccatttttgaaggaacttccacacaacatcagcg

SEQ ID NO: 51660 - DNA, 271 bp, Glycine max
  unsure (1)..(271): unsure at all n locations; Clone ID: 701140329H1
gtgaaactgacgaatggctcattaaatcagttatagtttgtttgatggtanctacncggataaccgtagtaattctagagctaatacgtgcaacaaaccccgacttctggaagggatgcatttattagatanaaggtcaacacaggctctgcctgntgctttgatgattcatgataantcgtcggntcgcacgcgcctttgtgncggcgacgcatcattcaaatttctgcccnatcaactttcgatggtaggatagtggcctaccatggtg

SEQ ID NO: 51661 - DNA, 271 bp, Glycine max
  unsure (1)..(271): unsure at all n locations; Clone ID: 701140330H1
gatgatccacgttcttttccnctttgctcttgtctcgttcacttccccatgcttctgtcaatgatttctgtgtngcagacctaaaaggtccagatagcccttcaggctatcagtgcaagccacctaacacagtcacagtggatgactttgtgttctctggctttgtagctggaaacaccacaaacactttcaatgctgcattaacctccgcatttgttactgattttccaggtgtgaatggtcttggtgtatctgtggcaggttagacata

SEQ ID NO: 51662 - DNA, 274 bp, Glycine max
  Clone ID: 701140332H1
gcattaggggggccaacctcgtcaggttcgacgcttccgagatcgcaaaggacaagcgcggttggatcttcgatcccatagcacccattattgttggatgcaattggaatacggcgtcgtttttggtttggaagtgtttaccgcgtgttcgtttgtgaattattttcccttcagtggcatttctcactggtagtgatcttgttcctgggcctgctgctggagtgtttccttcaaggggtggtcatggcattggtggaagcatgctgtaagggct

SEQ ID NO: 51663 - DNA, 121 bp, Glycine max
  unsure (1)..(121): unsure at all n locations; Clone ID: 701140334H1
gncttgtttgcctgaccctgancctgaccctgacccgacgaacgacnncnananaaganagattaancggggaagggtttatggtttgggagtggaagaatcgaatcgaatcgaattgaga

SEQ ID NO: 51664 - DNA, 261 bp, Glycine max
  unsure (1)..(261): unsure at all n locations; Clone ID: 701140338H1
tgattattgtgttgggctaagcagacaattgaatggatcaattataccatcagaacgtccagatcatatgatgtttgangtatggaacccactaggaatagttggtgtaatcactgctttcaactttccatgcgctgttctaggatggaatgcttgcattgctttagtctgtggtaactgtgttgtgtggaagggtgctccaacaactcctttgataactattgctgtgacaaagctagtagctgaagttctgagaggaac

SEQ ID NO: 51665 - DNA, 266 bp, Glycine max
  Clone ID: 701140340H1
gtccgtgctatcattatcagatcaactagacaagttcagcgaatacaaaaacaagataaaggaaacagttggagaaaatagaatggccacaataatatcaaaaagcatatacgtcttgtgcacaggaagtaatgacattgccaatacttactctctatcaccggttaggagagcacattatgacgttccagaatacacggacttaatggcttcacaagccacaaacttcttgcaggaactttatggactaggagctagaagattgg

SEQ ID NO: 51666 - DNA, 192 bp, Glycine max
  unsure (1)..(192): unsure at all n locations; Clone ID: 701140341H1
tttctctcttctttctcctctcagcttccttttccttttgaaattatcanataaaagaacaaaaactcccccttaaactgataaggtatataagccacccttcagagcaatttgtccatcttcttcaatttattagccgaagatgtggtgcattagaccttagtctttgtcatagtttctccacacaacata

SEQ ID NO: 51667 - DNA, 269 bp, Glycine max
  Clone ID: 701140348H1
aattatcttctgtacgccagttttgataatttgactaaatgcactatagcatttctggttttcatttctgtaacattttacttctggattttgtctaaatttgcattcattgcaaggttatgcttccaaagtttcagaaacaaatactaatcaaggccatgtcattagcgacaatgttccacagaatgatgaatggcctgtattgagaaccaacatgatgttatagtatatgcagatgtggatgcccatgcaaattctgagtactatgc

SEQ ID NO: 51668 - DNA, 122 bp, Glycine max
  unsure (1)..(122): unsure at all n locations; Clone ID: 701140354H1
tagttgggtatgtaaatgtatgtaatcattattttnggacccttntgaatatcatgaaatacagtttgtattgttaagttaatttttaagctttattatattacaatcgcgtctcatctttg

SEQ ID NO: 51669 - DNA, 266 bp, Glycine max
  Clone ID: 701140355H1
ggaaatggttgctatgtgcctggtaaaagatcaaaccaaagaggccatctgtggagaagttactcaaacactccttcttcaaacaagctaagccaccggagctttctgtaaagaaattatttgctgatttaccgcctttgtggaaccgtgtaaaatccctccagcataaagatgcagccgagctagcactaaagaaaatgccttctgcagaacaagaagcgctatctcaaagtgaatatcaccgaggagttagtgcatggaacttc

SEQ ID NO: 51670 - DNA, 234 bp, Glycine max
  unsure (1)..(234): unsure at all n locations; Clone ID: 701140356H1
cgatagtaatggaaatcaagcccggtttgtcagcactcgttaccggtggtgcctctggaatcggcaaaggtcttgcactagctcttgcagagaagggtgtatttatcacgatcgtggatttctctgaagaaaagggaagacaagctgcaatcctcgtcgagaaaattaactccaattttcattctaagttaggatttccgtctgccatatttgtgaaatgtgatgtgagtnatg

SEQ ID NO: 51671 - DNA, 266 bp, Glycine max
  unsure (1)..(266): unsure at all n locations; Clone ID: 701140358H1
cgggggaccttgttgtaaccaaaggagaccagtatgatgtaagagcaacataacaanagagaatgaggtanganattcttggncaagccagtngatcttgctggacagtactataaagatggagctgatgaggtcagctttctaaatattactggatttcgcgacttccctcttggtgatttaccgatgctgcaggtattgcgatacacatcagaaaatgtttttgtaccctaacagttgggggaggaattagagtttcacagatt

SEQ ID NO: 51672 - DNA, 93 bp, Glycine max
  unsure (1)..(93): unsure at all n locations; Clone ID: 701140360H1
gccctcaaacagatcaccttccaatgcctcgtaggaacccacctcctccaccttcatctggaganccccaaaancttcaccacaaccaccccg

SEQ ID NO: 51673 - DNA, 269 bp, Glycine max
  Clone ID: 701140361H1
cgtgttaattgttaaatatatagtttgatgtggtaaatatgtgattgccttgtacccttgtattattttgcaaaacaatttttttactcaaaaagaaaggttgattattctttgcgagttgggaatgaaacatactactatttcagaagcgcttgagttcatccgcaagttttgtcagtgcggtttgtttgatgtactcggcgcaagggaattaaattgttgcaggtcaattgagatttgaggggcagtcacaaggtctttttttttct

SEQ ID NO: 51674 - DNA, 268 bp, Glycine max
  unsure (1)..(268): unsure at all n locations; Clone ID: 701140363H1
gttatcacatacatgtctggtaggttactggatattccttttngaaccaaatcaaattttgcattctcagaaccattgatgtattgttgtcggcagtggtgtggcggttttgttgttttatttagtgtaggtatacgccatggtttaataattaaagtctgagagctgtttgttgccaaagggattgaacgatcttaaaaccaggtttaggatttggcatccattaataatggtcccttttaactgtatggtttcacttaatgtaatt

SEQ ID NO: 51675 - DNA, 252 bp, Glycine max
  unsure (1)..(252): unsure at all n locations; Clone ID: 701140364H1
gggagatgtcaagtcaattaaanactggaaacgccttgancatcaacatcttactggaanccgatggtgaggtctgtggagcaagagcactgtctttcttaacagaatgatcnaagctgagaagcctaatcttattgtcttcactggagatantatatttgggcttgattcctcggattcagctaaatcattggangctgcattgctcctgnaattgcatcaaacattccttgggtggctgttttngggaac

SEQ ID NO: 51676 - DNA, 266 bp, Glycine max
  unsure (1)..(266): unsure at all n locations; Clone ID: 701140365H1
catatcatatcaattagattngnnttcagagtttgcnagtgagataccatggacaactacnacagcnatgactttngganattcagtgaccagttgaggcttgaatctggtttggccaatctgnctctgaatgattattccatttggagcaacagctacagctccaagaggcctgatcagaggaggaactttgatgtcaagggcagtgatttcaacaactcatcaaagccttttgatgatgatttcaatgatggctggaagatcnc

SEQ ID NO: 51677 - DNA, 265 bp, Glycine max
  unsure (1)..(265): unsure at all n locations; Clone ID: 701140366H1
tntttattgagtctgtgcctttattcatgtcctacttcggnnnggntaagtaganaccactatgcaanaacatgccccaatgttgaaaacattgtcagagaagcagtcaaaaagaagtttcatcaaacatttgttacggtnncctgctaccattcgtctnttcttccatgattgcttcgngcnggtaatcaatcanttgcatgcatttcattcattcaccatataaatgctaaaaagaaagtaaaagaganaatccccccattaa

SEQ ID NO: 51678 - DNA, 262 bp, Glycine max
  unsure (1)..(262): unsure at all n locations; Clone ID: 701140368H1
cgcaagggcagtgttttggtgcgggttaaaatncaacgataactgttgaaatagaaaaaaagaaaaacagtgttttggtgtagctgagaaaacaggtttaaatcacctctgaatttctgctatggcttcaaccagatcagtctttcttcttcttttcattcaattgtgcttctcacttctacccttgtcattcgctcaatcccccgccaccgggtctaccgaagttacaccatttatggtcgagtgaagatccccagtgtgg

SEQ ID NO: 51679 - DNA, 246 bp, Glycine max
  unsure (1)..(246): unsure at all n locations; Clone ID: 701140372H1
tntcctgactcagtgacaggcatgacnagttccctttatgcacgttcaaaaacatgtcngtactctcccccttggtctgacacaagatttttcggtgaatgagactctagcatggaaagaaggaagtgagtttcttttcttattttgaacaccacagtgatgaacgaacacccatttgaggactgttaacgttccatattaacatctttgtctggttacacttgaagttagaagcctcaagtgaag

SEQ ID NO: 51680 - DNA, 267 bp, Glycine max
  unsure (1)..(267): unsure at all n locations; Clone ID: 701140373H1
atggaattgaagttcacgtcgaaatcgctgcagcggcaatcgcgtaagtggcgagaaggaggagaaatcggagaagctgaaggtgaagaaggcgatcgagaaaggcaacatggaacggancgcggatctacgcggagaacgcgatccgtaagcgcacggagcagatgaactacctccggcttgcctcgcgcctggangnnntcgtggcccgcctcgacacgcaggcgaagatgacgacgatcagcaagtcgannnnccaacatcgtc

SEQ ID NO: 51681 - DNA, 263 bp, Glycine max
  Clone ID: 701140374H1
cgtcactcccaagtcccaacccgaagaagagaagagaaggatggctgtggtttttcagtgtttatggtgtgctcggagtgaccccttcctcactcttcctttccaacgcaaaccacttctttgctctgtctttctttcctctcgccctcgtaacctctgctcttcaattgtcgctgctgcttccaaaaacaaaaacaagacaaaaaaagtctcgtgatcatgttactaaggacgatgaagatggcgtggacgcttttgagctg

SEQ ID NO: 51682 - DNA, 265 bp, Glycine max
  unsure (1)..(265): unsure at all n locations; Clone ID: 701140375H1
gccttcttcgccgtttcagctcaagagccaccagcaggtaagatatggttaagcataacaacgttattccccaatgggcacttcaggaaacactggcaaaactatgtgaagacttggtttaatcaaccagcacggaagaccagaaggcgtttagctcggcagaagaaggctgtcaagattttcccaaggcctactgctggacctctcaggccaattgttcatggccagactctganatacaacatgaaagtcagatctgggagag

SEQ ID NO: 51683 - DNA, 265 bp, Glycine max
  Clone ID: 701140376H1
catccttgtctttccaatcattatttcttgctcctgggcctcgtcgttgggcctgagtagcaatgcgacgaccatctacgaggtcctgagcgagcacgggctgcccatgggcctgttcccgcagggcgtgcgggagttcgcggtgggcgaggatggtagcttctgggtgcgcctcgacgaggcctgcaacgccaagttcgagaacgagctgcattacgagcgcaacgtctccggccacctcagctacggcatgatcgacgccctc

SEQ ID NO: 51684 - DNA, 266 bp, Glycine max
  unsure (1)..(266): unsure at all n locations; Clone ID: 701140377H1
gtttatcgtgaggagaatatgaagttgtttgttttctttgttgctgcagtagttttggtagcatggccatgccatggcgcaggctaccaaaggttccctctccgaatgaaaactggctatggtgagcgttcttcggaggtaaaatgcgcaagttttaggcttgctgtggaagcacacaacatccgancgaanaaaaccattcctgaagagtgcgttgaaccaacaaaggactacattaatggcgaacaatttagatcagactctaa

SEQ ID NO: 51685 - DNA, 270 bp, Glycine max
  Clone ID: 701140380H1
atttaattaactgcaatggctgcacgtgtggctgcaaggtacggatctagaaggctatttagcagtggttctggaaaaatactgagcgaggaggaaaaggctgcagaaaatgcttactttaagaaagctgagcaagagaagttggagaagcttgctcgcaagggtcctcaacccgaagcaggctcggggggttcagtaactgatgccaaacctagtagctcaggacatgctggaacaacagccgacagagtttcaactgacaataccggg

SEQ ID NO: 51686 - DNA, 263 bp, Glycine max
  unsure (1)..(263): unsure at all n locations; Clone ID: 701140381H1
ggcgganggtcgtcggtgcagatcttggtggtagtagcaaatattcaaatgagaactttgaaggccgaagaggggaaaggttccatgtgaacggcacttgcacatgggttagtcgatccnaagggnacgggggaagcccgtctgatagcgctctgtgcgcgtactccgaaagggaatcgggttaaaattcctgaaccgggacgtggcggctgagcgcaacgttagggagtccggagactcggcgggggccccggaaagagtta

SEQ ID NO: 51687 - DNA, 263 bp, Glycine max
  unsure (1)..(263): unsure at all n locations; Clone ID: 701140383H1
gncacaactacacacaagggtcggnggcnagccttgncttnaccttctcntttncttnntgtgaagtttgtgtgaggaggagganggggaatggtgctgctctgaaaaaggtccanttttgagattggaaacanagacccattggcnnagttgangnatcccnganaccagnatcanntttggncaatggggtttagatgggcatgtgccaatgtgttcttatccaagaggattttnagtgcataagagatctagtgtttaag

SEQ ID NO: 51688 - DNA, 260 bp, Glycine max
  unsure (1)..(260): unsure at all n locations; Clone ID: 701140384H1
tggtgagaggatggtgggtgttatttcgttggtaacaggaatggctggtccaagtgggtttggatcagcttcaactgcagaacaggttactgaaggagttgatgccagcaacctcactgcaattatcacaggaggagcaagtggtataggattggngacagcacgagtnttggctcttcgaaaggtccatgtcatcattgcagtacgaaacatggtgtctgcaaaagaggctaaacaacaaatactagaggagaatgagt

SEQ ID NO: 51689 - DNA, 68 bp, Glycine max
  unsure (1)..(68): unsure at all n locations; Clone ID: 701140385H1
cgaagagtctctctcttcctatcacctctctttcaatgtcngggcacaaatcttccacaactaatnnc

SEQ ID NO: 51690 - DNA, 265 bp, Glycine max
  unsure (1)..(265): unsure at all n locations; Clone ID: 701140386H1
cactgaacncgcactcactgggttttcaaccatggatgcnatacggaagcagctcgatgtgttgntnggagccaaccgtaacggcgacgtccgtgaagtcaatcgcaagtactacgatcgcgacgtctgtcgtctctacctcgtcggtctctgccctcacgaactcttccancttaacgaaaatggntatgggcccttgccctaaggtccactccttncannaatncaaanaatacgatnnncgcgnaagcnaaggggaccgntt

SEQ ID NO: 51691 - DNA, 233 bp, Glycine max
  Clone ID: 701140388H1
gtgagatttcacagaaaccaaatttccatactttaattgagtaaaatgcggctctttttataagtatgtttctggggtatcatatgggaaattaactttattacatactattgactaaataaagaacatttgggcagtcagagagaaagaaattggtttgctggattcggggaactctgactatgaagggaacaagaaatggagattccaaagcatgagtacttgagcgggac

SEQ ID NO: 51692 - DNA, 254 bp, Glycine max
  unsure (1)..(254): unsure at all n locations; Clone ID: 701140390H1
aattgaccgtcgaatccaatcctgaaatcccccaataaatagagaagcgaagaaaccaaaccaaaccatcgagtgcgttgcgcccccaccgtaagtagagctatgtcgttgcgcaggcgaaccttgctcaaggtcattgtttctcggcganagggggttgggaagacctcgtgatgaatcaatacgtgcacaagaagtttagtcagnaatataaggctaccattggagctgattttgtcaccaaagagcttcag

SEQ ID NO: 51693 - DNA, 221 bp, Glycine max
  Clone ID: 701140391H1
ctttgcattccaaatggccactgttgaggttgcacagcaaacaccaacaactgtgacagagaatgaaacaacgactgaggtaaccaagattgaggaaactaccccagaacagccagccaccgaggttactgccccagaaacagtcaacgaagaagcaaaagaggaagcagcagttgagactaatgaggcaacagaagttacagaggaagggaaggctgaga

SEQ ID NO: 51694 - DNA, 265 bp, Glycine max
  unsure (1)..(265): unsure at all n locations; Clone ID: 701140392H1
gcttactcgggttcttagtggtgatcatatgccacccacctccagagttaaccagatttaccattataatgacgggatttggtaacactggaaatctcctgcttgctgtagttggatctgttncccatactaaagataatccatttggganccattgcaacactagaggggtggcatatgtttctttatctcaatgggtttctgttatccttgtatacactcttgtttatcatatgatggaacctcctatggagtattatgaggt

SEQ ID NO: 51695 - DNA, 265 bp, Glycine max
  unsure (1)..(265): unsure at all n locations; Clone ID: 701140394H1
aagaaaatggcaaactttccagttgttgacntggggaaacttaacaccgaagagagagcagcagccatggagattataaaagatgcctgtgagaactggggtttctttgagttggtgaaccatgggatatccattgagttgatggacactgtggagaggctcacaaaagagcactacaagaagactatggagcaaaggttcaaagaaatggtggccagcaaagggcttgagtcagttcaatcagaaatcaatgacttggactggg

SEQ ID NO: 51696 - DNA, 268 bp, Glycine max
  Clone ID: 701140395H1
gcgatgaactccgtggacactcaaaagcatcggaggatcacaaatggttaatggttgcttcgaaattggcggaacagacaagattgaagggggagcgtgtgaacaaccttgatctttcaaagggccccattgaaacaaggtcaagggataaatttgggttccaggaagagaacaaatttgattctcttaacttaagcatgttgaacctggactctaaatttactgagaatgtgagcaaaagctcgcttcgaaatggtgtttatggtat

SEQ ID NO: 51697 - DNA, 291 bp, Glycine max
  unsure (1)..(291): unsure at all n locations; Clone ID: 701140401H1
caaaatcataacagtacttcgcgtgcnctagctcactccgtcgctcctcacncttccggcagtgcttggtcgtggccgtcacggttcaaacttcaaaaggtgcgtttccgtttcgtgaacctgtcttgctcttgattgttctgaacaaatggaagtaaaagactgttttttgttcttctctatttcgtgatctcgactctgtatctctcatctatcagttaaatcagcgtatgtnattgattttagataggcaggcacattatgcttttatgtgatattcagatgtgtttg

SEQ ID NO: 51698 - DNA, 275 bp, Glycine max
  unsure (1)..(275): unsure at all n locations; Clone ID: 701140402H1
cntccaactgngntccaagcgcagncacatgtttggcagcctttgccgccctccttctcctgcttnnnnnnnnnnnnnnnnnnnnnnnnatacaacctccccccaggcccaaagccctggcccatcataggcaacctaaacttaattgggtcccttccacatcggtcgatccacacgcttagcaaaaaatacgggcccatcatgcacgtatggttcgggtcgagctccgtggtggtgggctcgtccgttgaaattgccaaggccgtcctcaaaac

SEQ ID NO: 51699 - DNA, 267 bp, Glycine max
  unsure (1)..(267): unsure at all n locations; Clone ID: 701140403H1
gattatgagtatgccanacgcttttcaggagagggtaaaaatcccggatgataagatggtgtattacgagaaccttgcggagatgtacgtgggcgatgatgtttctccagatttctacgggtgggtgtttccaaaatgtgaccatgtggctgtaggcactggaactgtgacacacaagggggacatcaagaagttccaactagcaacaaggaaaagagcagaggacaagattttgggaggcaagatcatccgagtggaggctcaccc

SEQ ID NO: 51700 - DNA, 266 bp, Glycine max
  unsure (1)..(266): unsure at all n locations; Clone ID: 701140404H1
ctctggcactgccatcatccccaaactcctgcacaaggttaacngnactaaagagttgtgaccccatgtcggacgatgaaagggaggagaaagagttggatctctcttctgccgaagttgtcaccaaatacaaaaccgctgctgagatcgttaacaaggccttgaagctagttatttcagaatgtaaaccaaaggcgaagattgtggatatttgtgagaaaggggattcatacattagagagcaaactggaaatgtgtacaagaat

SEQ ID NO: 51701 - DNA, 284 bp, Glycine max
  unsure (1)..(284): unsure at all n locations; Clone ID: 701140405H1
atttttcttcatctgtatctgaaccctaatcccttcggaattggaaagaataagaatcatcaatggagggagtgctgtccgcgaatgagcaacagagcatggtctcttctttcctggaggtcgctcagggccagaccgccgagactgcgcgccagttcctccaggccacaagttggaagcttgaggaggctcttcagctgtttctgatagggagtgaaggtngggccgtgccgttgccggtgccgccgccttccgttgttgcacactccgcctttggaaaatgt

SEQ ID NO: 51702 - DNA, 282 bp, Glycine max
  unsure (1)..(282): unsure at all n locations; Clone ID: 701140406H1
ctcgtccttgtttcaccattttatcatttgctaggaatgagccactgaatatttgatggattatgcaccattgctagacatgtaatctaaaagaaacaattttgcaggtcacagaattccttggcttcagctcatgtatccaatcatgtttggagtacttggaggcagtcccttggannnnnnnnnnnnnnnnnnnnnnnntgatctcaaccatcctacgactccaaggagaaggaattggggtaaatccggtgctaaaacgagtttctcctgatttttcta

SEQ ID NO: 51703 - DNA, 280 bp, Glycine max
  Clone ID: 701140407H1
ggcacttcgttgcttggtgatgtccctttctgttctcttcactcttggtcttgcgagagaaagccatgccagagacgaagatttttggcatgctgtttggccaaacactcccattccaagttcattgcgagatcttctaaagcctggccctgcaagtgttgaaatcgatgatcaccctatgcaaattgaagaaacacagtacccgaaaaccttcttctataaagaagaccttcatccaggcaaaacaatgaaagtacaattcagcaagcctccctttcaa

SEQ ID NO: 51704 - DNA, 284 bp, Glycine max
  unsure (1)..(284): unsure at all n locations; Clone ID: 701140408H1
ctaccctttctctctctacgatggagccttcctcgatctctccaaccgccagcnnccgcctgccaccgccgtccccttccccgccgaacccaacgaccaccttccaccacccattcccgaaccaccttctaaccacccaccctacgccgagatgatatacacggcaatcgaggcgctgaaggagaaagacggttctagcaagagggcaatagcgaagtatattgagcaagtgtatacgcagcttccaccgaatcactcagacttgttgacttcagcacttgaat

SEQ ID NO: 51705 - DNA, 244 bp, Glycine max
  unsure (1)..(244): unsure at all n locations; Clone ID: 701140409H1
ttccggcataggtttcctctacnggttccaacnacccagcaagaagcattcanagtgtanttctgttttcttagcttaatcaattcatttcttatcccccctccgtgcccaaagcttctccgatattccagtggtggtttttccgatattgtcgtttaactgttttcccaagatcttcagaaacacatccaaagcggttatatcggcgatttgtgatgtggccttggagctgagataagagatg

SEQ ID NO: 51706 - DNA, 279 bp, Glycine max
  unsure (1)..(279): unsure at all n locations; Clone ID: 701140410H1
acgcgttgcatctgctacctatcatacatattttcgccaaaccgccgattccgttgagcgtttctaccgtagcgctcaggaaggaggcagtggctggtggtgntggttgtggtggaggtggttttgctgatcatttgtggtagagggtaggaaagaaaaaaaagttgaaaatgagttcagacagccgcagcaggagcagaagcaggagcccaatggaccgtaagatccgctctgatcgattttcctatcgtgatgcaccttacaggagagattcacgtc

SEQ ID NO: 51707 - DNA, 280 bp, Glycine max
  unsure (1)..(280): unsure at all n locations; Clone ID: 701140411H1
ctagaagaagaaaaaaaccacaaccaccaccatctagggtttttctttttctcatggctagtttgtcaactaggattttcttcatcatgtcccttgtgtgcctggctctcggtccaatgncacaaggggaaatgacatgtggccaggttgtgagcaacctgaccccatgcatctcctatgtggtgtatggtggaaccaatgttcctgaacagtgctgcaatgggataagaaatctctatggcatggctcagaccaaaccagaccgccaanctgtttgcaa

SEQ ID NO: 51708 - DNA, 281 bp, Glycine max
  unsure (1)..(281): unsure at all n locations; Clone ID: 701140416H1
caaggnntatctaatcatactttntctccttctttccacggtgcttgnnactnccaagttccttcttctgcttnttcntcnctctatctngggaagggcttctgccntcgnnnattgtgtcncagttatcacnttnnggggaccattgncgantcctatgnagttatcttcgatgntggtagtacgggangccgtgtacaggactatcgttntaanggacaatnaagatcnncntcgnatngccaagaccnggagtcgtttgtccagactangccaggttt

SEQ ID NO: 51709 - DNA, 286 bp, Glycine max
  unsure (1)..(286): unsure at all n locations; Clone ID: 701140417H1
tcnggcgactagngaatcttgggcgacacttggatttgagtgaatcagtgnacaaggctgcgccagttgggtcaatcaagttgaaggtagcttcagaggtttctgaagcattatcactgggtcgtgctgttgtngcacttgaatctaccattatttcgcatgggatgccatatccccaaaatttggaaactgcaaaanaggtggaacgtattgtaaganagaacggtgcagttcctgcaaccattgcnattttagatggcacgccttgtgtagggnctaagtgtag

SEQ ID NO: 51710 - DNA, 282 bp, Glycine max
  unsure (1)..(282): unsure at all n locations; Clone ID: 701140418H1
atggcatctcaaggtttgtntccttcgataaaaaatattcttcttttggnctctgaagggaagcgtgtggcagtcaagtattactcagatgactggccancaaacaatgcaaagttagcttttgagaagtttgtatttactaagactgttaagacaaatgctcgtacggtngctgaggtaacactacttgagaacaatatcattatttacaaatttgtacaagacctgcatttctttgtcactggtggtgaagatgaaaatgagctcatctagcatcagttc

SEQ ID NO: 51711 - DNA, 178 bp, Glycine max
  unsure (1)..(178): unsure at all n locations; Clone ID: 701140419H1
gagagctgagangnctaaacctcngtntgctctctcaccctttttggtngcagatcttgaacntgagcngcatttttcatagaaaaccagcaccaanaaatggaacataccatgttacctgccattggatctgttttccctcgtggtgtctttgccgcactcttgctcatgntactgt

SEQ ID NO: 51712 - DNA, 276 bp, Glycine max
  unsure (1)..(276): unsure at all n locations; Clone ID: 701140421H1
ggtggtagcaaggttgttgttcanccccatagacatgacggtattttcattgccaagggtaaanaagatgctctcgttaccaagaatcttgttcccggtgaagctgtttacaatgagaaaaggattactgttcagaatgaagatggtaccaaagaggagtacagagtttggaatccttccgatccaagttggctgctgccatccttggtggagttgacaacatatggattaaacccggagccagagtcctttaccttggagctgcttctgggacca

SEQ ID NO: 51713 - DNA, 278 bp, Glycine max
  unsure (1)..(278): unsure at all n locations; Clone ID: 701140424H1
gcagcctccaaatccaatggcttcagagaagaaactttcgaacccaatgagggagataaaagtgcagaagctncgtcctcaatatctctgttggcgagagtggagatcgtctcaccagagccgccaaggtgttggaacaacttagtggccaaaccccagtgttttccanagcaaggtacactgttcgtttccttgggnttagnagaaatgaggagattncatgctatgtcactggtcanaggtgacaaagcaatncaactttggngagtggnttgnag

SEQ ID NO: 51714 - DNA, 277 bp, Glycine max
  unsure (1)..(277): unsure at all n locations; Clone ID: 701140426H1
ctcagccatattctatctctacgccgctaactctctctcactctngcgctctctctttcacaaccttcactttactctctctgacagctaaaatgcaaggaggatttcaatcatttttgtcacacgggaatgtcattagaaatgctgttctacaacgggtgcgcatggtgaaccccctgttacagccaattgtctcttcgcggtttgaatctgttacacctgctcgcattgaggagcatggttttgagagcaccacaatttcagacatcttgaatga

SEQ ID NO: 51715 - DNA, 281 bp, Glycine max
  Clone ID: 701140430H1
ggacccacaaaggagattctcaaggatgggattacataaggaacggttccaatctagtaaaggatatggatcgtttggatgcatttttcaaagggatgaccacatgggctggatgggttgatcaaaaggttgactctatcaaaactaaagttttctttcaaggcatttctcctactcattatcaaggtcaggagtggaatcaaccaagaaagagttgtagtggagaactagaaccatcagcagggtcaacatatcctgctggtctacctcctgcagcaaac

SEQ ID NO: 51716 - DNA, 293 bp, Glycine max
  unsure (1)..(293): unsure at all n locations; Clone ID: 701140432H1
cgcagttgctttctagatttaaggaagatgggtaaggaaaaggttcacatcagtattgtggttattggccatgttgactctgggaagtccactaccactggccacctgatctacaagcttggaggcattgacaagcgtgttattgagagatttgagaaggaagctgctgagatgaacaagaggtctttcaagtatgccngggtgcttgataagcttaaggctgagcgtgaaanaggaattcacaattggatattgccnttgtggaagntttgacaaccaccaagtacttattt

SEQ ID NO: 51717 - DNA, 285 bp, Glycine max
  unsure (1)..(285): unsure at all n locations; Clone ID: 701140433H1
tctagttgacctcatgggaggagaaattggatttgtaagtnagcctgcaanttggaagcactttttcctttaccggaaccttcagaaaaggagaangcacgtctctggatgcaatgcagcagaataatcattttggttcagagttccaaggattgagaacattagtggtagatagcagaaaaatccgagctgaggtcacaagatatcatctgcagagattgggaatgtccgtggatgtaacttacagtctgaattctgcatgctcttgtttatctaatgtgtgta

SEQ ID NO: 51718 - DNA, 273 bp, Glycine max
  unsure (1)..(273): unsure at all n locations; Clone ID: 701140440H1
gcaagtgagacatttttnttttctcttttctcttaagccatataccactttggtcatactcataatcctttttcttcattttcactaagtccaccaacaccaagtcacggctcaaagacagatctttgctcatgtggtgattttgttgcttatggtcttagttggagccaggtttgctaaagcagaaggaggaggagaagctgctgataggattttggaactccctggtcagccaaaagtgtcatttcaggagttttctggctatgttanagt

SEQ ID NO: 51719 - DNA, 276 bp, Glycine max
  unsure (1)..(276): unsure at all n locations; Clone ID: 701140441H1
aaagaagcggtctctggggaacaaagaggccgtccggaagtaccgcgagaagaagaaggcgcgtgcggcgtcgctggaggacgaggttgtgaagntganggctctgaaccagcacttgatgaagaagctgaaggggcaggcggctctcgaggccgaaatcgcgaggctcaagtgtttgttggttgacataagggggancgattgaaggggaaattgggtcgtttccctatcagaaaccaacgccgaatgcgaaccctccggtggctaacttgcctg

SEQ ID NO: 51720 - DNA, 274 bp, Glycine max
  unsure (1)..(274): unsure at all n locations; Clone ID: 701140444H1
ctctaatatcccatactatgaaaaacatggatatggggtggaggaatttaatganaccttatatgatgaatgggttaacaagggcgacgcaccggcattgccagagactcttaaaaattacaacaagctgttgtctcttggcttcaagattgtattcttgtcaggaagatatcttgacaaaatggccgtaacagaagcaaacctaaagaaggctggcttccacacatgggagcagttaattctcaaggatccacatcttatcactccaaatgca

SEQ ID NO: 51721 - DNA, 279 bp, Glycine max
  unsure (1)..(279): unsure at all n locations; Clone ID: 701140446H1
caaagcagcacaagaaggtgttccattttcaacactcatcagatcctcngtcatcaattgcgttaacaactcgtaaggcaaccatgaggggcattctttctgtaaggacagccttggttcaacatcgtagtgagaaattgggccttggtttcaggctatttagcactcagggtgcttccactgctagtaccccacagccgccgccaccacctccaccaccagagaaaacccattttggtggccttaaggatgaggacaggatatttactaacttatatg

SEQ ID NO: 51722 - DNA, 283 bp, Glycine max
  unsure (1)..(283): unsure at all n locations; Clone ID: 701140448H1
tgagtgnantatattgctattgctgctgctatctcttcctctctccgcactctccatcgttnntaggaatatcacaccaattcgtgaaatcgaaggattccgacagaatcgtacgaattattgttcattgtttgcctctactgttgtgctccaacttggtaaactagaagtacagatttatttcttcaatgggggatgctgagaatgccccttccaccttcaaagaaaagggctgctggaagggagctcactcgagatactcccattgatgatgaggaagatg

SEQ ID NO: 51723 - DNA, 208 bp, Glycine max
  unsure (1)..(208): unsure at all n locations; Clone ID: 701140455H1
ggangcatncannactcaatcnattgaagcntttcatcgaacagtgcnagtncaacccttcnctcctcnctgattccttgcannantgccttcttccgcgactatcttnaaantctcggcgcgaaagcttcctgagtctgcttattccgaatcgacnggcgtggnnaggngtgaggacatataggatcttatcggangagcncnagga

SEQ ID NO: 51724 - DNA, 271 bp, Glycine max
  Clone ID: 701140456H1
gaaagtagcaaagatgtttcctttcgggcaaaagggtcaaaagataaaggggactatggtggttatgcagaagaatgtgttggatatcaacagcatcaccagtgttggagggatcgttgaccaaggcttaggcttcataggcagtgcagtcgatgcacttacttttgcagccaccaaaatctccatccagttgattagtgctaccaaggctgatggtgggaaaggacaaattggaaagagtacaaatttaagaggaaagataacattaccc

SEQ ID NO: 51725 - DNA, 271 bp, Glycine max
  unsure (1)..(271): unsure at all n locations; Clone ID: 701140457H1
cgaagaatggcatccagcaatgaagaggatttggaatataaaataataagggagactttcagcgtgcatcggattanctgtcgccatacttgaagggcagttcttagtcgccctagaataaacattgttgacaatattaccaaccttcaaagtgttgtccaaattgcaagtataatccagccaaagatcaggtgttataggaaagtcagtaatggctcgttcatatagaacttgaattctggctggcgttccagaagactgctcaaatttc

SEQ ID NO: 51726 - DNA, 276 bp, Glycine max
  unsure (1)..(276): unsure at all n locations; Clone ID: 701140463H1
tgatcgaggttgaanagngantttttctntctgnaatntnccttttntccntnngtagatcgaaagggaatcttcttanatggcctcnaagcggattntgaaggagcttaaggacctcnagaaagaccctgcanctcttgcatgnnggtcctgtagcggaagatatgtntncttgggcaagcgactatanatgggtccncctgatagcncttatgctgggggtgtttttctagttactattcattttcctccggattntccattcangccanccaa

SEQ ID NO: 51727 - DNA, 280 bp, Glycine max
  unsure (1)..(280): unsure at all n locations; Clone ID: 701140464H1
gnnttggngntaccccantgataagtatactaaaggacatggtgaacaattttaaggccattgatgcggaggagggaatagctggtgntaaatcaccaacgaggttgagtgacttcaagacaagtagggcatacttctattgggttactagagagcagggttcatttgactggttcaaaggggtcatgaacgaagtggcccgaagaggaccaggnaagtgattgaactccacaggtactgcaccagcgtctacgangagggtgatgctcgctctgctctt

SEQ ID NO: 51728 - DNA, 280 bp, Glycine max
  unsure (1)..(280): unsure at all n locations; Clone ID: 701140465H1
ctaccatcaaatcattagccattggctaagcactcatgcaattntngagccatttgtcataggnacaaacagngcaactggntgtggttcanncnatttacaaacttctgtttcctcactaccgtgacactcctgantattaattcacttgcccggaaagccctggtcaatgcagatggtattatagagaaaacattcttgtggggtaggtactctatggaaatgtccgctgtcatttacaaggactgggttttcactgatcaagcattacctaatgatc

SEQ ID NO: 51729 - DNA, 179 bp, Glycine max
  unsure (1)..(179): unsure at all n locations; Clone ID: 701140468H1
aagggatctcaaagaattcatgatgntccaaattcagcagancctttcatgaatttggctacagcnnanttanggcaacgctagtggaganatatnggcgttcaacatatgccagaagggcaaagaacagaattcaagaactgtctaccgatgaagggcttgancctccacacaacata

SEQ ID NO: 51730 - DNA, 271 bp, Glycine max
  unsure (1)..(271): unsure at all n locations; Clone ID: 701140469H1
gaaacgaggcacgattctggtcaccaacgacgacggaatcgatgctcctggcttaagggcattggttcactccatcgtcaacgccaaccttttcaacgttctagtgtgcgctcctgatagcgaganatcagctgttagccacagcatcacttggctccatccagtagctgttaagcaagtacagatcgagggaaccaccgcatttgccgtttctgggactcccgctgattgtgcttctctagggatttccaaagctctctttcccacagta

SEQ ID NO: 51731 - DNA, 270 bp, Glycine max
  unsure (1)..(270): unsure at all n locations; Clone ID: 701140472H1
ccaaggtcctgaatctcacagagacagagagaatgagtacggtgggagaagggaaggtgagtagtaatggtcatggatgttgcaaatcagggccaggctatgcttccccactggaagccatttcctggtcccagagagtctctncatttatgtaacctctgtctacacagggaccggaatagagaagccagactatttggcgacagtggatgtggatccanacttctcccaacttattccaaagtcatccataggctcctgttcctattt

SEQ ID NO: 51732 - DNA, 260 bp, Glycine max
  Clone ID: 701140476H1
aaaactaaaactaaaaccccactcagtcttccagtgaaaaaagaaaggcagcgatggaagaagacttcgacatccccggcggcgaggaaatggatctcggcgaagacaaggtcggcgaggagcgggagatcggctcccgcggcctcaagaagaagctcctcaaagaaggtcaaggctgggaaacccccgaagtcggcgacgaatccaagttcattacacggggactttgctcgacggaactaagtttgattcgagccgcg

SEQ ID NO: 51733 - DNA, 278 bp, Glycine max
  unsure (1)..(278): unsure at all n locations; Clone ID: 701140480H1
tagctcctcatcataccactgcttttctcttccctctatcgtttgttctttccttgcattcactctcgccgccgcgcgtgctaaaaaccgtctattccagaatgggcagcgagggcgtgccgtcgacggtggcggaggtcatgtcggtggcggccgtcgagctcactgacgcctccagctggtggcacgacatcgaggactctccgctgtgggcaggatcgtatgtcctacactctccgccgtacncntacggtatcgtggccaccgtagctttggtt

SEQ ID NO: 51734 - DNA, 274 bp, Glycine max
  unsure (1)..(274): unsure at all n locations; Clone ID: 701140481H1
cgctcnntcatnncttacaacgaaaccctcttcatcttgttctatctgtgacgagcatcatggcctcaagagcagtgttattgttggctatgtgtgtgcttccggcgatggttgtngccattcgcccagcaaagaaccctttttgcgtgaagggtcgtgtctactgtgacccttgccgtgctggttttgagacctcagctaccacctacattgctggtgctgagattatgttgcaatgcaagagcagggttagcaacgaggttgtgtacacgaa

SEQ ID NO: 51735 - DNA, 272 bp, Glycine max
  Clone ID: 701140483H1
cagcaatggtgtacgtcaaggctcagaaatcaaaagcctacttcaagagatatcaagtcaagttcaagagaagaagagagggaaaaaccgattaccgtgccaggattcggttgattaatcaggacaagaacaaatataacactccgaaataccgatttgtggttcgctttagcaacaaggacattgttgcacaaataatatctgctagcattgccggcgatttagttcttgctacagcatattcacatgagctgccacgatatggtcttgaa

SEQ ID NO: 51736 - DNA, 267 bp, Glycine max
  unsure (1)..(267): unsure at all n locations; Clone ID: 701140484H1
tttagacatatatcttaatggtcaggaaaatgcctcgaatgtatgtttagaggtagtgaaaacactgccacagttgcaacaganagagccacaatcaagaggtggcagatttggtgataatggtggtcgtggtgggaactacaggtttggtggaagaggtggaggaggcaggaatggtaggttctccaatggtggtgggcgtggcggcaactggggtggaaagagatggtgaagctgagaagggactttgggagttgantgttttca

SEQ ID NO: 51737 - DNA, 259 bp, Glycine max
  unsure (1)..(259): unsure at all n locations; Clone ID: 701140485H1
tcgcaatcttcactacattcaccgngcatttgcattcacattgaatatggctgacgactacacaatctaatgctgagttgttggagtggcctaagaaagataagcgccgcttcctgcatgttgtgtatcgtgttggtgatcttgatcgcaccattaagttttatactgaatgttttgggatgaagcttttgaggaaaagagatattccagaggagaaatatgccaatgcttttcttggatttggccctgaacaatccca

SEQ ID NO: 51738 - DNA, 270 bp, Glycine max
  unsure (1)..(270): unsure at all n locations; Clone ID: 701140486H1
gaagcannacaagggtgcaccanaactttgacatttcananggatgtggctttgtaatgcttgtggtggcagtngtgttnccacctggtactaggcctgaaacttgtaancnatgtaaagggtcaggagtcnttatttgtacaagctggcatatttcagaatggagagtacttgtggtacctgcaagggaactggaaaaattgtatcggattnctgcaagtccngcagntncgcgnagnttgtcaaaggaacgaagttcggtcaagttng

SEQ ID NO: 51739 - DNA, 247 bp, Glycine max
  unsure (1)..(247): unsure at all n locations; Clone ID: 701140487H1
cncatatctccatttccatttcctcanctctcagtttccaagnatcttaagnnaaanggaaaancttacccaaccgtgagcgntgnttaccagaaggccgttgagaaggcgaagaagaagctcagaggcttcatcgctgagaagagatgcgctcctctaatgctccgtttggcatggcactctgctggaacttacgangtgagctcgaagaccggtggtcccttcggaaccataaagcacccctccg

SEQ ID NO: 51740 - DNA, 268 bp, Glycine max
  unsure (1)..(268): unsure at all n locations; Clone ID: 701140488H1
gagggtgttgcctttgcttacaatccttgtttcctttggagtgttcttctacttgcaggattcttacacagcacagttatnttcctctcataaagttaccnccgggataagtgcagccttcttccccatcgccacttctggntatccagcaaacgtattgtgacnccacaagggatcatttctggttcagtggagataaatgatgggaaaataatatctgtcgttgagggacatgctattcaggggaagcctaagcaagaagaagtaa

SEQ ID NO: 51741 - DNA, 266 bp, Glycine max
  Clone ID: 701140489H1
caaacctgatgtatttccttgtctatcaagttgttctgatagtaaagcaaccaaggctggttatagacctagtgctaattttaaatctagtgatgaatctctaatagagactagggctgaaggggaatttaggaagagaattgatcatagctgtgctgtgcttgcatcagcggcgcaaattgaaaatatatctggaagtggttcagtagtaagtcaatttgaagctagacaggctgatagtgcacaagatagtacaagagatcaaa

SEQ ID NO: 51742 - DNA, 264 bp, Glycine max
  Clone ID: 701140490H1
ccgcacgaatatcttgttgtttggagcgatccgagaaaaactctgtaaacatgttggtttaccaggacctccttacaggtgatgagcttctctctgactccttccgttacaaggaaattgagaatggaatgctgtgggaagttgaggggaagtgggttgttaaaggagcagttgatgtagacattggtgcaaacccttctgctgagggtggaggagaagatgagggagttgatgatgcagctgttaaggttgttgacattgttg

SEQ ID NO: 51743 - DNA, 259 bp, Glycine max
  unsure (1)..(259): unsure at all n locations; Clone ID: 701140491H1
ctgtaacaaggcaacccacaaacaagtgttattggtgtnggagcaaacctgcaagagatttccatcagttaatttnccttaaggttagcaattttgaagtgccctaatattcttaataaaaactagttacactgtctcttataattgatttacaatattaggttgagattgaagaccacccttacttggcaaaatcagaaggtgtgaactgcatcccagcttttaaaatatacaagaatggatcaagggttaaagaaat

SEQ ID NO: 51744 - DNA, 259 bp, Glycine max
  unsure (1)..(259): unsure at all n locations; Clone ID: 701140492H1
gttctactttgcctattgcaacatatcctatagttagcttcttagttcttacantacatacatgncnagttgacttagttcttgctctccccactcaaaattccgctnaggaattcaagcttaacaagtcgaaacagatagtgagtttacagttatggagagccagttgcggttcagaaagcgaaaaacgtgtcaaacacaataagcgcagttcgaagagtcctttggacattttttgaaacctttgcctttactagtt

SEQ ID NO: 51745 - DNA, 270 bp, Glycine max
  unsure (1)..(270): unsure at all n locations; Clone ID: 701140493H1
atggacgcnggcggaaagatcaagaagggcgccggaggaagaaagggcggcggccctaagaagaagccggtttcaaggtccgtcaaggccggtctccaattccccgtcggaagaattggccgttatttgaagaaaggaaggtacgcccagcgtgttcggtaccggtgctcccgtttacttggccgcagttctcgagtacctagctgctgaggtgcttgagttggctgggaatgctgcacgtgacaacaagaagaacaggattattccgag

SEQ ID NO: 51746 - DNA, 271 bp, Glycine max
  unsure (1)..(271): unsure at all n locations; Clone ID: 701140494H1
cttgtctccgaattagttatcttgagaaacattattcccattgctatatattatggctnccatgaaggttacatgggtggttgtnatcatgtgcatggccgtggtgggtgcaccgatgatggcgcaagcatggacatgcaatgatgtgacggtgaacatggcacagtgcctatcctacctgatgcagggaggaacaccttcaacactttgctgcagcggagtcaagaacattcttggctctgctgtcaccaccgttgacaaacaaactgtg

SEQ ID NO: 51747 - DNA, 272 bp, Glycine max
  unsure (1)..(272): unsure at all n locations; Clone ID: 701140495H1
gtccctccccttccgccgaggaacacaaacaacaacctcaacttaacgcattgtgtgcatgatggaggagatgaaagtttctcggcgggtggagtggtggcagaacatgatgttccccgttcggagggtttggtttgtcgttgccaagcgcctcggcattcgcaanactgggttactgaagctaagtaatgatgtgagggcatgcgaatatgaggacattcaagtgatgtgggagatactaaacagaaacgaatcagagtttggtcgttctt

SEQ ID NO: 51748 - DNA, 276 bp, Glycine max
  Clone ID: 701140496H1
cgaggagaaagatggaggggaaggagcaggatgtgtcgttgggagcgaacaagttccccgagagacagccgattgggacggcggcgcagagccaagacgacggcaaggactaccaggagccggcgccggcgccgctggttgacccgacggagtttacgtcatggtcgttttacagagcagggatagcagatttgtggccacttttctgtttctctacatcaaccgtcttaacccgttatggggagtcgccggggctaattctaagtgtagttacct

SEQ ID NO: 51749 - DNA, 284 bp, Glycine max
  Clone ID: 701140501H1
ggtcaaggcccttttacttgttcgtccggttgttcccatcttctctctcgtaccaatcaaatcacacttttgtgttgtgttgggaaaccctaaaccccgttttcggtgagatcgagatcgatcgaacatggatgaggagtacgatgtgatcgtgttgggcacgggtctcaaggagtgcattctcagcggtcttctctccgtcgatggcctcaaggttctgcatatggataggaacgactattacggaggagaatccactttcgctcaatcttattcagctttgg

SEQ ID NO: 51750 - DNA, 279 bp, Glycine max
  unsure (1)..(279): unsure at all n locations; Clone ID: 701140503H1
ancgtcaganatcactgtgcacagaacgtgaagtgcccggttttgattgttaagaagctccaaaccaaccaccggagnnnnnnnnnnnnnnnnnnnnnnnnnnattaatcgttactagctttgtttttatgtaaaaaatagacaaccagtttgcttctgtcgcttatgtgttatttgggctctgtgtgttttgtttgtttctcctctaaaggaatatctcgccaaatattaaatgttaaaggctaagtgaagatgaggatgcacgcctttggttttgac

SEQ ID NO: 51751 - DNA, 215 bp, Glycine max
  Clone ID: 701140504H1
ggcagccgaagaagagaacgttcaagaagttcagtttcaggggcgtggatctcgatgcgcttctggacatgtccaccgatgaactcgtgaagatgttcagtgctcgcgcacgtagaaggttccagagaggcctcaccagaaagcccatggccttgatcaagaagcttcgcaaagcgaaaagagaagctccaccaggtgagaagccagaacctgtc

SEQ ID NO: 51752 - DNA, 276 bp, Glycine max
  unsure (1)..(276): unsure at all n locations; Clone ID: 701140505H1
tggtgttgttactgctgctcttttctcttttcttttctctttagttctctcttcccctnnnnnnnnnnnnnnnnnnnnnnnnngagcttgtttaagcttttcttccattaacatattatcacaatgtgtggtattcttgctgttcttggttgttctgatgactctcgagccaaaagggtccgcgtgcttgagctctctcgcagattgaagcaccgtggccctgactggagtgggctccatcaacatggtgactgctttttggcacatcaacggtta

SEQ ID NO: 51753 - DNA, 280 bp, Glycine max
  unsure (1)..(280): unsure at all n locations; Clone ID: 701140506H1
ggttcccgtagatgtcgccggcggtgaccagaaaagtggatctgattattaactcagaaaaatggaacatncagaagagcgggagcaagctaaccagaaaccactcctcgcttctccgatcctccgttcacaacctctcttccatcatcacccaacacgaacacgaacaacaactcctcctcgatgttcacgacgatgacgacaagaacaagaagcccaagaaaccccacgtccaggctcaggcccaagcccaccatgcccaggccctggcccacaggtc

SEQ ID NO: 51754 - DNA, 278 bp, Glycine max
  unsure (1)..(278): unsure at all n locations; Clone ID: 701140507H1
gggaacccggttccagttcaaggtggaactactgttatcgcctttgttaaggatcctgatggttatacttttggacttatccaaagacctacagtccatgacccattttgtcaagtaatgcttcgtgttggtgatttagagcgctcaattaagtntnatgaaaaggctttgggcatgaaggtggtgaggaaggttgataagcctgagtacaagtacactatagctatgctcgggtatggagaggagcacgagacaactgtgttggagttgacatataa

SEQ ID NO: 51755 - DNA, 275 bp, Glycine max
  Clone ID: 701140508H1
gtttgcagtacgttgagcataccagagtctgagatggaaaacggggatcagttccaggaaatttcaaaggggaaatatgattgtcttttatttgatcttgatgacaccctttatcctttgagttctggattggctgagcaagtgaaaaaaaatattcaggagtacatgcttcaaaagctttggatatcagaggctaaagttcctgagttgtgcttttcattatacaagacttacgggacaaccatggccggtctcaaggctattggctatgactt

SEQ ID NO: 51756 - DNA, 257 bp, Glycine max
  unsure (1)..(257): unsure at all n locations; Clone ID: 701140509H1
aaaaaaatcacctttcccttattagggttttgaaatgtggagngagaatggacngctctgaatccgattctgtgtcactttccatttccaatggcgaanagccccaattggggcgaccttcttcccccgccgctcctcctgagccgtcagatctcaatcatgcggcggaggaagagacactctccggggagcttcagagcaagttggatttgaaggatgtggatgaaagtgaggagaaagtttcggactttaacgag

SEQ ID NO: 51757 - DNA, 267 bp, Glycine max
  Clone ID: 701140510H1
gttgtgttgtgtacttgtgttaattgtgttgttgttgtaggaaatttaagtgaagagagaatgatgatgaagtctgctatgtgtgcattggtgctgtggcactggttgtggttgaagtggggcccatggctgaggctgcggtgacttgcaacccaacacagttgactcctgtctccggcaattaattcaggttctgcaccttcgagtgcttgttgccagaagctgaaggagcaaaagccatgctctgtggctacctcaaaaacccta

SEQ ID NO: 51758 - DNA, 270 bp, Glycine max
  unsure (1)..(270): unsure at all n locations; Clone ID: 701140513H1
ggaacccggttccagttcaaggtggaactactgttatcgcctttgttaaggatcctgatggttatnnntttggacttatccaaagacctacagtccatgacccattttgtcaagtaatgcttcgtgttggtgatttagagcgctcaattaagttttatgaaaaggctttgggcatgaaggtggtgaggaaggttgataagcctgagtacaagtacactatagctatgctcgggtatggagaggagcacgagacaactgtgttggagttga

SEQ ID NO: 51759 - DNA, 271 bp, Glycine max
  unsure (1)..(271): unsure at all n locations; Clone ID: 701140514H1
caacgttgtagagggagacttttgggggagagtgagtgagagtanaaagatgtttcngcgtgcggtggcgcggccnttgatggcgaaggtgaaggcttcgacggggatcgtggggctggacgtggtgccgaacgcgagggaggtgctgattgggctgtacagcaagacgctgaaagagatccagaaggttcccgaagatgaagggtaccgcaaggccgtggagagcttcaccaagcacaggctcggcgtgtgcaaggnggaggaggactgg

SEQ ID NO: 51760 - DNA, 278 bp, Glycine max
  unsure (1)..(278): unsure at all n locations; Clone ID: 701140518H1
accagttttaaactaatttaaaaccacttcagaaccggttcggttctgaaaagaattataaactggttcgaaactagttcagttcagaactagttcaaaactggttttctaaaccagttcagtttcaaactagtctgaaaaccagttcgcagatttgggttaaaaacaaaactagttaaaccagtttgaaaaccagtttggttcggtttttttccaaaccggttnttgcancagccctcctccacacaacatacgattttcanngnncncngncnnnc

SEQ ID NO: 51761 - DNA, 277 bp, Glycine max
  unsure (1)..(277): unsure at all n locations; Clone ID: 701140519H1
ggttctggttcgagtagcagagaagcaaggagaagaaaggcgaggtcgacgtcaccagtgaaggaccgatccaaaacctcttcatctaagttaannnnnnnnnnnnnnnnnnncaaacgaagcacctcaccctctgccactctcctcgacgtcgatgatgacgtcacctcactctttcacgattaccctagccctaaccctaaccctaatcctaaccctcggagcttccctcacagcgttaagcagaaatgctgggaaaaggccgacaaagtcaaag

SEQ ID NO: 51762 - DNA, 268 bp, Glycine max
  unsure (1)..(268): unsure at all n locations; Clone ID: 701140520H1
gaagtttctgaaaccaaacaaagccgtcatcgtccttcagggacgctacgccggcaaaaaagccgtgatagtgcgaaccttcgatgaaggcacgcgcgagcncccctacgggcactgcttggtggcagggataaagaagtaccctgcgaaggtgatcaagaaggattcggccaagaagacggccaagaagtcgcgtgtgaaggcgttcgtgaagctcgtgaactaccngcacctcatgcccacgcgctacacgctcgatgtcnatttg

SEQ ID NO: 51763 - DNA, 276 bp, Glycine max
  unsure (1)..(276): unsure at all n locations; Clone ID: 701140522H1
atatggacataaattttgagataggggaanagtntaatagtgattccctttatttattgcagaatgatatcagcttccaagataaatccaatggtctggattncatctagtcacaaagagctnattgattgtcctaagaaagacgaattatttaatggtttatctactacatacctttatgtctccccaaccagctttgatgtggtagcttcaacaaggagaccctttgcggtcaaagattccctttgtaacatggatggtgttgtctttacagat

SEQ ID NO: 51764 - DNA, 274 bp, Glycine max
  Clone ID: 701140524H1
ggaggccctgattatggagtactcagctgggataacaagcttgctggtgctcaggttcttctgagtcgtttgaggttattcttgagtcccgggtatccatatgaagaaattttaaagacctttcacaaccagacaagcataatcatgtgctcctatctaccagttttcacaagctttaatagaaccaaaggtggcttgattcaattaaaccacggtaggcctcagcctctccaatatgtggtcaatgctgccttttggctgccctttatagtga

SEQ ID NO: 51765 - DNA, 273 bp, Glycine max
  unsure (1)..(273): unsure at all n locations; Clone ID: 701140525H1
cctccatggtgaagcttatgcttttctctgctctcatactcttgtccttgcaagcagttgtgtctgtaacaccactgcattttcaacatccactagacccnttaaccaaacaagagataagtcttgtccaaaccatagtccaaaacaagtacccaagctcaagtaacaggttgagcttccactacattggactcngcgaacctgaaaaggatgccatcctcaaatgggaatccatcaaaccaactgttataactgtccctcgcaaagccttgg

SEQ ID NO: 51766 - DNA, 268 bp, Glycine max
  Clone ID: 701140527H1
ggaaaatcatggttggacttggtgtgagtgtaagtctcaaggttggacatgtgtgtagttgcagcaatggttttggcacggtgactatggaagctcaaaaacaaaaactctctccctccaaaacccgcaggaaatcctcctacggaacttctagaaggtccgttctgaagaaatccttcagccaagagcaagtcaccttcacctctcctctctccgccgaccccctcgtcgccctcatcggcggcggcatctccggcctcattgcgcc

SEQ ID NO: 51767 - DNA, 267 bp, Glycine max
  unsure (1)..(267): unsure at all n locations; Clone ID: 701140530H1
gatcctctgtcctctcgangctttcatcgttnaatatattcctcatcatntcagtcntgggcctgctntcttgttttaggtctaccgtccctgagaaaatgttccaaangaagctctggcntgtcaagattcctntatnccgaacaattttcaacgaaacttgatttcgtctggtggcaatgaatcgtattatgggtattttaacaggagatcatacacttcactttatatgggaatggaactgtgggtgggatacaagtgctagaa

SEQ ID NO: 51768 - DNA, 258 bp, Glycine max
  unsure (1)..(258): unsure at all n locations; Clone ID: 701140531H1
aatcgntcgaggggattggagtcattggttgatgannggggaggcacaggncccatggcaaaagccattgctaaatcattccctcgggtggaatgcattgtgtttgatctaccacatgttgtttctggcntgaaaggaagtgagaaccttaaatatgtttcaggggacatgtttgaggcaattcctccagctgatgccatctgttaaagtggatattgcagactggaatgattaggagtgtgtggacatattgaagaa

SEQ ID NO: 51769 - DNA, 264 bp, Glycine max
  unsure (1)..(264): unsure at all n locations; Clone ID: 701140532H1
ttcacagngaagtcgtagnagggtttcaaaagatngagaacaagcagatcttctggcaattgggcgatgaactccgtggacactcaaaagcatcggnggatcacaaatggttaatggttgcttcgaaattggcggaacagacaagattgaagggggagcgtgtgaacaacctgatctttcaaagggccccattgaaacaaggtcaagggataaatttgggttccaggaagagaacaaatttgattccttanntaagcatgttga

SEQ ID NO: 51770 - DNA, 276 bp, Glycine max
  Clone ID: 701140533H1
gggaacctgttaactgcctatggctatggagcgccagaatttgagtctggaatttacacataccaaagtgatgtgtacagctttggagtgatcatgttagaacttttgactggccgtcaatcgcacgatagggcacgagcacgaggggagcaatttctggtcagatgggcagttccccaacttcatgatatcgatgcattatcaaggatggttgatcctcattaaatggaaattacccagcaaaatcatgtcaaattttgcagacattatctctag

SEQ ID NO: 51771 - DNA, 277 bp, Glycine max
  Clone ID: 701140534H1
cacaaatgataatcatctctactgaccaaatctgaagaaaattgctttctctttggttcctagctcgcactctctctacgcacgcctcaacatcccttctctgctccattcattatgtctccgtcgttggatcttccccccaagggtggcttcagttttgatctatgccgaagaaacgcaatgcttcaaaacaagggcctcaaagccccaacctttctcaaaactggcaccactattgtcggtttagttttccaggatggtgtcattcttggggctg

SEQ ID NO: 51772 - DNA, 272 bp, Glycine max
  unsure (1)..(272): unsure at all n locations; Clone ID: 701140536H1
gttgcgaagcgagcaaccagttaaggaatctgtggagatgggagttcaaaatgtagatgttggtaagttcatcaatgttgtgagggatgatttggaaatgangaacataacctctcctttgaccacccacaaatcttcaacttgctctgatgctgcaagcttgaaatcagacatttctgatcagctgcaaatgaagaacttgaacactcctccaatccttaaatcttcaagtttctctgatgcttcgagcatgaaatcaagcattctgatca

SEQ ID NO: 51773 - DNA, 269 bp, Glycine max
  unsure (1)..(269): unsure at all n locations; Clone ID: 701140538H1
anaagagtaagttngtagctgatggnncnnnnttcgctgaactgaacgaggttctgacaagannanttggccgagganggttactncggcgtggaagttagggttacgccgatgcgcaccgaaatcataattagagccacnagaacccaagctgttntcggtgagaattgaaggagaataagggnattacctctgtggttcagaagaggttcaagtttnccgagaacagtgttgaanttatgntgaanaggtcaacaataggggtntta

SEQ ID NO: 51774 - DNA, 144 bp, Glycine max
  unsure (1)..(144): unsure at all n locations; Clone ID: 701140539H1
ctatccaacaaaaacaaaacancaaaagaaaaacacaacacaacacattctcnttctctttagtttttattttttctctctctatagtttactctctctatgcaatgtaggtcgccggaggatggcaaactaccacacaacata

SEQ ID NO: 51775 - DNA, 270 bp, Glycine max
  Clone ID: 701140540H1
gtgatgaaaatgaaggtccttgttttcttcgttgctacaattttggtagcatggcaatgccatgcgtacgatatgttccctctccgaatgaacactggctatggtgcccgtactccggaggtgaaatgcgcaagttggaggcttgctgtggaagcacacaacatctttggcttgagaccattcctgaagagtgcgttgaagcaacaaaggaatacatccatggcgaacaatatagatcagactccaaaacagttaaccaacaagcttact

SEQ ID NO: 51776 - DNA, 268 bp, Glycine max
  unsure (1)..(268): unsure at all n locations; Clone ID: 701140541H1
aanaactgtgtcctttcccagttttaaggaaattgcttcttccgggctggttgttctaaatctgcttcgtccaagatcggaacttacaattgctttgcttctcagtcctcccctctaccgagccacaaccctagttaccgtgatgacgagtatgctgatgtggactgggacagtcttggatttggactgatgcccactgattatatgtatattactaaatgttgtgagggccaaaattttggacaaggacaactcagtcgttatggga

SEQ ID NO: 51777 - DNA, 256 bp, Glycine max
  unsure (1)..(256): unsure at all n locations; Clone ID: 701140544H1
ttctggtataaagcagattatggcctgtttcgtttctgcatagcagatagtgnacatgactggagagaaggatcagaacaatacaaattcattgagcattgtcttgcaacagtagatagaaagcatcaaccatggctaatcttttcagctcatcgtccccttggttactcctcctaatctttggtatggcatggagggttcattgaagagcccatgggaagggaaagtttgcagaagcttggcaaaagtacaaagt

SEQ ID NO: 51778 - DNA, 257 bp, Glycine max
  unsure (1)..(257): unsure at all n locations; Clone ID: 701140545H1
ctatcctcaactagtgaaattccttcttctctttccacacaacatacnacnnngnannganncaattncngttcccanaaataatncccgagagaanntgaaagaagttgaaatngttgagtgatacaattaccgacagcagacgggcancagtggaggnggaaaattaatatttagagntgnaaacttggtctganctcttantgaactcttggaattaatactatcccgtattaagtctagatgataatgttcga

SEQ ID NO: 51779 - DNA, 131 bp, Glycine max
  unsure (1)..(131): unsure at all n locations; Clone ID: 701140547H1
agcgtatnnggcagganttcgntgtagaganatacanatatatctnatgagttggcattaaatttgtggtnnttaagtgtgagatgactatttctgtttgtgattaatcaaagtacgtccanacancanac

SEQ ID NO: 51780 - DNA, 275 bp, Glycine max
  unsure (1)..(275): unsure at all n locations; Clone ID: 701140549H1
tnaaatggtgggttatcagaggaagaaaaggagcagatcaggtattctcaggttcactgtaaaaaggactttaccttcgttgaaagggtaaataggagatacgtaaatgtactccgggggcttgaacttcacactggagttttcaatgctgtggagcagaggaaaattgttgagtggatttacagattgcaatggaggggacaacaagggaaactgaaagatccgaacatattcagaaccaagaaagtggatgcgtggtaagggccgcgtgacaa

SEQ ID NO: 51781 - DNA, 263 bp, Glycine max
  unsure (1)..(263): unsure at all n locations; Clone ID: 701140554H1
aaacaaactatcttactctagaattaaacatcttgtatattaggtacattcattattgtgaaccatttattgttttgtttccacacaacatacgantgccatgnnttagaatgtnnccntantantcttatttgtgttgnnnttaaaagaagntttacgcctttatagtcttcggttgtgnanaaaanntccaaaagttctttttcataggaattggnttgattttctcaatcaaaattcctcnnatttcatgttctatgatc

SEQ ID NO: 51782 - DNA, 268 bp, Glycine max
  unsure (1)..(268): unsure at all n locations; Clone ID: 701140556H1
accctgtatggngtggcgaatggcgctgtggtctcaaattttatgcatagtcactctgctgttatgcagcgattgtgcagcatcttttgccaaggagcagcaaaaggaccgggttggtaggctcccaggtcaaggcttcaacatcagcttcgcacactatgctgggtacatcaccgtcnatgagaaagctgggagaacactcttctactggttcattgaggcacttgaagatcctcattctaagccccttgttttgtggctcaatgga

SEQ ID NO: 51783 - DNA, 266 bp, Glycine max
  unsure (1)..(266): unsure at all n locations; Clone ID: 701140557H1
gaaattggagaganagcaaaattccttgccagaagatagtcatgcagatggaaatgttaatgataactccattttgaacagattgaagtcaacttatagtcgtactactagtacaagaaaatctgctttgaccagtgctgaatatactgataacaggaactcaaaggttcataattcttctatgatgagtagattgaagtctagttacagccgtgctactagtgtgaagaagccacaaatacctacaactgtggaagaaaatacta

SEQ ID NO: 51784 - DNA, 141 bp, Glycine max
  unsure (1)..(141): unsure at all n locations; Clone ID: 701140558H1
gtactctttgccatttatgttcaagcntannanaacaaacacaaaaggttcannaacaatgaccactgtgtgatcattcttcattagcattcaaccctcaactgcacctttttgttctttcttcttcctctcntgcacnnc

SEQ ID NO: 51785 - DNA, 266 bp, Glycine max
  unsure (1)..(266): unsure at all n locations; Clone ID: 701140559H1
agatcaccnaagcgaaatgttttaatggaaaganattctttcacttcaccagtgaaagattgcctttcttccctgtatcatccttaagtcaaaactacccccacctcctttgcagtcagcatttgccagcccaacaaagcccaatccaggaggtggnggggaaacatgtgcagaaactgggatcaacattttttttggcaagatcatcaagttgggagcagtcagaataagtggcatggttganaggctacaattatctcagcaaa

SEQ ID NO: 51786 - DNA, 263 bp, Glycine max
  unsure (1)..(263): unsure at all n locations; Clone ID: 701140560H1
tttccacactgcataccttangtcttccgaattcgaagttaatttgcaagatggctaaggaaaaggctcagatcaacattgtggtggttggtcatgtggaccctgaggaggcaaccaccattaacgagctgaagaagcctgttgtggagaaagaagctccagggcatgccatatgagggcatgcacgtacggcctcggaggggaaccagaaaattatgttaacaaaataatctggaaccctaatgtatcagtgtcatcatcag

SEQ ID NO: 51787 - DNA, 260 bp, Glycine max
  unsure (1)..(260): unsure at all n locations; Clone ID: 701140561H1
acnccatcnccaaagggtttcaggttgaaataagtgatttgttataatcaacatgtcatctccacacnanatacgacnnccaaangtaatgaaactgangatgagngattanacagtggaganttaaatgatggattcaatgagttcaangtggagtttcatggtccaaaagaaagcctttatgaaggnggagnctggaaaattcgggttgagcttccggatgattanncatacaaatccccntcnaaggcttngtgaaa

SEQ ID NO: 51788 - DNA, 216 bp, Glycine max
  Clone ID: 701140564H1
tgaagccatcgatgctcagatctctccactccgccgccacccgcggcgcctctcatctcttccgccgtgggtacgcctccgagccggtgccggagcgcaaggtagccgttctcggcgccgccggcggggatcgggcagcctctctcccttctcatgaagctcaatcccctcgtttcgagcctctccctttacgatatcgccggaactcccggcgtc

SEQ ID NO: 51789 - DNA, 253 bp, Glycine max
  unsure (1)..(253): unsure at all n locations; Clone ID: 701140565H1
caggtgtacgcagattattatgacacngcagctgctacaggtncagggaaggagggcgtggancataggtcctctttccctgtgcaaccaagacaaaggcaagcgaggaaagcaagcttccgttgaccaaggagacattttgaagtggctggactccaagaaagcaaattcggtggtgtacgtttgttttggaagcatagccaacttcagtgaaacttcagctgagagaaatagcgagggggcttgaggattc

SEQ ID NO: 51790 - DNA, 273 bp, Glycine max
  unsure (1)..(273): unsure at all n locations; Clone ID: 701140566H1
cacacncttccactttactctctctctctgncagctaaaatgnaaggnaggaatganatcatttttgtcanatgggaatgtcattagaaatgctgttctacaacgcgtgcgcatngtgaaccccctgctacagacaattgcctcttcgcggtttgaatctgttacgcctgctcgcattgaggagcatggttttgngagcaccacaatttcagacatcttgaatgacaaaggcaagggtgctgatggctcctcgctttggtgcaccacagatga

SEQ ID NO: 51791 - DNA, 270 bp, Glycine max
  unsure (1)..(270): unsure at all n locations; Clone ID: 701140567H1
caccgtcanacggatctttctgcagccaccgtctatngcactncngttncgcgnccattggcgccggaattctgaatgtnaatgaattnntnnagtaatgancgantggaagaactatccaataacatganatgaacngcaaatattgtanacttganggntaaganagcttaaacaatacaaggatgtttttnntgttttatggactatggaagtacttgttcagcaagatggagcttcatgtactcatctggggattgacaaggcggc

SEQ ID NO: 51792 - DNA, 272 bp, Glycine max
  unsure (1)..(272): unsure at all n locations; Clone ID: 701140568H1
ggcgttctatatattattgaattgacaatgaggcctgctccttgctttgcttcctgcttctatttgctttcttgttagctgccactacagaatcaagancnagatacangggaatattggaaaatgatcatgaaagatcaggaaatgccagaaggacttcaaggtcttgtttcatttcaatctgaaaataaccctaagactcaagagcagcttggtaaaggttccaaaaaccattgtgaagagtctctagttacaaatacacaagttaatag

SEQ ID NO: 51793 - DNA, 265 bp, Glycine max
  unsure (1)..(265): unsure at all n locations; Clone ID: 701140573H1
cgaacctgtttaattcccccaaatcggaagttnatcctgaaaccctaaatagcccttaacgttgtgtctatgtttttgaattatggacgcgaaggatatcctgggattgcccaaaaactcgttcccatctctcgagaagaaatctcgtcctcccaaagagtctcaaagaaaaccagatggcatttcgngcgaggtgtatgcgcttacgggcggattggcctctctcatgcctgcaattgaagcctctcagttgaagaaaaagcct

SEQ ID NO: 51794 - DNA, 264 bp, Glycine max
  unsure (1)..(264): unsure at all n locations; Clone ID: 701140574H1
gagaatatgaagttgtttgtnttctttgttgctgcagtagttttggtancatggccatgccatggcgcaggctaccaaaggttccctctccgaatgaaaactggctatggtgagcgttcttcggaggtaaaatgcgcaagttttaggcttgctgtggaagcacacaacatccgagcgncaaaaaccattcctganagagtgcgttgaaccaacaaaggactacattaatggcgaacaatttagatcagactctaaaacagttaa

SEQ ID NO: 51795 - DNA, 263 bp, Glycine max
  unsure (1)..(263): unsure at all n locations; Clone ID: 701140575H1
gtgaaggtgaattgctgaagagatagcagatttttgaaggaanatgaataactctgtttcagaaaacagtttcatcattgagagtgatgnanaagatgagnagaaggatttgaataaaggtggagttgatggaaacgattctgattcttccaattactcaaatgaannaccctccacagcgaaagcccatgnttacaacatttcatggcctcagagttacaggcaatctattgatntatatagtagtgtgccatcaccaaaca

SEQ ID NO: 51796 - DNA, 260 bp, Glycine max
  Clone ID: 701140576H1
cgatctcagattccggtcactcctctcgccggcgatcccttattcctccgtcctccgtcgagtcctttccgattcgaatcgttcccagccttgtgccaccatgaatcccgaatacgattatttgttcaagcttttgctgattggagattctggtgtaggcaagtcatgtcttctcctgaggtttgctgatgattcataccttgacagctatatcagtaccattggagtggactttaaaatccgcactgtggagcaggatg

SEQ ID NO: 51797 - DNA, 262 bp, Glycine max
  unsure (1)..(262): unsure at all n locations; Clone ID: 701140578H1
agctctggtggatgacgtgctttctctaacaactgctcttagaanagagagagagaatggcggtngagtacacatgctgctncaacggcgttcttcgttcacatagtggtaatcgtgctgctgntgctnttcgcgggcctcatgtcgggcctcaccttgggcctcatgtcgctcagcctcgttgatcttgaggttctcgctaagtccggcactcctcagngatcgtaaacacgctgagaagatattaccagttgtcaaaaac

SEQ ID NO: 51798 - DNA, 263 bp, Glycine max
  unsure (1)..(263): unsure at all n locations; Clone ID: 701140580H1
ccaatcgctcccaaaatcttttctaatttgttcataactcaataattctcatcatgggctccttgattgttccaggtgaacatgatcancaaactaaagcttgtttctcttccctttgtatcaaccagtcacctcattcccgtagtagacatagctaggctctttgccattcatggtgttgatgtcaccataatcaccaccacagccactgccgccattttccaagtctatcgatcgcggaacgtgaccgcggccacgtatta

SEQ ID NO: 51799 - DNA, 268 bp, Glycine max
  unsure (1)..(268): unsure at all n locations; Clone ID: 701140581H1
ctggaagtgtctcattcaacaatagaagcctgcatgctattggaagtacacctaacccctatgagaaagccatctctattattggcaagactctggctccttttgatgatgacaacttgattccntgttttggctttggtgatgccaccactcatgatcaagaagtgtttagctttcacagtgataattcaccttgccatggttttgaggaagttttagctgctatcaaaaaattgttccaaacttgagactgtcaggaccaacatct

SEQ ID NO: 51800 - DNA, 269 bp, Glycine max
  unsure (1)..(269): unsure at all n locations; Clone ID: 701140583H1
cggngctncaagagccttggttcatcagcacagatattttctggtgcgttccctgagaattatgaacctcccagtaatttctactatgaagtaaatgacgattctcccattgttcaggatgatgtcagtttatnttgattacaatgtccctgaaagagtaaatgagtttgtggcagctgcaatatcacaggccaatattacgcnccacaaatcatataatgtggacaatggggacagatttcaagtaccaatatgcacaaacctggttt

SEQ ID NO: 51801 - DNA, 267 bp, Glycine max
  unsure (1)..(267): unsure at all n locations; Clone ID: 701140584H1
atttttcccaaatccccaagagagaaaaaaaaaatcacacaatttctgtnaagctaaagcttgtggtttctttctcattctctcaaccaaaggtgaaagaaagaagagagtgagagaagagaaggtcctgaggtaaagatacaagctttgctcttctgctcactggatcgggttccaggaattcaagggtaggttcaaaaggggttgtgttgatctgcaccaagatgcttaattcgcgttgaaaaatccattcatttgcnngactta

SEQ ID NO: 51802 - DNA, 247 bp, Glycine max
  unsure (1)..(247): unsure at all n locations; Clone ID: 701140585H1
gcagcatttaccttcgtttctgtgactagatctgcgtctganccatttcttccgaaaacnatgncgtttcactggcagttgctgcaacgcccggacctccacctctcatggtcccnnctcactcttattcagggagctgcttccaaaggagccgtctgtttggatggaacattgcctggttaccactttcatcctggatttggatctggggcaaatagttggctcattcaattggagggaggaggat

SEQ ID NO: 51803 - DNA, 91 bp, Glycine max
  unsure (1)..(91): unsure at all n locations; Clone ID: 701140586H1
gttgtcaccccntcttctatttctatgcctaantcttcctttgtttttgttgtccttcttcanataccgtaaaaccttcaagaatccacca

SEQ ID NO: 51804 - DNA, 85 bp, Glycine max
  unsure (1)..(85): unsure at all n locations; Clone ID: 701140587H1
ctcaagaagatggagaaagcgatcaacagacagaagattnntggcttcatcatctcaacccttncatcatccatnacaacatacg

SEQ ID NO: 51805 - DNA, 265 bp, Glycine max
  Clone ID: 701140588H1
gctagggttattgttgcaattgagaaccctcaggatatcattgttcaatccgcaaggccttatggtcaaagagcggttctgaagtttgctcagtacactggtgctcatgctattgctggaaggcacactcccggtaccttcaccaatcagcttcagacttcgttcagtgagcctcgtctccttatcctcactgatccaagaacagatcaccagcctattaaggaagctgctcttgggaatattcccaccattgctttctgtgaca

SEQ ID NO: 51806 - DNA, 260 bp, Glycine max
  Clone ID: 701140589H1
ctcgctcctcaccgttaactcctcctcgttcgtggcggactcgtatggctatatggttgcatttgctggccacagatatgcagcaaggtcgcctcctgcttttgttgcaaacggcacatatactgttaccagttttactcttgtccttgagtttaagagaggcaggctgcagaatttatattggaaaagagatgggtgtgctaaatgctcgagtaactcgaaagctgtctgtctcaacaatcaggattgcgcactacaaa

SEQ ID NO: 51807 - DNA, 241 bp, Glycine max
  unsure (1)..(241): unsure at all n locations; Clone ID: 701140590H1
tttctctcccccaaaaanaagagaaancnttngtttnattcttncaaggcngtttgaagaaanccaaaggtgtagttttgttttaagtttcnttgacatggttttcatgtctgagatantgttcccagaagnaaaaattgaggncggagagtgggagaagnagagataagannaagagaagaatacctacccagcaagcagaattagaganttttttttcacaaactgttgannngantca

SEQ ID NO: 51808 - DNA, 261 bp, Glycine max
  unsure (1)..(261): unsure at all n locations; Clone ID: 701140591H1
anctcttcctccccctctctttcacgcagccccactcccaaacccaagaaagatcaaaacaaaagcaagcgtcaacacgaggaagagttgaaactattggaagaagagactgcaagaagactggaagaagcaattcgaaaaaatgttgaggagaagcttaacacagaggaagtcaagttagaaatagaaaagcgcgtanagagggagtgaagaaattgtttgatgatgttgaagctcaacttgaaaaaganaaggaagatg

SEQ ID NO: 51809 - DNA, 235 bp, Glycine max
  unsure (1)..(235): unsure at all n locations; Clone ID: 701140592H1
ctctcacacccccaaaagcttcttctgtgcccgtgcaggcaatttttctttggtttggttgcatcttttgatctgatcaacaagtttgagaattcagtttgggaaaggccattcctctttagtacaananagattgagggtgcctttgtgctgatggccactaatgaaaatcttccaccaaatgtaattaancaacttgccaaggagttgaaaagtcttgatgnatcccctcctg

SEQ ID NO: 51810 - DNA, 262 bp, Glycine max
  unsure (1)..(262): unsure at all n locations; Clone ID: 701140593H1
gcantgactcacacccacaatagtcgggggcagnttcaaagtacctccacattgtctcctanttgttantgttcnctncctcttntcatcatttttattttttccaatcaaancaaacaanacataagcaccgctcttttctctccgaaatccccatctcccttcacttctgagctctggacgagatcccagatctnaccatctttcacgcactcttccatcngattcaccctttcgtttaacgcaaactcataacttgaag

SEQ ID NO: 51811 - DNA, 261 bp, Glycine max
  unsure (1)..(261): unsure at all n locations; Clone ID: 701140594H1
ctccggtgaagagaagaagatggcgaccgtaccaggacagctcatatgggaggtcgtaaagaagnccaactctttcttggtgaaagagttcggaaggngcactcagagcgtgcagttcagcagagagccgcacaatctctacaacctcaacactttcaagtactccggtttggcgaacaagaaaactgtcactgttcaacctgcgggtaaagaccantctgtgttgctggcaacaaccaagacaaagaagcaaaacaagcc

SEQ ID NO: 51812 - DNA, 264 bp, Glycine max
  unsure (1)..(264): unsure at all n locations; Clone ID: 701140596H1
tctcttcctcccnctctctttcacgcagccccactcccanacccaagacagatcaaaacaaaagcaagcgtcaacacgaggncgagttgaaactattggaagaagagactgcaagaagactggaagnagcaattcgnaaaaatgttgangagaagcttaacacagaggaagtcaagttagacatcgaaaagcgcgtacagcagggagtgaagnaattgtttgatgntgttgaagctcaacttganaaaganaaggnagatgctc

SEQ ID NO: 51813 - DNA, 270 bp, Glycine max
  Clone ID: 701140601H1
ttggatgctgtcttacagcgctcttcaattgttgataatggtctctcaaaaggagtcattaatgatatctctgcagtcaaaacataccgaacaagaaccgctacaaggacaacttataggtctgctgaatatgtatatgggagttgcaatggattgcatttctaaatgttacttaagggtcttcttccatcatcttagagttttcaagttaaatgcgttgttggctttcagttatgtaggagagagcttgtgtgtacagtcaatttgaac

SEQ ID NO: 51814 - DNA, 269 bp, Glycine max
  unsure (1)..(269): unsure at all n locations; Clone ID: 701140602H1
tgatactttactcatgtgccgggatccttttcctcatcctctctctactcttgataagaggtacaatatttggcgctttatatattattcttggaaagcgaatctggtttttccctaacatccttgccgaggaagcaacactgcgggagttgttcagattttggcctaagaaagatgaagaggaaaagcccaagtggacaacaagacttttctatgctggggtanctgtgctgttcatattattgctgaggcatcatgcacccgatgaa

SEQ ID NO: 51815 - DNA, 260 bp, Glycine max
  unsure (1)..(260): unsure at all n locations; Clone ID: 701140603H1
gcctagccattgatttggaaaagtccaacttcaaggatgagtaagcttcanagtgatgctctaagagaagctatctcaggaatcatggctgattccaaggaaaagaacaggaaatttgtggagaccattgaactccaaattgggttgaaaaattatgatccccagaaggacaagcgtttcagtggctctgttaagttgcctcatattcctcgccccaagatgaagatttgtatgcttggagatgcccagcacgttgagga

SEQ ID NO: 51816 - DNA, 268 bp, Glycine max
  Clone ID: 701140604H1
tctgcccttcagtccttcagcaatggtttacgtgaagtcacagaaatcaaaagcctacttcaagaggtatcaagtcaagttcaagagaagaagagagggaaaaaccgattaccgtgccaggattcggttgattaatcaggacaagaacaaatataacaccccgaaatatcgctttgttgttcgtttcagcaacaaagacattgttgcacaaataatatctgctagcattgctggcgatattgttcttgctgcagcatatgcacatgag

SEQ ID NO: 51817 - DNA, 268 bp, Glycine max
  unsure (1)..(268): unsure at all n locations; Clone ID: 701140605H1
gccacttgacatgtctattgaaaagttagatatcaatggcttttcagcaaatcaggcttggggcaaaagcaaatttatgccaccatgcattttttatgcatatactccagatcaacctgcctcncctggtgaaactaagaaatcatcagctaagangaaantgngtttaatcttngttnncgttccggttagtcctggtaaaagcagattgatatggtgcttcccaagaaactttggatngtggatggacaaaattgtaccacgatgg

SEQ ID NO: 51818 - DNA, 269 bp, Glycine max
  Clone ID: 701140607H1
ggaggagccaattttgtgaattctggatacaccaaaggtgatggacttggagctgagattgttggcacttttgttcttgtctacaccgttttctctgccactgatgccaagagaaacgctagagactctcacgttcctattttggctccacttcccattggatttgctgtgttcttggtccacttggctaccattcccatcacaggaactggcattaacccagctaggagtctcggagctgccatcatctacaacagagaccatgcatg

SEQ ID NO: 51819 - DNA, 165 bp, Glycine max
  Clone ID: 701140608H1
tgaatttgtagataagaatgcttttatgtcaagggtgtatttgtatcccttttgtttttaatttcttttttcttccaagtatttatcatcatgtgttcacctttatataatgtggaggatcattagccaagttttctttttgcctgtttcattcgtaagtggtgt

SEQ ID NO: 51820 - DNA, 271 bp, Glycine max
  unsure (1)..(271): unsure at all n locations; Clone ID: 701140609H1
gccgtttgctccccaaggaaagaagcagagtgtttcttttgaaatcagctagaaaagatgtcaggtgaagaggtagctgttgcagctgaggcacctgctgcttcaattccaggtncgccaatggacatcatgactgctctacagcttgtgctgagaaaatctctggcctatggtggtctgcacgaggtcttcatgaaggtgctaaggtgatcgagaagcatgctgcacagctactgcgttctagcagaagattgtgaccaacctgattatg

SEQ ID NO: 51821 - DNA, 270 bp, Glycine max
  Clone ID: 701140610H1
aaaaatgcagatcttcgtgaaaactctgacagggaagactataaccctcgaggtcgagagcagcgacaccatcgacaatgtcaaggccaagattcaagacaaggaaggcattcctccggatcagcagcgtttgattttcgccggaaagcagcttgaagatggaaggaccctggccgattacaacatccagaaggaatcaacccttcatctcgtcctcaggcttcgtggtggcatcattgagccttccctcatggctttggctcgcaaata

SEQ ID NO: 51822 - DNA, 268 bp, Glycine max
  Clone ID: 701140611H1
ggcctccctcctcctcgccttcgtcactgcctcccctgttccagcattcgggctttccgctggagtcggagttggcaacgctttggtgttggagatcgtgatgaccttcggtttggtgtacacagtctacgccactgccgttgaccccaagaagggcaatttgggaattattgctcccatcgccattggtttcattgttggcgctaacattttgttgggtggggccttctccggagcagccatgaaccctgctgtgacatttgggcct

SEQ ID NO: 51823 - DNA, 250 bp, Glycine max
  unsure (1)..(250): unsure at all n locations; Clone ID: 701140613H1
gggttactgtctgttcaagctaaccatctctctctctctactcntagtgcctccttgccanaagttaaaatggcccaagaaactttcctattcacatctgaatcagtgaacgaggggcaccctgacaagctctgtgaccagatctccgatgctgtgctcgatgcatgcttggagcaggaccctgacagcaaggttgcctgtgaaacctgcaccaagaccaacatggtgatggttttcggagagatcacaa

SEQ ID NO: 51824 - DNA, 271 bp, Glycine max
  unsure (1)..(271): unsure at all n locations; Clone ID: 701140614H1
caaatgatngatnaatcagaagctatccatataattttnaaantcnntattatagaaattaataaagttatattcacagtttgtgattanatagtaacattaacattttattctgtcaataataatgataatgactcttatgagtttntcaactttcggaaataacacatccttttaaagctgccgagaaatgagagctcaccggcaactggctagaatccaaaaaccgatccatatagttgacggcgaggtacgccgtcaaaggctgaaa

SEQ ID NO: 51825 - DNA, 270 bp, Glycine max
  unsure (1)..(270): unsure at all n locations; Clone ID: 701140615H1
gngattttgctgctctttgaagangggtgtttgcttgattttggagatgtcgctgctctcagatctcatcaacctttcacctnncagacactactgagaaggtgatcgcagagtacatatggatcggtggatcaggaatggacctgaggagcaaagcaaggactctcccaggaccagttagcgacccttcaaagcttcccaagtggaactatgatggttccagcacaggccaagctcctggagaagacagtgaagtgattatatacccac

SEQ ID NO: 51826 - DNA, 271 bp, Glycine max
  unsure (1)..(271): unsure at all n locations; Clone ID: 701140616H1
aanaccgcntnagcnanacnacatagnagtntngangcacagaaggcgaagaagctaaacgangangcagcgtagttnaagacnntatgtacggcgtgtcgtccacgacggagtactcggacggggcgctgatgacgccggagaacatattcccggcggagtaccacagcttcctaatgttctccgccgcccggattccgatgttcggatccgacgagcttctntccgccgtcaccgcnggcaacgaaaccgaancctaccctggcgcnac

SEQ ID NO: 51827 - DNA, 269 bp, Glycine max
  Clone ID: 701140618H1
ctaaatatggctgacttgttggaatggtcaaagcaagataagaaacgaatgcttcatgtcgtctaccgtgttggtgaccttgatcgcaccatcaaattttacacagaatgtttaggaatgaagcttttgaggcaaagagatatcccagaggagaaatatgctaatgcttttacttggatttggccctgaagaatcccattttgttgttgaattaacatataattatggggttacctcgtatgacattggcgatggctctggacattttg

SEQ ID NO: 51828 - DNA, 268 bp, Glycine max
  Clone ID: 701140620H1
gtctccgaattagttatcttgagaaacattattcccattgctatatattatggctagcatgaaggttacatgggtggttgtgatcatgtgcatggccgtggtgggtgcaccgatgatggcgcaagccatgaacatgcaatgatgtgacggtgaacatggcacagtgcctatcctacctgatgcagggaggaacaccttcaacactttgctgcagcggagtcaagaacattcttggctctgctgtcaccaccgttgacaaacaaactgt

SEQ ID NO: 51829 - DNA, 271 bp, Glycine max
  unsure (1)..(271): unsure at all n locations; Clone ID: 701140621H1
gtttgggtngggacatcaagctaagaaagggaaagagaaagatcacagaaagagaattcatctttctttgcgaacagctaaaaacctcaaagggaaagaaggcatgaatagaggtgttcttcagagctcaccagtgcaacaaatgatgactggaaaccctaactggtggaacatcaatatcaatagcatggctccacaagctcctcctttnnttgtccactcctaacaacttngcnacntncntgtgctcccacttctcttccctttcctt

SEQ ID NO: 51830 - DNA, 269 bp, Glycine max
  unsure (1)..(269): unsure at all n locations; Clone ID: 701140622H1
cgngaggnncgaaganaagagaagagagatagggagagcgagcgtgagangnagatcttcgatttagggttttcaatttcgtattcagcaaggcggcgagtgtgagatttttagagagagagaggtgaggacgctgagtgctctgctgagagattccataaccccnnnnnnnnnnnnnnnnnnnnnnnnnnnntagattttttttccttttttttgtgctgtttatttatcctcagagcggtggatagggattttcactctgcagcgtt

SEQ ID NO: 51831 - DNA, 271 bp, Glycine max
  Clone ID: 701140625H1
ggcgatcctagcactctcttctgcagctttcgccgacagcttcattcaccatggctgagcaaaccgagaaggcttttttgaaacaaccaaaagtgtttctcagctcgaagaaaactgggaagggaaagagacccggaaagggtgggaaccgcttttggaaatccattgggcttggatttaagactcccagggaagccatcgaaggaacctacattgacaagaagtgccccttcactggcaatgtttccatccgtggccgtatcttggctgg

SEQ ID NO: 51832 - DNA, 269 bp, Glycine max
  unsure (1)..(269): unsure at all n locations; Clone ID: 701140626H1
ttttaacaaaaagcattatctttctttatattganatggtaatgcccatagacattaacagaattagtcgttgttcatctactatttgttacatgatgcttataacttgctcctcccctatgttgcatcatccacntaaataatcataaaaaagtaaccactttaacatgtgcaagatgattgcgagtggttaattgctgctagatgatattgaagaagcatagcagaaactggcagaaagattagcagatcatgttggtcacatatta

SEQ ID NO: 51833 - DNA, 271 bp, Glycine max
  unsure (1)..(271): unsure at all n locations; Clone ID: 701140628H1
tgttgctttgctgttgaatcatggancagaaggtcgatttcagcgctccccattccatgggaaccactatcntcggcgttacttacnacggcgttgtcgttctcggagccgactctcgaaccagcaccggagtgtatgttgccaaccgagcatcggacaaaatcactcagctacactgataatgtatacgtgtgtcgctctggatcggctgctgattctcagattgtactctgattatgtgcgtnacttcctccatcaacacacaataccg

SEQ ID NO: 51834 - DNA, 272 bp, Glycine max
  unsure (1)..(272): unsure at all n locations; Clone ID: 701140629H1
gatcaactgangagagtgagngacaagagaagagangatnacaacacgcttcangaagaacaggaagaagaggggccacgtnagcgctggccacggtcgaatcggaaagcacaggaagcaccctggaggacgcggtaacgccggaggcatngcaccaccacangatcctcttcgacaaataccaccctgggttcttcggcaaggtaggaatgcgctattttcacaagcttcgcaacaaattctactctccgatcctcaacatcgacaagctg

SEQ ID NO: 51835 - DNA, 269 bp, Glycine max
  unsure (1)..(269): unsure at all n locations; Clone ID: 701140630H1
ggggcgtacggttctgttgtggttggngatccgaattttgattatcgaatcgcaaaattcnnnnnnnnnnnnnnnnnnnnnnnnnnntcagagccatcaacgactgcaatggtctgcgagaagtgtgagaagaaattatcgacggtgntagtaccanccaagtggaaagaaggggccagcaatactaccgagggtggtggccgcaagatcaacgagaacaagcttctctccaagaaaaacagatggaccccttacggaaacactaagtg

SEQ ID NO: 51836 - DNA, 268 bp, Glycine max
  unsure (1)..(268): unsure at all n locations; Clone ID: 701140631H1
gttcttcttcgtcgtaatcttccntcttntgnngtntgtntgtntgtnttatcctctcacctgaaaatgtcttgctgcggngnnnactntggttgcggaagcncctgcaagtgcggcaanngctgcggaggctgcaagatgtacccagacttgagctacaccgagtcaaccaccaccgagaccttggtcatgggagtggcaccagttaaggctcaattcgagagtgctgaantgggtgttcccgctganaacgatggctgcaaatgtg

SEQ ID NO: 51837 - DNA, 250 bp, Glycine max
  unsure (1)..(250): unsure at all n locations; Clone ID: 701140632H1
ggccatcatagacacaagcatgaacntgaagctgatgatgctagggacattgagcttccaccatgtggaccatgnncaatgtaaagaataggtcattgccactttctaccatcatagacatactcaagcagaaaactgggaaaaatgatatagatgttgggaaattgagactctcgctttatgacatatttggggaagatgctagccctaaagtgaagaagttcatgaaggttatcttgaataaactcca

SEQ ID NO: 51838 - DNA, 269 bp, Glycine max
  Clone ID: 701140633H1
ggcaactggttttccaggcaacccttttgatttctctgcaatgtctggcctgctcaatgatccaagtatcaaggaattggctgaacagatagcaaaagatccatcattcaaccagatggctgagcagcttcagaaaacttttcaaggagctccacaggatgctatgcctagctttgataatcaacaatatttttcaaccatgcaacaggttatgcagaatcctaattttatgaccatggctgagcgcctgggtaatgcatgatgcagga

SEQ ID NO: 51839 - DNA, 266 bp, Glycine max
  unsure (1)..(266): unsure at all n locations; Clone ID: 701140634H1
aactgttattcactgnncatggaatcagacaggttggaactccttgggctgatggaactgctgccatctcacagtgtgctataaacccaggagnggcttttcattacaggtttacagttgacaggcctggtacatatttctatcatggacaccatggtatgcaaagatcagctgggttgtatggttcattgatagtagatttgccaaagggacaaaacgaaccgtttcattacgatggtgaattcaaccttcttcttagtgatttg

SEQ ID NO: 51840 - DNA, 265 bp, Glycine max
  Clone ID: 701140639H1
ggtaatttgggaattattgctcccatcgccattggtttcattgtcggcgctaacattttgttgggtggggccttctctggagcggccatgaaccccgctgtgacatttgggcctgctgtcgtgagctggacctggaccaaccactggatctactgggccgggcctctcatcggtggtggaatcgctggccttgtttacgaggttgtctttatcagccacacccacgagcagcttcccaccactgactactagagggggggaaatg

SEQ ID NO: 51841 - DNA, 268 bp, Glycine max
  Clone ID: 701140640H1
tctacctctgccactttctgagtacaatacaacactgccatggctgcctcagtctccactattggagctgtcaacagagctccactgagcttgaacagctctgaagctggagattcggttcccagttcagccttctttggcacaagcttgaagaaggttactgcctcaagggtccctaacgtcaagatttcttctggaagtttcaaaatcgttgcggcggagaaagagattgatgagcaacaacagacaaacaaggacagatggaaag

SEQ ID NO: 51842 - DNA, 269 bp, Glycine max
  unsure (1)..(269): unsure at all n locations; Clone ID: 701140641H1
cttccgtcgtggcggcgtggtggaacttcattcacagtgggtggcttgcgttttggaaaaacggtgtcgtgcggaaacagaggctacgtttacgactctcatcatatggacagcttacgccaggagaaagttcaaagatttgaagaatttgttgacaaacgcctganacctgatcttgttcatgctattgctcagcgggacaaggtatttgaacaacagaaaattttcactgatttgagaaaaaacattgaaaacctgagaagaatagt

SEQ ID NO: 51843 - DNA, 250 bp, Glycine max
  unsure (1)..(250): unsure at all n locations; Clone ID: 701140642H1
ttgaatctgnatntcntttctccactcatgaacttnaagaacatggtagttanaggtggcnnngtcttggcaacttctatggcctactctggtatccgggcaatgtgtgagggaggatacaactnaggcagtttaagaaacaattggcagaaaaccagtaagaagaatcactgtgggagcagaacaactgttatggaatttgaatcagactggacaaagcatagaanatcatctgcnccatactgctcaa

SEQ ID NO: 51844 - DNA, 269 bp, Glycine max
  unsure (1)..(269): unsure at all n locations; Clone ID: 701140643H1
cacactgcntaccttangtcttccgaattcgaagtnaatntgcaagatggctaaaganaangctcagatcaacattgtggtggttggtcatgtggaccctgaggaggcaaccacncttaacgagctgaagaagcctgttntggagaaagaagctccagggcatgccatatgagggcatgcacgtacggcctcngaggggaancagnaaattatgttancaanataatctggaaccctaatgtatcngtgtcancatcagtgtgtagttt

SEQ ID NO: 51845 - DNA, 77 bp, Glycine max
  unsure (1)..(77): unsure at all n locations; Clone ID: 701140644H1
gagaagtgagaagaganaaatggcaatctccatacncagnagacatncnttcatagatggagantggnaagtccctc

SEQ ID NO: 51846 - DNA, 107 bp, Glycine max
  unsure (1)..(107): unsure at all n locations; Clone ID: 701140647H1
gnagagagccaaatccgtcttttgactcataattaactactttccttttttngtgatttctaaggttctaatttataatatgggagtggaggagaacacccctaact

SEQ ID NO: 51847 - DNA, 267 bp, Glycine max
  unsure (1)..(267): unsure at all n locations; Clone ID: 701140648H1
ggagtacattatcntgtaaagaaaatgnntgctactatagtttatttttccaaaattaagtatttcatgttttctttcgtaacttcgttgctggtacgccccaattctaaattgagctttcagtaagtacaagtnatctgactatcatttttncctttgttatattcagacattccattgcagacatggganngcttatctcttcaataatgtgtaagaagttatcctgattttgggcaccttatcatngtgtagtaaacattccca

SEQ ID NO: 51848 - DNA, 267 bp, Glycine max
  Clone ID: 701140649H1
agggatctacaatgttggaactggaaagggtagatcagtgaaggagtttgtgaatgcttgcaaaaaggccacaggggtggacatcaaagtagactaccttccacgtcgacccggcgattatgccgaggtgtatagtgacccttctaagatcaacagggaactgaattggaccgcacaatacactgaccttgagaagagtttgcaggttgcatggaaatggcaaaaagctcatcgtaacggttacggtatttcatctgcaatctgagt

SEQ ID NO: 51849 - DNA, 268 bp, Glycine max
  unsure (1)..(268): unsure at all n locations; Clone ID: 701140650H1
ggctggtagcaagcgcgacatggcactgcagtgcaggttaagctcacaccattgatatcactagccatattctcctttcgctaattcccgcaagctactactcntcttcaacgctctctctgcaaaagatgcgctccaaggacagaatcgcttacttctacgacggtgatgtcggtagtgtttactttggggcgaanattccgatgaagccccaccggctttgcatgactcatcatcttgttctctcatacgatcttcataagaagat

SEQ ID NO: 51850 - DNA, 258 bp, Glycine max
  unsure (1)..(258): unsure at all n locations; Clone ID: 701140651H1
gttacatgctcgtcaggnggagaaaattgatccatngcttcgttgggtgganctcagaatttggcttaagccagttctttacaccagcttttttggtggaaagcaggaagatggtcttgtaatggctattgagaaccttctaaagaaaacagatgattgcgaattggcagcaattgatgctattgcagcatcagcacattcgttaattatagctattggnatggttcaggggaaattgcaaattgaggaagcaattga

SEQ ID NO: 51851 - DNA, 267 bp, Glycine max
  unsure (1)..(267): unsure at all n locations; Clone ID: 701140654H1
cttctctttacccgttgaaacatccttagttttcagattctgaactcttgattctgaattcatcacaatgaattcgttcaactacagtgaggaagttgnaggtggtgtcccctgttcctgcggacatagacatngcaaactccgttgaaccagttcatatctcccagattgccaaagagctcaaccttagtcccaatcactatgacctttacggtaaatacaaggctaaggttttgttgtcggttctgatgagcttcaaggatcaga

SEQ ID NO: 51852 - DNA, 270 bp, Glycine max
  unsure (1)..(270): unsure at all n locations; Clone ID: 701140656H1
gttccttcctcatccacaatncannggnnncgngtgagnctggttcccatggcttcttcttcaatacgacccgctntnncaacaccttcctcctttnctntcttcagcccttctcgccgtatctctttctcccatcttccctctccctctgtgtctcaatccaatagttttggcctcaaagcttccagagtgttgagacaatatggtaactccacgagaatcatggcancaggggacttgtctcattcagttgcggctgcttcaccagaa

SEQ ID NO: 51853 - DNA, 268 bp, Glycine max
  Clone ID: 701140657H1
cgaacattcgaacttgaatcaggaattttggggcaaggttgctagtgttggcaggattcaggagtaactatagttcaaacctaatagtagaagaaaaggaacttcagctggttttatttgatagagaaaccactgttacagaaatatggaagaggaagaggtgaatcgatgccagattcaggaatggtatccaaagttcaaatctgtatccttcaagaccttaattcatcaacttcctgaatcatttattcagtaccttcttgatgac

SEQ ID NO: 51854 - DNA, 108 bp, Glycine max
  unsure (1)..(108): unsure at all n locations; Clone ID: 701140658H1
gttgcacccaccagattcagtagtcacttcactaggctnctcgaagaaaaccaaagtgtgcagtncataaactanacaagtncaaacaacacggattcggtttcgaag

SEQ ID NO: 51855 - DNA, 268 bp, Glycine max
  unsure (1)..(268): unsure at all n locations; Clone ID: 701140660H1
gatcgataggccacgctttcacggttcgtattcgtactggaaatcagaatcaaacgagcttttacccttttgttccacacgagatntcngcgnnacgttgagctcatcttaggacacctgcgttatcttttaacagatgtgccgccccagccaaactccccacctgacaatgtcttccgcccggatcgaccggccgaagccgaccttgggtccaaaaagaggggcagtgccccgcttccgattcacggaataagtaaaataacgttaa

SEQ ID NO: 51856 - DNA, 98 bp, Glycine max
  unsure (1)..(98): unsure at all n locations; Clone ID: 701140662H1
cagaacatgtacaggaacgctgctncacgtcttagggtcancagtgcccgttcgtgcagcagcagcaggatacctgccagtgccagatttgcaagttc

SEQ ID NO: 51857 - DNA, 268 bp, Glycine max
  unsure (1)..(268): unsure at all n locations; Clone ID: 701140663H1
gacaacgtnaacattggcttctgttgcaagttgtaagnggtaactctttcaactcagccgtgnaagngttgttggcagcgcacgaaggaaccatctnctcttcgncnttcctttntttcncaatcacacccaaatcccttccntccttcttcgctattgtcttctctntcaggtgngctaaacactagcatagtagcatgcatcattgtcataaacttgtngaaactgaagtcaaaacttgatcttgtgtgcgataaggtgatggacc

SEQ ID NO: 51858 - DNA, 265 bp, Glycine max
  unsure (1)..(265): unsure at all n locations; Clone ID: 701140665H1
aggccatgtaaacccctttatgcaactagccaaactccttcattgtgtgggtttccacataacctttgtganccactgagttcaaccacaaccgttttgtcaagtcccatggaccagactttgttaagggtctccctgatttcaaatttgagaccatacccgatggcttgccgccttcggataaggatgcaactcaggatgttccagcactgtgcgattctactaggaaaacttgttatggtccattgaaagagttggtgatgaa

SEQ ID NO: 51859 - DNA, 264 bp, Glycine max
  unsure (1)..(264): unsure at all n locations; Clone ID: 701140667H1
ctggtgaatctgcaggtgctgcatctacagttgtngctgctccanctggaccagctttagatcctcgatcatcccctgttgggaagtctgtaaaaccagcacctcttggcaggagctcatttccggctgtgccagttgaagtggaacgcattgatattggtgaacccgagaatactggaatcaaatctggttctaagaggtcatttgatcatctaaatgaactgcccattaatacctcaccagatgctaaanatgaagtcgagg

SEQ ID NO: 51860 - DNA, 262 bp, Glycine max
  unsure (1)..(262): unsure at all n locations; Clone ID: 701140669H1
gcggtgttgccgctgggaatcatagctggaatgctctgcgtcatgggaaacgctcagtattacattcacagagctgcacatggcagacctaagcacatcggaaacgatatgtgggatgtggcgatggagcgaagggacaagaagcttatcgagcaagcctctccctccaattaacatcgttgttttgccgatgtcattgtgaagaaaataaactgctcacctggatttancgctgtgttcttgggaagcagggttaatcaca

SEQ ID NO: 51861 - DNA, 146 bp, Glycine max
  unsure (1)..(146): unsure at all n locations; Clone ID: 701140670H1
anaaaagacaacccagagagcgcgncttaataaacgntnttctctgaaaacccccatntcttttcntctttcttacttgctgctntccgcttncttcgatcttccgatcttcgtcgctgaaaatgaganagtgcatttcaatccag

SEQ ID NO: 51862 - DNA, 268 bp, Glycine max
  unsure (1)..(268): unsure at all n locations; Clone ID: 701140672H1
ctttcctctccgaaccctcgatcactctcacgcgctcctatattcnctcctccaccgtcgctctctcgncacancccacaacaccatcttcancacatggcaaacgcngcatctggtatggcagtccatgatgactgcaagttgaggtttttggagctgaaggcaaaaaggacacaccgtttcatagtttttaagattgaggagcagcagaagcaggtcattgtggagaagctggtgagcctgcccagggctatgaagatttcactgc

SEQ ID NO: 51863 - DNA, 264 bp, Glycine max
  Clone ID: 701140673H1
aataatgttcatcgagaattttaaggttgagtgtcctaatgtgaagtacaccgagactgagattcagtccgtgtacaactacgaaaccaccgaacttgttcacgagaacaggaatggcacctatcagtggattgtcaaacccaaatctgtcaaatacgaatttaaaaccaacatccatgttcctaaattaggggtaatgctgtgggttggggtggaaacaacggctcaaccctcaccggtggtgttattgctaaccgagagggc

SEQ ID NO: 51864 - DNA, 268 bp, Glycine max
  unsure (1)..(268): unsure at all n locations; Clone ID: 701140674H1
gcggtgcgntatggncgaatgntcggagtagcagccatgcncagtggatgtagcatcagagcaatatggattctcaacaaccttgacggngtcgttttttcccggaggtttccggtggtagagaagcgntggcgagnctgcttgcaactcaaacgcccacaatgatacccatcaaatnttcnccttccttacccactgancccnaccncnctgatgcttttctcgaccgaaagcatagggagggatctgcncgaggatttggcatacg

SEQ ID NO: 51865 - DNA, 263 bp, Glycine max
  unsure (1)..(263): unsure at all n locations; Clone ID: 701140676H1
gtgtctggtgccttaacttgttcttcattgtgccctttctctgagattgcatataggtttttagtgctgaagcatcaaaatggggngatattcaataccctttatgggtgttctgctactgttctgtctggtttcatcttcagaggcagaanntttgaagtataaagaccctaaggcgccactgaatgtcagaatcagtgacttgttgaagcgaatgtctctcgaagaaaagataggccagatgacacagattganaggagtg

SEQ ID NO: 51866 - DNA, 119 bp, Glycine max
  Clone ID: 701140678H1
tcttcttctgcccccatcacctagatctgtctgtctatacactcattgtttgacaaaaaagaaaataacaactgggaagtttagtcatagctgaaagctgaactactagctagaggata

SEQ ID NO: 51867 - DNA, 266 bp, Glycine max
  unsure (1)..(266): unsure at all n locations; Clone ID: 701140679H1
caaggnttcccttagtaacggcgagcgaaccgggaaaagcccaccatgaaaatcggtcgccctcggcgtaccgaattgtagtctggagangcgtcctcagtggcggaccgggcccaagtcccctggaagggggcgccaganagggtgagagccccgtcgtgcccggaccctgtcgcaccacgaggcgctgtcggcgagtcgggttgtttgggaatgcagccccaatcgggcggtaaattccgtccaaggctaaatactggcgagag

SEQ ID NO: 51868 - DNA, 267 bp, Glycine max
  unsure (1)..(267): unsure at all n locations; Clone ID: 701140680H1
cgaaaagagagaaattcatcgtcgcagtaatcatgggtaaggttcatggatcacttgcacgtgctggtaaggttagagggcaaaccccgaaggtggccnnnnnnnnnnnnnnnnnnnnnccacgtggccgcgcccacaagaggatgcagtacaatcgccgattcgtcaccgccgtggtgggattcggcaagaagaggggacccaacttcgtctgagaagtgaggccgaggcttgaggaatatgttgctactctatttgatttatctt

SEQ ID NO: 51869 - DNA, 265 bp, Glycine max
  unsure (1)..(265): unsure at all n locations; Clone ID: 701140681H1
gaggactgaggagggatgagttcgtcctctccacaacgttctcgcggcgacggcgagaaaaggcccagatttttcgactcaaacgcgaaggccatctgttggtctaaagctgatactgtccccggccgtcaccctgagaggtggcgcaaagacnccgccggtaacgttgtctgcaaacgtttcttcaactgcatcggctgcctctgctacgagtacgatcacatcattcccttttccaaaggtggtgagtccactgcggataatt

SEQ ID NO: 51870 - DNA, 262 bp, Glycine max
  unsure (1)..(262): unsure at all n locations; Clone ID: 701140682H1
atcaatcttcatatattttcttttgataaggatcttgattaggagagctcggtgtttttntttatattattattgggggcgtgagacactttttttttggaaggcaagggtgtgtgagaaacttgttttaagaagaagctactgagagctgttatatgaggttcaaagctttggctatgccatgaaaattttgaattatacaatatgggtagcaacaggactattgtttggtttagaagggaccttagaattgaggacaatc

SEQ ID NO: 51871 - DNA, 246 bp, Glycine max
  unsure (1)..(246): unsure at all n locations; Clone ID: 701140683H1
tttctctcctaaaaaaaaaagagnntaactttgtttgattatttgaaggaggtttgaagacagcaaaaggtgtagttttgttttaagtncgcttnnaaatggttttcatgtctgagatattgttccccgaagaaaaaattgaggaaggagnntgggagaaggagagataagaagaagagangaatacctacccagcaagcagaattagagaattttttttcacaaactgttgatttgattcatttt

SEQ ID NO: 51872 - DNA, 261 bp, Glycine max
  Clone ID: 701140685H1
ccctgaacaatcccattttgttgtggaattaacatataattatggggtgacctcatatgatattggaactggctttggacattttgctatcgcaactccagatgtttacaaattggttgaagacatccgggctaagggtggaaatatcaccagggagccgggtccagttaagggtgggaagtctgttattgccttcgtgaaggatcctgatggttatgctttgagctcattcaaagatcttccacccctgagccattgtgt

SEQ ID NO: 51873 - DNA, 254 bp, Glycine max
  unsure (1)..(254): unsure at all n locations; Clone ID: 701140686H1
gggatcaaataaaggaacagctctcagctgcagggtggacagttgactttaggcccaggaatggcagagagtaccatgatgcagtgtatgttagtctggacggacatacacactggtcaatcaccttggcctacaaaaggctaaaagagtattatgaagctggtaatggtgaaggtaaggcatataagccaggcttcaaatttacaccaatagcagaagaggatttcaaaatgctaactaaggtatgaacangc

SEQ ID NO: 51874 - DNA, 266 bp, Glycine max
  Clone ID: 701140688H1
ctctgcgaaggtgcaacctgacagcctccaaatccaatggcttcagagaagaaactttcgaacccaatgagggagataaaagtgcagaagctcgtcctcaatatctctgttggcgagagtggagatcgtctcaccagagccgccaaggtgttggaacaacttagtggccaaaccccagtgttttccaaagcacggtacactgttcgttccttgggattagaagaaatgagaagattgcatgctatgtcactgtcagaggtgacaag

SEQ ID NO: 51875 - DNA, 266 bp, Glycine max
  unsure (1)..(266): unsure at all n locations; Clone ID: 701140689H1
atacatatcttccaagcgagacaccagcncccacttttgaagtacagagaagaagaattgaagaatgtaagaggggatggaactggagagcgcaaggaatgggataggatctatgattatgatgtctacaatgacttgggcaacccggatagcggtgataaatatgcacgccccgttcttggtggttcagccttaccttaccctcgcagaggaagaaccggaagaggaaaaactagaaaagatcccaacagtgagaagccgagcga

SEQ ID NO: 51876 - DNA, 267 bp, Glycine max
  unsure (1)..(267): unsure at all n locations; Clone ID: 701140690H1
ctctcttctgcatctcccattcacagaacaataacaagatacaccacattctccttctcgcttncgtcctccaacaactcttcacttcaatccccacancttcgaccactgaactggacgctgtgtncgccttcagcgagatcgttcccgacaccgtcgttttcgatgatttcgaaaagtttcctccaactgctgctactgttagttcatcgcttctcttgggaatatgtggccttccagacaccatttttaggaatgctgtggaaa

SEQ ID NO: 51877 - DNA, 263 bp, Glycine max
  unsure (1)..(263): unsure at all n locations; Clone ID: 701140693H1
aaatgtctcattcttacattttcttactaatgtttgtgccatagttggaggtattttcaccgtttctggaatactagattcatnccatctatcacggtcaaagggctatcaagaagaagatggagcttggtaaatttaactgatgggatttgagtaatttcgagggaatggctctccagagacaaatctattcaaggttaactactgattaaaattccccttggggttctgagttcttcggtttcaacaaaaggattttgccc

SEQ ID NO: 51878 - DNA, 259 bp, Glycine max
  unsure (1)..(259): unsure at all n locations; Clone ID: 701140694H1
ctacaagtatccaccacctaaagtgatnccaggtcgacaagtctgcatggatgacctgatgaagaatttgcaagagaaacaattgctggtttgaatccaaatgtcatcaagattattgaggagttcccactangtagcaagcncagatactcaagcctatggtgatcatacctgtataataacaaaagagcatttggagcctaacttaggtggtctcatgttgagcaggctatccanaacaagaagttgttcatcttag

SEQ ID NO: 51879 - DNA, 266 bp, Glycine max
  unsure (1)..(266): unsure at all n locations; Clone ID: 701140695H1
gcgagtgagagagagtgttcttcgtntgctaccttctcccagaaatggttacgttcaggtttcaccagtaccaggtggtcgggagggctctcccaacggaagcagatcagcatccgaagatctaccgaatgaagctctgggccaccaacgaggttcgcgccaagtctaagttctggtattttttgaggaagctgaagaaggtgaagaagagcaatggtcaagttcttgctatcaacgagatttttgagaagaacccaaccaagatt

SEQ ID NO: 51880 - DNA, 265 bp, Glycine max
  unsure (1)..(265): unsure at all n locations; Clone ID: 701140696H1
tggngagcgcaaggnatgggataggatctatgattatgatgtctacaatgacttgggcaacccggatagcggtgataaatatgcacgccccgttcttggtggttcagccttaccttaccctcgcagaggaagaaccggaagaggaaaaactagaaaagatcccaacagtgagaagccgagcgattttgtttaccttccaagagatgaagcatttggtcacttgaagtcatcagattttctcgctatggaatcaaatctgtatccc

SEQ ID NO: 51881 - DNA, 159 bp, Glycine max
  unsure (1)..(159): unsure at all n locations; Clone ID: 701140701H1
gttcttatcagtttaatatctgatatgtgggccattggtccacacgatattaaatttatttcttgaaggggagggcccaacacagtagcntgctactggggtcgtcaagcgtcgcccttgtgttgcactataacatgggcctggcgcaccctacaaaat

SEQ ID NO: 51882 - DNA, 264 bp, Glycine max
  unsure (1)..(264): unsure at all n locations; Clone ID: 701140702H1
agaagttcagatcngctgcttactccaacngcatccgcaagnccatcctgcagattccctaggttgtgtgacgacatagcccccgtagtcttgcatctgctatattatnctagtctctncntttcccttttcttgttctcttccttgcccntntgttctctctaccnatacagcaagactttgtttctttttgagtcaagatggctggctcagctattggtntcgaaggcnacgagaaaagactgagatatcatttttgaaatg

SEQ ID NO: 51883 - DNA, 108 bp, Glycine max
  unsure (1)..(108): unsure at all n locations; Clone ID: 701140703H1
agcgagcganccgatngaagaagaatatntngatttcgnngaagaaggtttcgatcaaaggagacgatgtcgatggaggttgatnccagccaaagtccttctncttgc

SEQ ID NO: 51884 - DNA, 265 bp, Glycine max
  Clone ID: 701140704H1
gccgtagcagtaactcgtggaattgctagcaatggcgaggatcaaggtttacgagctgaggcagaagacgaaggctgatctgttgaatcagctgaaggacctcaaggccgagcttgccttgcttcgtgttgctaaggtcaccggcggtgcacctaacaagctctctaagatcaatggtggtgaggttgaacattgcccaggttttgacggtgatttctcagaagcagaaggccgcgttgagggatgcctacaagaacaagaagta

SEQ ID NO: 51885 - DNA, 262 bp, Glycine max
  Clone ID: 701140705H1
gttctctctgccagagatggcattgtttcgctaggaggtccccatatccctcttaagactggaagaagggatggtagaaggagcagagctgatgtggttgagcagttcctcccagaccacaatgagtccatttctgcagttcttgacaagtttggtgccatgggaattgacacccctggcgtcgttgcactgcttggagcacacagtgttggtcgaacccattgtgtgaagttggtgcaccgtttgtacccagagattgatc

SEQ ID NO: 51886 - DNA, 266 bp, Glycine max
  unsure (1)..(266): unsure at all n locations; Clone ID: 701140706H1
gcagccatggccgaagcagaacacaacgatcccacctcgccggagcgcgaggaccaaaccaaaagcaacaaaangaagctgccgaaagagaaaaagaccncaaaagaccgagcagaaacaagaggaggagaagaacgatgcgaacatngatagcgcccaaacacaaactgaagatgaaggagagaatcaagaagacacaaatgtgaacagacaacgtcttcatcnggaatcatgagcaccgagtctttcnctctcngggcttgttc

SEQ ID NO: 51887 - DNA, 261 bp, Glycine max
  Clone ID: 701140707H1
ctttacttcccaaaacttgctctacaatgagtttccttcgttcacttgcaagaaacaaggatatatcaaaagtaggacgcagaggtatccattgcatgcagaaactatgtgcagaaaaaatatctcctgattcactagagaaggcccaaaatcgtgtgatagatgctgcactcacacttgttcgagaaaatacaaggcttaagaaagaactcgtgcatagtttgggaggtgctgtggcaacttcaactcttcttggagttc

SEQ ID NO: 51888 - DNA, 261 bp, Glycine max
  unsure (1)..(261): unsure at all n locations; Clone ID: 701140708H1
gggcgttctatatattattgaattgacaatgaggcctgctcttgctttgcttcctcttctatttgctttcttgttagctgccactacggaatcaagaaaagatccaggggaatattggaaaatgatcatgaaagatcaggaaatgccaganggacttcaaggtcttgtttcatttcaatctgaaaataaccctaagactcaagagcagcttggtaaaggttccaaaaaccattgtgaagagtctctagttacaaatacaca

SEQ ID NO: 51889 - DNA, 239 bp, Glycine max
  unsure (1)..(239): unsure at all n locations; Clone ID: 701140709H1
atcacctccacctccagtttacacntatgcttccccaccangcacctatctacaagtaagacncgaattgcggaagcaccattcacgataaatcatgttctagtttttatcgaggaataaaggcaagctctatttggagtcaagtgaaacatctatcttcctgtccaagttctttgaataaaagtctgaatgtgtcatctctgcactacaatatttgtgattctgaccaagttggttct

SEQ ID NO: 51890 - DNA, 254 bp, Glycine max
  Clone ID: 701140710H1
gcgaaacgctgtcgttgcggcactcgcggcgttggtgctactcgcggcgagtgtggcggtggatgctcaggagaactcggacgtgaagacgctggtgaagtacaagcacgggaagaagtactgcgacaacggatgggaatgtaagggctggtcaatttactgttgtaacctcaccattaccgattatttccagacctaccagttcgcgaatctgttctccaagcggaactcgccggtggcgcacgcggtcggat

SEQ ID NO: 51891 - DNA, 250 bp, Glycine max
  unsure (1)..(250): unsure at all n locations; Clone ID: 701140714H1
gttactgctgctcttttctcttttcttttctctttagttctctcttcccctttctttttcntttcttcttcttctgagcttgtttaagcttttcttccattaacatattancttaatgtgtggtattcttgctgttcttggttgttctgatgactctcgagccaaaagggtccgcgtgcttgagctctctcgcagattgaagcaccgtggccctgactggagtgggctccatcaacatggtgactgcntt

SEQ ID NO: 51892 - DNA, 253 bp, Glycine max
  unsure (1)..(253): unsure at all n locations; Clone ID: 701140715H1
attcccgccttccctcacacngtgctgtccctctgatgatgtgggaaatggtgctgaaggcagcagtcttagaaaagccacacccagtaatgctaacaggtctgcaaatggttcagaacaaaatattaaaaggaatgaggaaaatgattatgatcctgtgcttagtgagcttaaagctatgacttctaatgggaatgatgcagacaggcttgcaatacggattccagaagctaagggttctgggcctctggca

SEQ ID NO: 51893 - DNA, 254 bp, Glycine max
  unsure (1)..(254): unsure at all n locations; Clone ID: 701140716H1
gnaggcgtcttcataaacgcctttcttctccgtttccgtttcctcgttcgaattcgctttttgatccgcgaaaatgagagagtncatctcgatccacattggtcaggctggtatccaggtcggaaatgcttgctgggagctctactgcctcgagcacggcatcgggcccgatgggcaaatgccaagtgacaagacagttggcggtggtgatgatgcttcaatactttcttcagcgagactggtgctggaaagca

SEQ ID NO: 51894 - DNA, 268 bp, Glycine max
  unsure (1)..(268): unsure at all n locations; Clone ID: 701140717H1
ctatcgagtaaattaactatgaagcctaccctactattatccctttccttcctgcctctctttgctttcctggctctttcagaagatgttgaacaagttgtggacataagtggcaaccccattttcccaggtggcacatattacattatgccatcaacttggggcgctgccggtggtggattganactaggccggacaggaaactcaaactgcccagttactgttttgcaagatttactcagaaatcntncgtggcacaccaatcaaa

SEQ ID NO: 51895 - DNA, 268 bp, Glycine max
  unsure (1)..(268): unsure at all n locations; Clone ID: 701140718H1
ganattcatnccggttgctttnncatattangnttgctattaataattncannagnaatntgntaggtngatgcccctttgggaaanagtcnnccgttgattgagaaaaggctgtagaccaatncctgttgttgaaggtaagtgnngactcgangcaagccntgatncgatagtancnaaacaatgaagaacttatgtgagaatggctctggtcctangcattaacatctgatncgcntggatgctcancaggggggatnntntgaat

SEQ ID NO: 51896 - DNA, 265 bp, Glycine max
  unsure (1)..(265): unsure at all n locations; Clone ID: 701140721H1
gcgntggcagcgtttgcgtttncctctgctgttnccaatcggcctcagcagnccgacgtcgttgtgctctctgaagatancttcgagaaggaagttggtcaggacagaggagctctcgttgngttctatacnccttggtgtggacactgcaaaaagcttgctccagaatatgaaaagcttggtagcagcttcaagaaagccaaatctgtnttaattggcaaggttgactgtgatgagcncaagagtttgtgcagcaagtatggag

SEQ ID NO: 51897 - DNA, 202 bp, Glycine max
  unsure (1)..(202): unsure at all n locations; Clone ID: 701140722H1
ctataagctagtttatcgtgaggagaatatgaagttgtttgncttcttgacgctgcagtagttttggtagcatggccatgccatggcgcagctaccaaggtccctctccgaatgaaatggcttatggtgagcgtcttcggagtaaatcgcatttagnttctgtggaacaacactngnncnnnanngctnnnnnannnnncna

SEQ ID NO: 51898 - DNA, 259 bp, Glycine max
  unsure (1)..(259): unsure at all n locations; Clone ID: 701140724H1
ctaccaatggctaccaaggtttacattgtttattattctacgtanggacatgttgagaagctagctagagagatagaaaaaggggctgcttctgtggagggagtagaagcaaaactgtggcaggtacctgaaacattgcctgaagaagtccttgctaagttgggagcacctccaaagagtgatgttccaattattactcccaatgagcttcctgaggctgatggctttttgtttggttttcccacaagatttggatcta

SEQ ID NO: 51899 - DNA, 254 bp, Glycine max
  unsure (1)..(254): unsure at all n locations; Clone ID: 701140726H1
ctcttggtcttgcgagananagccatgccaganacgaagatttttggcatgctgtttggccaaacactcccattccaagttcattgcgagatccttctaaagcctggccctgcaagtgttgaaatcgatgatcaccctatgcaaattgaagaaacacagtacccgaaaaccttcttctataaagaagaccttcatccaggcaaaacaatgaanntacaattcagcaagcctccctttcaacaaccatggggtgt

SEQ ID NO: 51900 - DNA, 249 bp, Glycine max
  unsure (1)..(249): unsure at all n locations; Clone ID: 701140727H1
agagtatagtggtgttgcctgcaactgaaggtgttgatagtacantttggctattggccaaggctcatgttattgtgaatgactctggttatcatcagctcgtgagccattggttaaatactcatgcagtgatggaaccatttgncatagcaaccaataggcatctcagtgtgctccaccctatttataaacttctttatccacacaacanagngnntgcaaatatcnnnggacttgctaggcatccct

SEQ ID NO: 51901 - DNA, 254 bp, Glycine max
  unsure (1)..(254): unsure at all n locations; Clone ID: 701140729H1
tttntttttaacacagaaacnctaaccactgaataangctcntanagaacagtcattgtatttttacatagaccacgaaggacaatcaagcaccgtacagagagtccatataataaaatacanaccacaattattcaagtccttaaaacataaatactcncagactccagtaactggaccataatataaggtactacacttattagaactgnaacgtaacatggcnagcaatattnagttcataatcactacga

SEQ ID NO: 51902 - DNA, 254 bp, Glycine max
  unsure (1)..(254): unsure at all n locations; Clone ID: 701140730H1
cgagtctttagtggcatctgcatacccaacagagatggtcaaatttccgaaactcctttgnggataagctgctgcagataaacatgcaccaaatgagtcctttccatgtaatacaacctccaaggaggttatcaagaatagatccgctgcgacattttctaacactggtcatgctctccgagtccaccacggagatgatatttgccaaccatcagagttgctcgacgtcaaacaccatttttcctcggaacatg

SEQ ID NO: 51903 - DNA, 86 bp, Glycine max
  unsure (1)..(86): unsure at all n locations; Clone ID: 701140731H1
tccttcatggctctcctcacattcccaacnnagaaaccccattctccatcggcnttcaccacccttcactgcnctcttccacacaa

SEQ ID NO: 51904 - DNA, 263 bp, Glycine max
  Clone ID: 701140733H1
aaagggtctaagtgctgagaaagacaatcttgacataacccagcatgactgggccttaccgaattttgagcagcgggctgaagctgtgttgaggaaagtcgtcagttaaccatgttatgatgtaggaggctaattgcttacatttgctggatactctctggaaattctattgttgcggtaggagctgtaccttttgcagcaaaagatatcaaagatcatgttgagacaatgagtggtcttgaaacttgacatttttcatttat

SEQ ID NO: 51905 - DNA, 261 bp, Glycine max
  Clone ID: 701140734H1
gttctaccacgggcttaaccagacagaacttgcacttcgccatatgtcccgtgctttgctattattaagtttttcatcggggccagatcatcctgatgttgcagcaacatttatcaatgttgcaatgatgtatcaggatataggaaagatgaacacagctcttcgttatctacaattgctttaaagaagaatgaaaggctcttggagaggaacatattcaaactgctgtttgttatcatgctcttgctattgcatttaatt

SEQ ID NO: 51906 - DNA, 256 bp, Glycine max
  unsure (1)..(256): unsure at all n locations; Clone ID: 701140738H1
ggaagcntngatggttccgaagagaaggtgaaaatggaangtntcgatangttggtgggtattnggaggngagagagcatggaagatgggacgggtgcncgaatatatttggtgaatttaatgaanactctancgatccgntaggtgcatcttnnnaatttggttcaggtaacctttacatattttccacanangattgaangnantgaatacatanggatatnncataaannaattacacaaatgcacnctgctg

SEQ ID NO: 51907 - DNA, 257 bp, Glycine max
  unsure (1)..(257): unsure at all n locations; Clone ID: 701140739H1
cncagattctcactgcttctggtgatcaaacaataaaagtatgggatgttcaagaacagaagtgtcttggactgttgactgggcacacaggaagtgtgaaatctatgtgttctcatccaactaattctgatattattgtctctggttctagagatggatcctttcgtatttnggacttgagatgcaagtccactgctaagagtaggtgtggagaagttagcatatgttcaatgggaggcgtcaaaggagcacatatt

SEQ ID NO: 51908 - DNA, 256 bp, Glycine max
  Clone ID: 701140740H1
cgactagccgcgttgactcggttccgtttttcattctcgcggatctaatattaaggaatagcttaagggcacattacaatgaaggcattgattctggttgggggatttggaacaaggctgaggccactgacactcagtttccctaagcctcttgttgattttgctaacaagcctatgattttgcatcagatagaagcccttaaggccattggagtgactgaggtagtgctagccatcaattaccaaccagaggtta

SEQ ID NO: 51909 - DNA, 253 bp, Glycine max
  Clone ID: 701140741H1
gagagggttggatatagctctcagggttctggatccacacttattatgccatttcttgataaccagctgaagtctcctagcccactcctgttacctgcgcaggatgctgttactccattgtctgaagcagaagcagttgatctggtcaaaactgtttttgcatctgcaactgagagagatatatacactggagataaggttgaaatcgtcgtcctaaatgccagtggtattcgtcgtgaatacatggacctaa

SEQ ID NO: 51910 - DNA, 213 bp, Glycine max
  unsure (1)..(213): unsure at all n locations; Clone ID: 701140745H1
tctnatttttgtgggaaaatggcggactgggcaccggngttgatccggggtggtgcngttcatgctgctccaaccggggctgcttttttcctttccgggaaacgggaagcagctagagtttgggagcatgangaccaacggcaaggccattttcanccacactctcatcttcntcgccctctacnccancctcatcctcgccgtnaaagtcca

SEQ ID NO: 51911 - DNA, 255 bp, Glycine max
  unsure (1)..(255): unsure at all n locations; Clone ID: 701140747H1
cacccctcgtctttccttgtttccggtgagggccaaccacaacatatgtnanacaaggaacaacctccaaaacataacatcctnccgccaaacaaaactttgacctccttcagatctataccctnnnnnnnnnnnnnnntctattttcaaattctacatcatgggcacggaggttctacggccancagattgtttcacccaacgcatcggtnttccaccgcctggcttttcccggcgaagaacctatggtaccca

SEQ ID NO: 51912 - DNA, 187 bp, Glycine max
  unsure (1)..(187): unsure at all n locations; Clone ID: 701140748H1
ggagctancagccataaggagaaaaactttcaaagaggtgaaagcaaangagttcttcntttccttttttatatatacttgggtgctaagctgtgtgagttcattgacaagcctgaaatcnncaactatgctgacaaaggagcatggtctgaacctcaaggagaccgagctttgcctcggtttgcct

SEQ ID NO: 51913 - DNA, 250 bp, Glycine max
  unsure (1)..(250): unsure at all n locations; Clone ID: 701140750H1
gaaaatgaaagtgcntgtnntgtntgttgctacagtnttggtagcatatgcatgccatggctcagactaccagaagtnccctctccaaatgnnaactgggttnggtgggcaatacagcaatgaggnggcatgtgccagttggaggcttngcgtggaagcaaacaacgtagtcacgtggcaaactgttctgcagcttgcggagagtacatagctgacgacgctctaggagaccaatatagatcagattcca

SEQ ID NO: 51914 - DNA, 262 bp, Glycine max
  unsure (1)..(262): unsure at all n locations; Clone ID: 701140751H1
atcnttgtcnttccaatcatnatntctnnnncctgggcctnntcgttgggcctgagtagnaangcgacgaccatctacgaggtcctgagcgancacgggctgcccatgggcctgttnccgcaggacgtnncgggagttcgcggtgggcgaggatggtagcttctgggtgnggcagacgaggcctgcaacgccaagttcgagaacgagctgcattacgagcgcaacgtctccggnccacctcagctacgncatngatcnacgc

SEQ ID NO: 51915 - DNA, 258 bp, Glycine max
  unsure (1)..(258): unsure at all n locations; Clone ID: 701140755H1
atacctncaggaatccataaganacattaattcaccactatagttgttcngtnagaagtgctacaaacaacaatggctgctaatncaggaagatgtgaagcttttgggagctactgggagcccatttgtgtgcagggttcagattgccctcaagttgaagggagttcaatacaaatttttggaagaaaatttgaggaacaagagtgaactgctnctcaaatccaacccagntcacaagaaggttccagtgttnattca

SEQ ID NO: 51916 - DNA, 259 bp, Glycine max
  unsure (1)..(259): unsure at all n locations; Clone ID: 701140756H1
cttcaacctcacgattccaantcattacacctngggcgcacgttagccaacgcctctctctcagtccccccaacacagtgacgctccgaaatccctgatgcgaatccccaaatccaattcaacctctccctaatccctccctcactccncnnnnnnnnnnnnnnnnnnngagcttgcaagcagcaagctccatcaacaacacttccgattctaaaatttcccaatcctcactcacaatcacaatgatggaggaccancc

SEQ ID NO: 51917 - DNA, 253 bp, Glycine max
  unsure (1)..(253): unsure at all n locations; Clone ID: 701140757H1
gtttaaagtaagagagaagaaagaagcaaatggcaaactttccagttgttgacatggggaagcttaacaccgaagagagacctgcagccatggagattataaaagatgcctgtnagaactggggtttctttgagttggtgaaccatgggatatccattgagcttatggacacagtggagaagctcacaaaagagcattacaagaagactatggagcaaaggttcaaagaaatggtgaccagcaaaggtcttga

SEQ ID NO: 51918 - DNA, 159 bp, Glycine max
  unsure (1)..(159): unsure at all n locations; Clone ID: 701140759H1
gtgtnnganagaacaggnacntcaaacctttgtgtcgagaatcttagccatgggtngcaacggtttgaggtacgaaatcgcacaaaccgcttacatnanattcatccttcactccctcaaacacccaacctccgncgnccaacggcgtacttgatcggt

SEQ ID NO: 51919 - DNA, 252 bp, Glycine max
  unsure (1)..(252): unsure at all n locations; Clone ID: 701140761H1
ctcccanttaaagttctttgggacacattcaacaagtttagttcacnaatcaaccttgttcctatattcacattcatatcatattataaattacattgacaagccttctccacntttttntntcacntctaaacattcagaaatgggagttggangcacactggngtacttgnctgatactaatgggcagtggncaccaccaccacaagaagaagangangcagttccaaaccgnggagcnaatnggtgana

SEQ ID NO: 51920 - DNA, 253 bp, Glycine max
  unsure (1)..(253): unsure at all n locations; Clone ID: 701140762H1
cttcctttcactctcaatccttttcgcctttgtctgcgaatggcgtcgttcgatcaggcacctcccggcgatgtcaaatccggtgacaaaatcttcaggaccaagtgtgctcagtgtcacaccgtcgaaaaaggtgccgntccacaagcaaggatccaatctgaatggtttgtttggaaggcaatcaggcactactcccggttattcttactcttcagctaacaagaacatggctgttacttgggaagaaaag

SEQ ID NO: 51921 - DNA, 255 bp, Glycine max
  unsure (1)..(255): unsure at all n locations; Clone ID: 701140763H1
agagccaccatactatgcaaatatgtaccataccacacatcccatgaaangtgtggccaaattctncgacaatgatgatgccatcacctatgcgcgcatataccattaccatcttctctaatgaataatatttccactcacaattcaatcttgtgttgtgactttaactatgtgaatttgagcaaccaaagaggtacaaggcttttgtgttcagcaaggaggcaaattagataccaagatgatggggatgataaa

SEQ ID NO: 51922 - DNA, 255 bp, Glycine max
  unsure (1)..(255): unsure at all n locations; Clone ID: 701140764H1
accctactcattctccatacctcaacgaagangttaaagagacggcaacactttgctgtccgccttgaccgagcagagcttcgtcttggccctcgattttgccctaaagtactctcagtcacaacagacacnnnnnnnnnnnnnnnnnnnnnnaatggcaccgaagcagaccaaggctgagaagaagatcgcttacgatgcgaantgtgcgacctaatggaggagtacggccagatcctcgttgtgaactccgat

SEQ ID NO: 51923 - DNA, 262 bp, Glycine max
  unsure (1)..(262): unsure at all n locations; Clone ID: 701140765H1
ganagaaaggttagggtagatcacgcaggcttcagccatgagaactcacacaattatctctctcattcttctctccttatttctccgaacccaatccgaggttataacgttatcctctgatacgtttaatgataagatcaaggagaaagacactgcatggtttgtgaaattctgcgttccctggtgcaagcattgtaagaacctgggttctttgtgggatgatttggggaaggcaatggaaggagaagatgaaatagaggtt

SEQ ID NO: 51924 - DNA, 259 bp, Glycine max
  unsure (1)..(259): unsure at all n locations; Clone ID: 701140766H1
acgtagtgnttttggtcgtgaactaggagaatggggactcgagaactatttaagtgtgaagcaagtgnaccaagtacatatctgatgaaccgtggggctggtatcagtcgccttcaaagctgtgatatgaattgctgttctaaaatctggcatgaataagttgtgggggacattaatttgtgatgatgatctaattcgagaaaataatgtgcatatgtataacactgaaattgttccatggccttgttaatgacggggc

SEQ ID NO: 51925 - DNA, 261 bp, Glycine max
  unsure (1)..(261): unsure at all n locations; Clone ID: 701140767H1
aaacgtgactttgagggaaaatggctcgntggagagagtgacccnnntccttaatctggcaaatgntcctacgattgagcgtatcatcactcctcgtattgctcttactactgctgaatatttggcatatgaatgtggcaagcatgttacntgtgatactaactgatatgagttcttatgctgatgctcttcgtgaggtaatgtacctaaaactattataataaggtggcaaaagaaaagaaaagagatgggaaatctttt

SEQ ID NO: 51926 - DNA, 246 bp, Glycine max
  unsure (1)..(246): unsure at all n locations; Clone ID: 701140768H1
tttccttnttccntanaaganncgaaaacgtcttcannaaaccaaaccantattaattgtgtcgattcctncttccagaaagaacatcaaaacncgggagtttgtggacgggaatggaaacgtagctgtcggtttgaagttgcataatanacnaagtaatgatggcttaaccganatntcctctagatatccgccgattcnanttganganattcattcnagcagatgcacgntcaatatnagatg

SEQ ID NO: 51927 - DNA, 258 bp, Glycine max
  unsure (1)..(258): unsure at all n locations; Clone ID: 701140769H1
cnctgtctngcttcttcactttctctcgttncaatcganaccanaacaaaaacatgggcagaaaattcttcgtcggtggcaactggaaatgcantgggancactgaggaggtaaagaagattgttactactttnaatgaggctaaagtccctggagaagatgtcgtagaagttgttgtgagcccnccttttgtgttccttcctgttgnaaaaagtttgctgcgccctgatttccatgtttcggcacaaaantgttggg

SEQ ID NO: 51928 - DNA, 255 bp, Glycine max
  unsure (1)..(255): unsure at all n locations; Clone ID: 701140770H1
ttttattcattttccgatggcttctgcagatgttgagtaccgttgctttgtcggtgggctcgcttgggccactgacgaccatgccctcgagagagccttctctcagtacggcgaaatcgttgaaacgaaggtctgtttgttgcaggcatcacatctgatctcacacgattcggattcggaatnttctcgatcccgttctnatctgtgatcgctgatctgtttgcgttacttgatcttatgatacttgtgttacta

SEQ ID NO: 51929 - DNA, 255 bp, Glycine max
  unsure (1)..(255): unsure at all n locations; Clone ID: 701140772H1
ggcttctaatattcaaacnctgcttgtgcttgttctggcaacattgggaacatttatgatcccttccaatgcacagcttactcctaatttctataagaaagtttgtccccaggcattgccaatcataaggtctgtcgttcaccgagcaattattcgtgaacgacgcattggagcctccttgctgcgtttgcatttccatgactgctttgttaatggttgtgatggatcagttctactggatgacacgcacaactt

SEQ ID NO: 51930 - DNA, 250 bp, Glycine max
  unsure (1)..(250): unsure at all n locations; Clone ID: 701140774H1
ctgggccttctactggggcactagcgagtggtctgctcagcagatcaccgaggcctgggctgtggcacagagattggaccttgttggtcctattgttgaacagcctgagtataacctcttgtccaggcacaangttgagncctgagtttcttccctctgtacaccaactatggcacaggcctcactacatggagtcctcttgcctctggagtgctcactgggaaatataaganaggagttataccaccgg

SEQ ID NO: 51931 - DNA, 242 bp, Glycine max
  unsure (1)..(242): unsure at all n locations; Clone ID: 701140775H1
ctcnanccgnttcctaccatagtnctaggnaagtnantnagaganaganatcacatancannatnncttctactcaatntttcttnnaccaccatnctcttaccacccctnccanatccccatcacaacgcatcatngttagcaccaagcctaaccagcttntttncaaggcacagaagcaagaggatattgatntcagcccaatctctcgccgnttanctctaaccntnctcattggtgct

SEQ ID NO: 51932 - DNA, 247 bp, Glycine max
  unsure (1)..(247): unsure at all n locations; Clone ID: 701140776H1
atcccaaagtagagaaacagcacactctcacctcactcacttgtccttgttatatttgttttatatcttgtncacaatctgtgactgttcgagttatccgaggcccctcttttatatggtcgttgataaaatggcttcgacccttttaacaaagatgcttttgggtcaccgattgatacacccttcttcgttcctcactcaccagccacngattctctcttctctattcagtaaacggctgttttgt

SEQ ID NO: 51933 - DNA, 251 bp, Glycine max
  Clone ID: 701140780H1
gaccatcttccaccttaacccttctggccgttttgtcattggtggccctcatggtgatgctggtctcactggaagaaagatcatcattgatacctatggtggctggggtgctcatggtggaggtgccttttcagggaaggaccctaccaaggttgacagaagtggtgcctatattgtaaggcaggctgcaaagagtgtcgtggcaaatggccttgctagaaggtgcattgtgcaagtttcctatgccattg

SEQ ID NO: 51934 - DNA, 259 bp, Glycine max
  unsure (1)..(259): unsure at all n locations; Clone ID: 701140781H1
gttcttttcctctttgctcttgtctcgttcacttcccatgcttctgtcaatgatttctgtgtagcagacctaaaaggtccagatagccctcaggctatcagtgcaagccacctaacacagtcacagtggatgactttgtgttctctggctttgtagctggaaacaccacaaacactttcaatgctgcattaacctccgcatttgttactgattttccaggtgtgaatggtctnggtgtatctgtggcaggttagacata

SEQ ID NO: 51935 - DNA, 239 bp, Glycine max
  unsure (1)..(239): unsure at all n locations; Clone ID: 701140782H1
ctgtgggttggggttttggagtacnagcaccaatggcttccttgatggcaattgtagtacttaggtgttgtcttggtgctctgtttttgctctgctctcttgaggtggaatgaagtaaggtacaggaagaaaggtttgcctcctggcacaatgggttggccactttttggggagacaactgagtttcttaagcagggtccaaacttcatgaaaacccagagagcaaggtatggcagttt

SEQ ID NO: 51936 - DNA, 112 bp, Glycine max
  unsure (1)..(112): unsure at all n locations; Clone ID: 701140783H1
angacganagctctgagagtgaggatgatgagaggcctaatagttttgaattagatgacaaagaaangcagagggaaaagcgaaaaggtcttgatcttgctaccacgcttga

SEQ ID NO: 51937 - DNA, 247 bp, Glycine max
  unsure (1)..(247): unsure at all n locations; Clone ID: 701140784H1
cggtttagggtttcggtttttgacccaacctttgacgtatcgaaaccttaanttcggatcaggtctgagcaatctggttggtagaacctttggtcttagagagtcaagtnttatgtctgaattagacgatcaaattcctactgccttcgatccttttgctgatgcaaatgctgatgactcgggtgctgggtcaaaggagtatgtgcatattcgcgtacagcagcgaaatggaaggaaaagcctgaca

SEQ ID NO: 51938 - DNA, 259 bp, Glycine max
  unsure (1)..(259): unsure at all n locations; Clone ID: 701140785H1
gacaattgctanaacgtatnagcancgtnanttgagcaacagcaggaagttcccaatacaaactgaaantccaagctcagaacgaggatacccaaccacctttgattactaaccccgatgattcctaagatgtcttattatacttngttcattnngtcttnttgttctctttaaagtgttgaaagaagcatctgtttggaggaaagggtggaagatcaccttcctactccataagtnatttgtttntttgtgtganatt

SEQ ID NO: 51939 - DNA, 257 bp, Glycine max
  unsure (1)..(257): unsure at all n locations; Clone ID: 701140786H1
ctaagantgtnttgtttgagntaaacacgacaaactcaantacgtgtgcattacaactnctaacccctcatcctcttcttctcctntcatacatanccntccgtttttggttggattctcggctttttagattccgtttctggtttttcccaattccaaagtagtctgttatnatcgtcatccctttataggacagacaaagctgattcacttaggagcctcaagagctatgtctacatcttctcgtgctcttccca

SEQ ID NO: 51940 - DNA, 254 bp, Glycine max
  unsure (1)..(254): unsure at all n locations; Clone ID: 701140787H1
ctaaaacgcatcagagaannncncaggtgcntcngtaatgcttgcagaattggcattggaggctggtntgcctgagggtgtcttaaatatagttcatggaacccatgatatngtgnatgcnatttgtgatgangacgacatcaaagccatatccnttgtnggttcaaatgttnccggaatgcacatatatncaagagcagcagngaaagggnaacgcgtncagtctaacatgggagccaaaaatcatgcgattg

SEQ ID NO: 51941 - DNA, 251 bp, Glycine max
  unsure (1)..(251): unsure at all n locations; Clone ID: 701140789H1
gcattcctcctccttcgnctcctcctgctgctccacctcgccatcgccgctcacggcatcggcatcaactacggcacgctcggcgacaaccttccaccgcccgcggcgtgnccgaacttcctgaagacgaagacgaccatcgaccgcgtgaagatctacgacgtgaacccggacatcctgcgggccttcgccggcagcggcatctccgtgacggtgaccgcccccaacggcgacatcgccgccttaaccaa

SEQ ID NO: 51942 - DNA, 248 bp, Glycine max
  unsure (1)..(248): unsure at all n locations; Clone ID: 701140790H1
aacacctcgtccctcacaatgcagctannaatggcggccaacgctgtcgtttcaccgtcgccgttccgacctcagccctttctccggtcatccttctccggcgtctccgtcaagctcactccccaatccataacgctttcacgctccaagcccctcaccgtcttcgccgccaccaagaaggccgtcgccgtcctcaaggggacctccgccgtcgaaggcgtcgccactctcatccaagaagacgatgg

SEQ ID NO: 51943 - DNA, 244 bp, Glycine max
  unsure (1)..(244): unsure at all n locations; Clone ID: 701140791H1
gtgaggtgtgagtgttctgcacgcaccgaatcaacaataatttctcaaacancgtgtaaaagaaacacattagactaggcagataactatggctgtacattctgattcggcttcatccgagaagaaatcaagcaatggagtgaatgagttgctgacttttaatgctgagaacatgcaaagcaacatgaaaattatctattacagccgaacatttttatctataattggtggagttgttgctggt

SEQ ID NO: 51944 - DNA, 245 bp, Glycine max
  Clone ID: 701140792H1
aaaagaagctgcatccaaggaacttttgactgtgagtcatcatcatgatgatcatgtgtacagaaaccttctgaaagatctcattgttcagtgtttgctaagactgaaagaaccttctgtcttattgagatgtcggaaagatgacctgcacttggtagagaacgtgctggattcagctgctcaggagtatgctgagaaagcaaatgtcgatcccccagagatcatgttgacaaccaagtctatcc

SEQ ID NO: 51945 - DNA, 247 bp, Glycine max
  unsure (1)..(247): unsure at all n locations; Clone ID: 701140793H1
cgttcttttcctctttgctcttgtctcgttcacttcccatgcttctgtcaatgatttctgtgtagcagacctaaaaggtccagatagcccttcaggctatcagtgcaagcnacctaacacagtcacagtggatgactttgtgttctctggctttgtagctggaaacaccacaaacactttcaatgctgcattaacctccgcatttgttactgattttccaggtgtgaatggtctggtgtatctgtgg

SEQ ID NO: 51946 - DNA, 251 bp, Glycine max
  unsure (1)..(251): unsure at all n locations; Clone ID: 701140794H1
tgaagttttgttnttntgtgcaatggcagccaagagcaaaatcctagtccttggaggaacaggatacattggaaaattcatagttaaggcaagcgcagaagcaggacaccccacttttgccttagttagagagagcaccctttctcatcctgaaaaatctaaacttattgagagctttcaagacctccggagttactcttctttatggtgatctaactgatcatgaaagccttgttaaggctatcaagcaa

SEQ ID NO: 51947 - DNA, 252 bp, Glycine max
  unsure (1)..(252): unsure at all n locations; Clone ID: 701140796H1
agcgatcatagtttcacttcggccttatccagtttagggtttcggttctctaccctatctttcacgtatcgaaaccttaaatttacgatcaggtctgagcaatctggttggtagaacctttggtcttagtgagtcaagttttatgtctgaattagacgatcaaattcctactgccttcnatcctttgctgatgcaaatgctgatgactcgggtgctgggtcaaaggagtatgtgcatattcgtgtacagcag

SEQ ID NO: 51948 - DNA, 271 bp, Glycine max
  unsure (1)..(271): unsure at all n locations; Clone ID: 701140801H1
gacgccattgatatgtcgggcaagcacgaggtggatcttgatacgaacatatggaaacttcgcttgaacagttatggccatataattggcactgaatatatatctgatcttgttgaaaaggaacataccaatcaagagcatgatgatannnnnnnnnnnnnnnnnnnnnnnnnnnnntcagaacagaagattcatttgcaaaaccttgatgaatctactgaaaatattatcaagaaagtgaaggaagcattaaaaaatggggaaggatgcc

SEQ ID NO: 51949 - DNA, 267 bp, Glycine max
  unsure (1)..(267): unsure at all n locations; Clone ID: 701140802H1
ggtgtcttctgatggcactgtcaagtttgaggagaaggatggcnttgactacgccgccgtccacagttcagctaccgggaggcgaacgtgtgccctttctcttcaccntcaagcagttggtggcatcagngaagccagatagcttagtggggagtttctagtcccatcctaccgtggaagctctttcttggaccccaagggaagaggtgcttccacaggttatgacaatgcagttgctttgcctgctggtggaagaggagatgagga

SEQ ID NO: 51950 - DNA, 256 bp, Glycine max
  unsure (1)..(256): unsure at all n locations; Clone ID: 701140803H1
ttgcggctgaggattccgaacgagtgaccttcttcgttncctcgcaaagtttacgtaatcatgggtaaggaaaaggttcacatcaacattgtcgtcattggacatgtcgactctgggaagtcaactaccactggtcacttgatctacaagcttggaggtattgacaagcgtgtgattganaggttcgagaaggaggctgccgagatgaacaagaggtcattcaagtatgcctgggtgctcgacaagctcaaagctg

SEQ ID NO: 51951 - DNA, 254 bp, Glycine max
  unsure (1)..(254): unsure at all n locations; Clone ID: 701140804H1
gttcgagcacccaaggcacggttcactgggatttcttcccaggaagcgtgctncctcgtcacaggggnaaagtgaaggcattccccaaggatgacccatccaaggcacccaagctcactgcattcttgggttacaaggccggtatgactcacattgttagagaggtcgagaagccaggatcaaagcttcacaagaaggaaacttgtgagcctgttacaattattgagaccccnccaatggttattgttggtgtg

SEQ ID NO: 51952 - DNA, 260 bp, Glycine max
  Clone ID: 701140805H1
cggggacaagagcagtaagtgaaagtaacagacggacatgaagagcctcaatttgtggccgaaccctaatggaaggattttgcctcgcatttcaacatgtccaacactcaaccttgtctattctgttcctccttctccttcttcagttcgatgccatagctctccaactcaattgccgctcaggtgcgcagtgctcggtgctggattcgctggcctctcagttgtttggcatttgttgaagcaaagtcctaaggagttgc

SEQ ID NO: 51953 - DNA, 231 bp, Glycine max
  unsure (1)..(231): unsure at all n locations; Clone ID: 701140807H1
ttgcggctagggttactagcgcanttcttctacgatttaaggaagatgggtacggaaaaggctcacatcagtattgtggttatncggccatgttgactctgggaagtccactaccactggccacctgatctacaagcttggaggcattgacaagcgtgttattgagagatttgagaaggaagctgctgagatgancaagaggtcttcaagtatgcctgggtgcttgataag

SEQ ID NO: 51954 - DNA, 260 bp, Glycine max
  unsure (1)..(260): unsure at all n locations; Clone ID: 701140808H1
actccttcagaatccccctttcccagttcccaacttcatttcaaatcaatatgaagaaaattgtgctaaagttggaaatccatgacgacaaaaccaagaaaaangccatgagggcagtatctggtatttnaggngtggagacagtctcantngacatgantgatctgaanatgactataattngnaatgttgatgctgtaatagtagttggcaagcttagaaaatgttgtgatcatgctgatatactatcagttggacca

SEQ ID NO: 51955 - DNA, 259 bp, Glycine max
  Clone ID: 701140809H1
accgtcgattaccctagtttcaaactcgtcatcgtcggtgacggtggtacaggaaagacaacgttcgtgaaaaggcatcttaccggtgaatttgagaagaaatacgaaccgaccattggagtggaggttcacccattggatttcttcacaaactgtggaaagattcgcttctactgttgggatactgccggacaagagaagtttggtggcctcagggatggatattatatccatgggcaatgcgccattatcatgtttg

SEQ ID NO: 51956 - DNA, 253 bp, Glycine max
  unsure (1)..(253): unsure at all n locations; Clone ID: 701140810H1
ggaagcnnnaacaagctcngncaggcatatgatnaggatnntnacatgcctggtggtgcannganggtacantgcgcccagnagtaatgactttntgtnganncnagattcagaattgatgaaaatgatgatatcatgctacctccatggtgaagctnngcttttctctgctctcatactcttgtccttncaagcagttgtgtctgtaacaccactgcattttcaacatccactagncttcnaatcaatcaag

SEQ ID NO: 51957 - DNA, 256 bp, Glycine max
  unsure (1)..(256): unsure at all n locations; Clone ID: 701140811H1
caaatcaaaagaaaaaaaaatatatgtttatcantgtctctctctctttcaagctccaatcctcccttttttttcttcctttaacaccgttttttctcttcaatcattctgctaaaaggaggngacttgagcacagaacataagcatagaataaagtgtgcaagggcaactgcttttccaagctgagaaacaaacaacacaacaagggtgttgtnnncncnctattattcattgtctgtngtcatgagcttccaca

SEQ ID NO: 51958 - DNA, 260 bp, Glycine max
  unsure (1)..(260): unsure at all n locations; Clone ID: 701140812H1
gtttacttnanttaattactcagcactctcaaaaaaataaaaacttcttttataaattngaaaagggactcttcactcttctctttctctctntgcaatgtaggtcgtcggagaatggcaaagtgtcatcagaanaacgtcggntcnatcgctcttgancancgccactccgnnaaaaatgcnagnnccnngnggagannnctgngtgntcngcngnttgatcttcgangccgtcagctgnggnggcacctctcgctang

SEQ ID NO: 51959 - DNA, 255 bp, Glycine max
  unsure (1)..(255): unsure at all n locations; Clone ID: 701140813H1
gagggttgagtactccncattgtttgagacaagaaggtgcngaggaaggttcatctacaggtcctttgcaatctcattatttgtngccatatgctttatatggcattacagatttanccacataacaaaggattnnaatggaaactgggcntggcttggtatgcttgcttcagagctgtggtttggctttactgggtccttactcaagccctagatggaaccttgtgttcagacaacccttcaaanacagactct

SEQ ID NO: 51960 - DNA, 259 bp, Glycine max
  unsure (1)..(259): unsure at all n locations; Clone ID: 701140814H1
cccttgttatctctctttcattctcacttgtactcatctctttttcacaactttttttgtaccttctgatctaatggcagttccagtgattgatttttcaaagctgaatggtgaagaaagaaccaaaactatggcacagnttgctaatgggtgtgaagagtggggattttttcagttgatcaaccatggtattccagaggaactccttgagagggtgaagaaggttgcctctgngttctataagctggaaagagaggag

SEQ ID NO: 51961 - DNA, 262 bp, Glycine max
  unsure (1)..(262): unsure at all n locations; Clone ID: 701140815H1
gggagatantgcacgtgcaangtggncaatgcggganccnaatcggttccaagttctgggaagtgatatgcgacgaacacggcatcgaccccaccggaaagtacaccgncgacgaggcctccgatctccaactggagaggatcancgtctactacaatgaggcctnccggcggaaggtacgttccccgggccgtcctcanggatctggngcccggcaccatggacagcatcagatccggcccatacggcaagatcttcaggc

SEQ ID NO: 51962 - DNA, 268 bp, Glycine max
  unsure (1)..(268): unsure at all n locations; Clone ID: 701140816H1
tnccaacatggctcctcgagaagaaaatggcagcggatgagccagcatttgcttctattacaattacaaaagctaatcatctccgttttcttcatcttccccaaaccctcgccgcncaaggccaaatacccaacctctgatacatacttcccaacttcaacacaccacacaatantaacggncaggaaccccttncctccgtctacaccttctttccctttgatcccacactcctatgcccaaaagggttagcgctaacaacagagaa

SEQ ID NO: 51963 - DNA, 270 bp, Glycine max
  unsure (1)..(270): unsure at all n locations; Clone ID: 701140817H1
gcttaagaacacaaacaggagcactgttgatgttattgcatccacgactgtatttttactattcgtatagctatgagcttacaggagatcttgctgaaattcggggcaacctccttgcattncaccgatttgcgactctccgncatgatgagctgggacaggaaacacttcttaatttgttacttcgaaactaccttcactacaacctatatgntcaggctgagaagttgaggtccaaggctcctcgatttgaagcacattcaaaccagc

SEQ ID NO: 51964 - DNA, 264 bp, Glycine max
  unsure (1)..(264): unsure at all n locations; Clone ID: 701140818H1
tagctagntgtttaaagtaagagagaagaaagaagcaaatggcaaactttccagttgttgacatgggnaagcttaacaccgaagagagacctgcagccatggagattataaaagatgcctgtnagaactggggtttctttgagttggtgaaccatgggatatccattgagcttatggacacagtggagaagctcacaaaagagcattacaagaagactatggagcaaaggttcaaagaaatggtgaccagcaaaggtctgagtc

SEQ ID NO: 51965 - DNA, 261 bp, Glycine max
  Clone ID: 701140819H1
ggagccatgtacgacccttctttgaaaaaatggcatcatccaactatatcaacaccgcccacaaaattgattgttttacctgtggcttcttctggcggcttagtttgctttcttgacattggtcatcgaaacttctttgtttgtaacccactgactcaatccttcaaggagttgccagctcgatcagtcaaggtctggtctcgtgttgctgtagggatgatggcaaatggaaactttgctggttcaggctacaagatcgta

SEQ ID NO: 51966 - DNA, 258 bp, Glycine max
  unsure (1)..(258): unsure at all n locations; Clone ID: 701140821H1
gtcaactcactggaaactcggttgaactcggtgtgtgtagaaatggcgaaacttgaagccaagctagggatgatcttggactcggtgggtcagttcttctccggcaaggaccatcttccttattgtgactctgacgtcgtagctggatgtgaaaganaggtcttggaggcagaaaaacaatcatctcaagagtatatgcaagactgtctcctgcgtttatcatgggctcttgttcactccaaacacccacaaganctg

SEQ ID NO: 51967 - DNA, 236 bp, Glycine max
  unsure (1)..(236): unsure at all n locations; Clone ID: 701140822H1
ccncgaggtggccaattaatngnaaactcgtcatcaaggtgaatgactacnaanaaatgcggtcngtgaancgcgtggtgtcgncaatgttcaacacagtctcagggaagaagattgctatttngggatttgctttcaaganggacactggtgacantagggagancccagccattgatgtgtgcaagggctgnangggagacaaggccaagttgagcatatatnatcctcaggtc

SEQ ID NO: 51968 - DNA, 263 bp, Glycine max
  unsure (1)..(263): unsure at all n locations; Clone ID: 701140823H1
ggcggatccaatcgngaaggttctgatacgcgtttgcnctcttagcttccntcttgctgtgttcgcacgcttnctccgacgttcccttcntcgttgctcanaagaaggcntcnctcaatngtntcaagncnnggngccgaaagggtctccgtcaccatcgacatcttcaaccaaggaacctcgacggcctatgatgtaagcttatcagacgatagctggcnaagtgatgcttttgatgtaatcagcggtagcacttcaaagtg

SEQ ID NO: 51969 - DNA, 259 bp, Glycine max
  unsure (1)..(259): unsure at all n locations; Clone ID: 701140824H1
ctctcctcccatccctccttccctctccctctcaacttcattttncctttcaaatagtaacactagagaacaaaagctctagctagaactgataatgtatatacaagccatcattcagaacaattagtgcatcctctttcatctgaagaacttgtttagtttgctcctaaaatatttgtctgaggatgtggtgcagaaatccttacccttccttctttattaaagctatagcatctgcaatcattaatttcttattccg

SEQ ID NO: 51970 - DNA, 258 bp, Glycine max
  unsure (1)..(258): unsure at all n locations; Clone ID: 701140825H1
ctgaatcttccatctccatttttcacctgatttctttgacnnggttccagagatgtttaatttncaaacaaagatgagcagaactgaattatctaatatgaagcaacctcctgttcccctggcaaccctgattggccaggagttacggaatggaaaaatcgaaaagccttttgtgaagtatgggcaggctggcctggcaaagaaaggagaagattactttttaatcaaagcagattgccaganagttccaggggattc

SEQ ID NO: 51971 - DNA, 125 bp, Glycine max
  unsure (1)..(125): unsure at all n locations; Clone ID: 701140828H1
cgggaaagtgagggaaagcacgagaaagcttgcgaaaatttcacgttcttctatttgcaaacactgattttccacacaacatacgaaangcnnanntntnancagnanangggntgngntnaaat

SEQ ID NO: 51972 - DNA, 254 bp, Glycine max
  unsure (1)..(254): unsure at all n locations; Clone ID: 701140829H1
gtttatngtgaggagaatatgaagttgtttgttttctttgttgctgcagtagttttngtagcatggnnatgccatggcgcaggntancaaangttncctntntgaatnaaaactggctatngtgagcgttcttcggaggtaaaatgcgnaanttttangcttgctgtggaannatacaacatannatttnatatnaatantcctgnagagaaatttaagttcaaaggactcattaatagaagttattgatgatg

SEQ ID NO: 51973 - DNA, 260 bp, Glycine max
  unsure (1)..(260): unsure at all n locations; Clone ID: 701140830H1
atcccctttctcnttctaacnagtgagganaaatggcgcgtaagaagatcagagagtatgactcaaagaggttgttgaaggagcactttaagagactctctggcaaggagttgccgatcaagtctgcacaaattacngcnnnaactgatttcnctgagctacaanagnaggaaccctggctttcatcttctaaattggttgttaaacctgacatgttatttggaaagcgtggcaaaagtggtttggttgcctgaatttgg

SEQ ID NO: 51974 - DNA, 260 bp, Glycine max
  unsure (1)..(260): unsure at all n locations; Clone ID: 701140831H1
tccagacatagtaaggaanaacagactgannccnctttcttgattctatgggtggtggtgcatggccgttcttagttggtggagcgatttgtntggttaattccgttaacgaacgagacctcagcctgctaaatagctatgtggaggtaaccctccacggccagcttcttagagggactatggccgcttaggccacggaagtttgaggcaataacaggtctgtgatgcccttagatgttctgggccgcacgcgcgctaca

SEQ ID NO: 51975 - DNA, 266 bp, Glycine max
  unsure (1)..(266): unsure at all n locations; Clone ID: 701140832H1
ggnactttcaatcactatgtgattgttaagttcaaagatggtgtggcagttgatgatctcattcaagggttggagaagatggtctttgggattgaccatgtcaagtcctttgaatggggaaaggacattgaaagtcatgatatgctaagacaaggtttcactcatgctttcttgatgacattcaatgggaaagaggagttcaacgcatttcagactcacccaaatcatcttgagttctcgggagtgttttcacctgctattgagaa

SEQ ID NO: 51976 - DNA, 269 bp, Glycine max
  unsure (1)..(269): unsure at all n locations; Clone ID: 701140833H1
ttccttcaagaactccgngacgcccccgacatccaaatcctcatcacctcccacaaaaacccttcacttcagccctctctcccacttcctctcccaccacttcggcccccacgaccttctccccaaaaccgtccctctcctcttggagcctcgtcacaacgctctctctcttccccaaaacgatcatttcaacgctcttgcgattgctgcgttggaggccgccaataactctcacgcgccctacagcgcgtccccctccggcgtcgcgc

SEQ ID NO: 51977 - DNA, 266 bp, Glycine max
  unsure (1)..(266): unsure at all n locations; Clone ID: 701140834H1
attggcttctatcagtcacggattacgttgttgaaatggttccttcacaacaaaagttnnaaggatggttcaaatatggagattatgacgacacgacaacgaacnnnanctccacatgaatgtcnatnnnttgcgcaagttnatgcaatgcttcttgaatgtctggataatttnaaagatcaaaatgagttctattatgtgtcaaaaggttcagatgattcagatcaagacagtgcaaagacaaaaaatgatgataagtggtggtt

SEQ ID NO: 51978 - DNA, 259 bp, Glycine max
  unsure (1)..(259): unsure at all n locations; Clone ID: 701140836H1
gntccangntcaactcccataagttgatgaagcatttnatgnttcntcaanttatgggagtngatnctggaancaancctgtttgccattnccttggnagcaaggcnattttatgggtacccaatttatctganngacactgcctatcagaccaacattgttgcttaattagtccatgcatcttgagcaccatgagaatgagattgtgtataaaataaattatcatgtgctgtgtgncctgcaagtactaccttctcta

SEQ ID NO: 51979 - DNA, 255 bp, Glycine max
  unsure (1)..(255): unsure at all n locations; Clone ID: 701140841H1
gttgctctcctcagaattggtaccagaggaagtccactagctctggctcaggcatatgagaccagagacaagctcatggcatcacatgcagagctagcagaagaaggggcnattcagattgtaataatanaaacaactggtgacaaaatactatcacagccacttgcagacattggtgggaagggcctattcacaaaaganatagatgaggcactcataaacggtgacattgacatcgctgtccactcaatgaaa

SEQ ID NO: 51980 - DNA, 253 bp, Glycine max
  unsure (1)..(253): unsure at all n locations; Clone ID: 701140842H1
cgaaaggnaggtgggataatgatcaggaagctgaacatccagaaggtgaagattatngtccaactcgcaatatatcgtcttcaagatgggcagctggagataactctcctgttgatgagggtgagatcctcaatgatgaggaaatgcccaaacgaaggaggagggtgtctcctgagttattggatggtngactaaggaacaagctattaagccctgaggaatctaaggtagaaggtatngaaagagctagggc

SEQ ID NO: 51981 - DNA, 255 bp, Glycine max
  unsure (1)..(255): unsure at all n locations; Clone ID: 701140845H1
caagtntttacctggggcatgtttgatatccaatgatggcacaaagaagatgtgtggtgatgctcatagggcatggtacactagggggtgtcctagcaaatatggttgggctgctctaataggccttgctctntacatcatnttcttctcacctggcatgggaactgttccatgggttgtgaactcagagatctatcccttgaggtacagaggggtttgtggaggaatagcatccacaactgtttggatttccaa

SEQ ID NO: 51982 - DNA, 257 bp, Glycine max
  unsure (1)..(257): unsure at all n locations; Clone ID: 701140846H1
tttcgaaccccatttctggtttctcttccccttttgttattcatcttcaacctcaccccttcgcacgcactctatggagcatcctcacccgtncttcaactcactccctctaacttcangtccaaggttctganttcnnatggagtngtncctngtnganttcnnngnnccatggtgtggacactgttaggttctgactcctatatngnagatggnagctactgtnttgaagggtgttgttactgtggcagcaatga

SEQ ID NO: 51983 - DNA, 264 bp, Glycine max
  unsure (1)..(264): unsure at all n locations; Clone ID: 701140848H1
actgtgngttcagaaactgccaaaaactcacgcagagaaagtacaagtagaaggagaagaagcacaatgaagctgctctctccaaaattgttcantctcgccattctgctcgcggcggcgctgnttttanccttccgccgacgcatcagtcncaatgagatgcagaaacatgaanccacggaatcaagggacgtggttgaagagaagttgcgagtgcagagcttgaagaattcgtcaatggcagaanggtcagggggtgcttta

SEQ ID NO: 51984 - DNA, 256 bp, Glycine max
  Clone ID: 701140856H1
tggagtgctccttacatcgataaccccagttacaagggcatatggaagcctcgcgagattccaaaccctgaatactttgaactcgcaaaacctgattttgagcctattgctgctattggcattgagatttggacaatgcaggatggcatcctatttgacaatgttctgatagctaacgatgataaagttgcagaatcctatcgggagactacatggaagcccaagtttaccgttgagaaagacaaactgaaggctg

SEQ ID NO: 51985 - DNA, 256 bp, Glycine max
  unsure (1)..(256): unsure at all n locations; Clone ID: 701140860H1
caanagtgnaagcaaanaccaaagtgagagagaaaatgatgaagccatcgatgctcagatctcttcactctgncgccacccgcggcncctccnacctctcccgccgtggctangcctccgagccggtgccggagcgcaaggtggccgttctaggtgccgccggcgggatcgggcaacccctctcccttctcatgaagctcaaccccctcgttttcagnctctncctctacnatatcgccggaactcncggtgtcgc

SEQ ID NO: 51986 - DNA, 256 bp, Glycine max
  unsure (1)..(256): unsure at all n locations; Clone ID: 701140861H1
ggaagccctcagaacacttttgtaccanggctgattgatcttgccatcgcgaggnacactttgattggtggagatgacttcaagagtggtcagaccaaaatgaaatctgtgttggttgatttccttgtgggggctgncatcaagccaacatctatagtcagttacaaccatctgggaaacaatgancgtatnaatctttcggctccacaaactttccgttccaaggaaatctccaagagcaacgttgttgatgata

SEQ ID NO: 51987 - DNA, 258 bp, Glycine max
  unsure (1)..(258): unsure at all n locations; Clone ID: 701140862H1
gtaccttctcccacgcagttacanccanngggtaccaanctacaaaggatgatcttactgtttatgcagctttgccaactgctccatcagatgaatatggaaatgtttccaggtggtacaagcacattgatgctttgtncagaatctctggtgttactggcgagggatctggtgttattgttgagggatctctagtngcagagcctgttgcaactccccctgctgcagacacaaaggctgctgttgctgaggatgacg

SEQ ID NO: 51988 - DNA, 242 bp, Glycine max
  unsure (1)..(242): unsure at all n locations; Clone ID: 701140864H1
gagacggcaggatgttgtccgttaccnatgtctatcacactttaatgtgctaattgtttaacctgtgcaatttatgtttgaaattgtttaactttaagatttattgtttaaattggcgagggagctaagttggtgataagttgccatggggcgttgaccatgggatggtatacaggtttttcccaagctttgttatgagcttggagttatattggttatttgtcatattatgtgtgggaacc

SEQ ID NO: 51989 - DNA, 263 bp, Glycine max
  unsure (1)..(263): unsure at all n locations; Clone ID: 701140865H1
attcccatctcnnnggntgcacattaattcggcatcnctcgaagaagcgcgtttgatctaaaancataaacctctgtctcgttagatctccttcttccgttctctaaacctctcctccgatccgatctgatccaaaatggcgacgatgacgagcttgattggtctcatcaataagatccaacgagcctgcaccgttttgggagatcacggtggcgagggcttgtcgctctgggaggctcttccctctgtcgccgtcgtcggtg

SEQ ID NO: 51990 - DNA, 244 bp, Glycine max
  unsure (1)..(244): unsure at all n locations; Clone ID: 701140866H1
ttttccttggaccattctctatcaattntgggatccgnctcctaatgatagtacngtatggtgtccaacttgagaaaggaccatctgatcgacggactgctgatttccttgtggatgatgatatttggtgcctttgcactattggttttgtctgctatccccatattttggtccccatttttggcagtaccacttgtttttatgctcctttatgtttggagtagagaatttccaaatgcccaaa

SEQ ID NO: 51991 - DNA, 254 bp, Glycine max
  unsure (1)..(254): unsure at all n locations; Clone ID: 701140868H1
atcagtgaggatctgagaagaagangcattggccagangcatgactgcaaggngcagcnaccccataaggggtcgtcttcggccgcaaatggccttggccttggccattgctttgatttctatcactttggtttccgttaatgctgatggttacccttactattcccctcctccaccttaccagnacaccncaccacctcctcntccttacctctacaagtctcctcccccancctctccttcacctcctcctc

SEQ ID NO: 51992 - DNA, 162 bp, Glycine max
  unsure (1)..(162): unsure at all n locations; Clone ID: 701140869H1
gtnacattntcattatggtgaccaaganannatctgttancaatatatattcantgacatacacagncaggagncgcnaaacctgagttgaaagcgtcagatcacaacagatcnaccantcacntcaccanntcgcntgcagaaggcaantcnancgagaag

SEQ ID NO: 51993 - DNA, 235 bp, Glycine max
  unsure (1)..(235): unsure at all n locations; Clone ID: 701140870H1
cctgagntggccaattactggaaaactggtcatcaaggtgaangactancaaaaaatgcgganngtgaaccgcgtggtgtcgtcaatgttcaacacagtctcanggaagaagattgctattttgggatttgctttcaagaaggacactggtgacactagggagaccccagccattgatgtgtgcaagggcctcttgggagacaaggccaagttgagcatatatgatcctcaggtc

SEQ ID NO: 51994 - DNA, 254 bp, Glycine max
  unsure (1)..(254): unsure at all n locations; Clone ID: 701140874H1
gnttctccagcctagtttgttctcagatcttcttcttccatngaacatnaganannaagtggngaagataggcgagggaacatacggcgtcgtttacaaggntcgcgancgcgnnaccaatgagacaatcgctgctgaagaagattcgcctcgagcaggaggacgaaggcgttccnagcaccgncattngngagatttctnttctcaaagagatgcagcataggaacattgttaggttgcaggatgtagtgnac

SEQ ID NO: 51995 - DNA, 253 bp, Glycine max
  Clone ID: 701140876H1
caaacacaaaccgaaaaggcgaaaggggttttccgagtgagatctagggtttccatcgattcggagagaggatattgatcgaatcacctcagcgagcaaggacaggaggtggagtactagatcatggattcggtgccttcgaattcgcatggaaacctcgatgagcagatttctcagctcatgcagtgcaaacccttgtccgagcaagaggtaagggtcttgtgtgataaggcaaaagagattttgatggaag

SEQ ID NO: 51996 - DNA, 259 bp, Glycine max
  unsure (1)..(259): unsure at all n locations; Clone ID: 701140879H1
tccctacntctcccttcaagatgcagatggntcgtcaagaccctcaccggcaagaccatcacccttgaggtggaaagctctgacaccatcgacaacgtcaaggccaagatccaggacaaggaaggaatccccccggaccagcaacgtctcattttcgccggaaagcaacttgaggacggcctcacccttgctgactacaacattcagaaggagngtactcttcacctcgtcctccgtctccgtggtggcatgcagatct

SEQ ID NO: 51997 - DNA, 261 bp, Glycine max
  unsure (1)..(261): unsure at all n locations; Clone ID: 701140880H1
caaaattccgccggagaaaatctttgttcggtatttgcaatcgggagaggcgagcganccgagccggcgagcgacataaggtcccttctcaggcatggcgatgacagtacacgtccttgctgggttggcttttatgttttcagctagcattttgcttcagattctggcatgtgcaatatataacaattggtggccaatgttatcagctctgatgtatgtgctggttcctatgccttgcttattctttggaggtggatccac

SEQ ID NO: 51998 - DNA, 260 bp, Glycine max
  unsure (1)..(260): unsure at all n locations; Clone ID: 701140882H1
ctccgttgaaccagttcatatctcccagattgccaaagagctcaaccttagtcccaatcactatgacctttacggtaaatacaaggctaaggttttgttgtcggttcttgatgagcttcaaggatcagaagatgggtattatgttgtngtcggaggcattactccgacgcctctcggggaaggcaaatctactactacagtgngactttgtcaagctttaggtgcttttcttgataaaaaggtagttacctgccttcgtc

SEQ ID NO: 51999 - DNA, 258 bp, Glycine max
  unsure (1)..(258): unsure at all n locations; Clone ID: 701140883H1
tgcacgctctgcttccagcgagtgttctttcttcgtttcaacacnttaatttgcannangntgcttntttnnaattgagaaatggcacaagaaacctttctattcacatctgaatctgtaaacgagggtcaccccgacaagctgtgcgaccagatctctgatgcagtgctcnatgcgtgccttgaacaggaccctgacagcaaggttgcctgtgaganatgcaccaagaccaacatggtcatggtctttggagagatc

SEQ ID NO: 52000 - DNA, 247 bp, Glycine max
  Clone ID: 701140884H1
tttcaatacaatattgctctctaagctttgattcttcttaattcatacccttcccacactcattcattgttgtgcgtctggttttctgcctgaaatggagtacatgaaccagagaccaaaatatgattgccttctttttgatttagatgatactttgtatccactaagcactggtcttgcaaaagcatgtggccaaaacattaaagactatatggccgaaaagcttggcatagagaaaagcaaaatt

SEQ ID NO: 52001 - DNA, 227 bp, Glycine max
  unsure (1)..(227): unsure at all n locations; Clone ID: 701140885H1
cngnancgagttacaacgtgtatgacgctgtaaaggtggcgagannacatntacatganattagtgagcctgcaganatccncgaagacctttgnttanagcttggtgtntgaccaactggatgacatgccattngggtgcgtctggtgcanntcgnncagtagactgtgncttcgtngntgncacaacctgctggnnttagnntcccangatggtcaacttgcncc

SEQ ID NO: 52002 - DNA, 120 bp, Glycine max
  unsure (1)..(120): unsure at all n locations; Clone ID: 701140887H1
tnaggagcacatnncntggtggaggtggtgcaggaggaggtggaggtggnnattaaggaggcatgcncaggagatntgtgnacggatggagaccagaggnggngtgggccggaanaantg

SEQ ID NO: 52003 - DNA, 253 bp, Glycine max
  Clone ID: 701140888H1
gaggttggtttatgtagttgtgtggttcaatctgtatgtggcatgcacattcattcaagtttcaggtctggacgcctctaacttcagcaagtgttggttcccagcaatttacaactttggtgactcaaattcagacacaggagctgtttttgcagcattcacaggggtgaagcctcccaatggcataagcttctttggaagcctctcaggaagggcctctgatggtcgtctcatcatagattttatgactgaa

SEQ ID NO: 52004 - DNA, 250 bp, Glycine max
  unsure (1)..(250): unsure at all n locations; Clone ID: 701140889H1
gaaggtggtatggcgaaggacgttgaggttgctgngcgtggctccttctctggnaaggactaccaggaccctccaccagcaccactcattgatgctgaggagctcacaaagtggtccttttacagggctctcattgctgaattcattgccactttgctcttcctctacattactgtgctcacagtcatagggtacaagcaccagactgacctcaaggaaaatggtganatctgtngtggggttggcattc

SEQ ID NO: 52005 - DNA, 253 bp, Glycine max
  unsure (1)..(253): unsure at all n locations; Clone ID: 701140891H1
ttggactgcctggaaacggaggcactgaagaagtgctcatcaggaagaggggtttctctgagactgaaactggtcatgaagatgagtctgccaccaccgtggatttgatgcttaatctttcttctaaggagnnnnnnnnnnnnnnnnnnnnnnnnnnnnnnnnnnnngataagcacaagactttgcctaaggagaagacccttctgccnncagatcctgctaagcctccagccaagacgcaggtggtgggttg

SEQ ID NO: 52006 - DNA, 251 bp, Glycine max
  unsure (1)..(251): unsure at all n locations; Clone ID: 701140892H1
agggcatactgacaaggatggatggtaccctcctggccatggtgatgtcttcccatcattattgaacagtggcaaacttgatgcactattgtcacagggtaaagagtatgtgtttgttgccaattcggntaacttgggagctatagttgacttgaaaatcttgaatcatttgatccagaacaagaatgaatactgtatggaggtgactcccaaaacattggctgatgtaaagggtggcactttgatttctt

SEQ ID NO: 52007 - DNA, 258 bp, Glycine max
  unsure (1)..(258): unsure at all n locations; Clone ID: 701140895H1
cagggaactgcatatactcagtctatntcaagcaagtcaaagaagaagaagtagataagcaatttctcacgttcagccacacacaagactctatcatggatatggaatacagaatcctgtaacagactaggtttgagtttgagagagcacgaggaagtagttgtgaaattttggctgaaggatctagctttttgttgtagcttaagaatttttgcttttctccatcgaatgtagttgaactttttcaaaactaacagg

SEQ ID NO: 52008 - DNA, 263 bp, Glycine max
  unsure (1)..(263): unsure at all n locations; Clone ID: 701140896H1
gggagaatatgaagttgtttgttttctttgttgctgcagtagtnttggtagcatggccatgccatggcgcaggctaccaaaggttccctctccgaatgaaaactggctatggtgagcgttcttcggaggtaaaatgcgcaagttttaggcttgctgtggaagcacacaacatccgagccttacaaccattcctgaagagtgcgttgaaccaacaaaggactacattaatggcgaacaatttagatcagactctaaaacagtta

SEQ ID NO: 52009 - DNA, 295 bp, Glycine max
  unsure (1)..(295): unsure at all n locations; Clone ID: 701140902H1
ctcggtcctaattcatcattgttccacaatttccacaatgncccagcagtncgcagttcacggtacagaaggctcatcaagcaacattcccatagagtatcagcagcagcagagtccagtgacacttagccgctatgagtcacagaagagaagggactggaacacttttggacaatacttgaagaaccagagacccccggtacctctctctcagtgcaattgcaaccatgtgctcgatttcctccgttatctggaccagtttggcaagaccaaggtccaccttcaagggtgcagt

SEQ ID NO: 52010 - DNA, 280 bp, Glycine max
  unsure (1)..(280): unsure at all n locations; Clone ID: 701140903H1
ccagaatccatttcatgctttcctcctatgctccagttatctctgctgagaaangcctaccatgaacagctttcagtggctgaaattaccaacagtgctttcgagccatcgtccatgatggccaagtgngaccctcgccacggaaagtacatggcatgttgcctgatgtaccgtggtgacgttgtgcccaaagatgtgaatgctgctgttgccaccatcaagaccaagaggacaatcagtttgtggattggtgccctactggtttcaagtgtggtattaa

SEQ ID NO: 52011 - DNA, 288 bp, Glycine max
  Clone ID: 701140904H1
gcactctatgacatttgcttcaggaccttaaaactcaccactcctagttttggtgatctgaaccacctgatttctgcgacaatgagtggagtgacatgttgcttgaggttccccggacaactgaactccgacctgaggaagctagcagtgaacctgatcccattcccacgtctccacttcttcatggtggggtttgcacctctcacctcacgcgggtctcagcagtacgtgtccctcactgtccccgaactcacccagcaaatgtgggacgccaagaacatgatgtgt

SEQ ID NO: 52012 - DNA, 285 bp, Glycine max
  Clone ID: 701140905H1
tcagctgtatttctatatatattaatttatcaaaatgcaggaagtcagacggaaagaagaagctgctgcacgagctggaattgttcttgaggagaagaattggccgccatttttcccaattatccatcatgatatcgctaatgaaattccaattcatcttcaaagattgcagtatgttgcatttacttcattgttaggatttgcattgtgcatcacatggaatattgtagctggtcattcagcttggattaagggagaaggagtgaaaatatggtttctgctatt

SEQ ID NO: 52013 - DNA, 281 bp, Glycine max
  Clone ID: 701140906H1
aatcgttcctatcatcacttctcaaatctcgaaccctctcgttcgtgccgatcactaggtcacacttcatcaatggcgggtagaggcaaaaccctaggatccagcgccgctaagaaggccacctcaaggagcagcaaagccggcctccaattccccgtcggtcgtatcgccaggttcctcaaggccggaaagtacgccgagcgcgtcggcgccggagcccccgtctacctcgccgccgttctcgaatatctcgctgctgaggttttggaattggctggaaa

SEQ ID NO: 52014 - DNA, 291 bp, Glycine max
  Clone ID: 701140907H1
cgagtttcacagcagcaatggtgtacgtcaaggctcagaaatcaaaagcctacttcaagagatatcaagtcaagttcaagagaagaagagagggaaaaaccgattaccgtgccaggattcggttgattaatcaggacaagaacaaatataacactccgaaataccgatttgttgttcgctttagcaacaaggacattgttgcacaaataatatctgctagcattgctggcgatattgttcttgctgcagcatatgcacatgagctgccacaatatggtcttgaagtagggc

SEQ ID NO: 52015 - DNA, 293 bp, Glycine max
  unsure (1)..(293): unsure at all n locations; Clone ID: 701140908H1
cttgaataggtgtanagtgctaaagggttaagtttgaaacctagnntnctagttgcntcatcaggtccanatccataantttcctgggantcaaacgatgatgatgtttgaagatatgggtttttgtggggattnggatatgttttctgctcacccttggagaaggggacattaccacccggcaaactgantccagaggtgatagttgaggatgnttatagtgatgaagaaattgatgtagacgagctcgagaggaggatgtggagggacaaaatgcgtctgaagcgattgaa

SEQ ID NO: 52016 - DNA, 279 bp, Glycine max
  unsure (1)..(279): unsure at all n locations; Clone ID: 701140909H1
gcatatggtcctgttagtgaagtctacgtgccntacgagtgaaggagttgacgcttacatttggttactggcaaaggcttacgttgttgtgaatgatgcttgctaccatcaaatcattagccatggctaaacactcatgcggttgtggagccattcgtcatagcgacaaacaggcatctgagcgtggttcaccctatttacaaacttctgtttcctcactatcgtgacancatgaacataattcactgcccgcaaatccttggtcatgccgacggtatt

SEQ ID NO: 52017 - DNA, 291 bp, Glycine max
  unsure (1)..(291): unsure at all n locations; Clone ID: 701140910H1
gccatatctttacttcccaaaacttgctctacncatgagtttccttcgttcttttgcaagaaacaaggatatatccaaaagtaggacgcagaggtatccattgcatgcagaaactatgtgcagaaaaaatatctcctgattcactagagaaggcccaaaatcgtgtgatagatgctgcactcacacttgttcgagaaaatacaaggcttaagaaagaactcgtgcatagtttgggaggtgctgtggcaacttcaatcttcttggagttccttgggtcataattcatcgttt

SEQ ID NO: 52018 - DNA, 75 bp, Glycine max
  unsure (1)..(75): unsure at all n locations; Clone ID: 701140911H1
cattataccagtaccaactggcggacaacactggataccggtttttcacattcnggaccccaccatttcngntcc

SEQ ID NO: 52019 - DNA, 291 bp, Glycine max
  unsure (1)..(291): unsure at all n locations; Clone ID: 701140912H1
ctgaaccatgcaagtnttctctaacgctcgccgagcctcttggcttctcctctttcctcatctccgaacctcggaagctcttcactccaccgcgtctctctcttctcagggctcgcgcaacgtgattcccggcaagtgaacaccgatccggtacactgtttgtcgaaggcttttttctcttccggaatggataccgttgaagcaactccatcagaggatgtgaaggaattatacgataaaatgcttgactctgtaaaagttaaacgatcaatgcctccaaatgcttggtta

SEQ ID NO: 52020 - DNA, 142 bp, Glycine max
  unsure (1)..(142): unsure at all n locations; Clone ID: 701140915H1
aaaaaagactttctcttgaatcatcatgaccatgaaagattccattgttctatattcagctttgggaagaggacaccttgtttcaatggtggaactaggtaaactcatactaagccaccacccttcactttccatcannatt

SEQ ID NO: 52021 - DNA, 281 bp, Glycine max
  unsure (1)..(281): unsure at all n locations; Clone ID: 701140916H1
gtacgtggggaaagagcaacgcgacnggagcgtatgcagacncatgatcaagaccttcacacacaagaaagttcagttacttctgggcccaacgtgacatccatatggttcttctggacgaggctagagagcatgctgtactccaagctgcagcacgggaggacggtagagaacgatgacatcatgagccaagtcatgaccgtgctcagcttcgatggcagcgatcgaggctgggcgatcttctgcagaggcgccaccgagatggccagagccaagggtga

SEQ ID NO: 52022 - DNA, 77 bp, Glycine max
  unsure (1)..(77): unsure at all n locations; Clone ID: 701140917H1
ctgtcctctcgaagctttcatcgttcaacatattctcaccatcnnagtcatgggcctgtatcttgtttnngngccaa

SEQ ID NO: 52023 - DNA, 294 bp, Glycine max
  unsure (1)..(294): unsure at all n locations; Clone ID: 701140919H1
cgancaatncgagtncaagtagcgagagaagtagagagaggagcggtgngagaaggaagaaggggaagttggtactagagagagtnccgaagagggaanaggaanngaatgtgngctgggctttcggagtcgtgttcgttttcctacttccaacgaagatncattctnccgagtagtactacggaccctacgtctaataatatttctccgcaaggagaatcaaacggattattaccgccgaaagctggcagaagggtgagtttctcgcggggtggcncgtttggctctgtttat

SEQ ID NO: 52024 - DNA, 289 bp, Glycine max
  unsure (1)..(289): unsure at all n locations; Clone ID: 701140920H1
cgangtcgtcgctctcactccggctccgtttccggctcctcctctcgcnccctcttccccctccgactcccgctncctcctgctccgctcgcgctccgtttctcgttcccgctctccctcgggctccagatcctcctctccctcctcctcgtctccctcccgaagttctcgcagccgcagccctcccccacagcgccgccgnngtcctgctgatgcagctaggcgacgtcggtctcctcatcacaacatacgcnnntaantntnngnnnngnnagcttntnctgnnngt

SEQ ID NO: 52025 - DNA, 289 bp, Glycine max
  unsure (1)..(289): unsure at all n locations; Clone ID: 701140921H1
gcggcctgctggccgcgcaggaagtgaacagccccttcgagtattgcgacattgtgaccaccacgactcacaanagnnntgcggggcccacgtncggggatgatcttttaccggaagggccccaagccgccgaagaaggggcagccggagaacgcggtttatgatttcgaggacaagattaacttcgcggtgttcccttcgctgcagggtgggccccacaaccaccagatncgtgctctcgccgtggcgctgaagcaggccgcgtcgcccgggtttaaggcctacgcga

SEQ ID NO: 52026 - DNA, 202 bp, Glycine max
  unsure (1)..(202): unsure at all n locations; Clone ID: 701140923H1
gggattcgctcgccatcatggggaagaagaagaagagagtttcctcgaaggtgtggtgttattactgcgatcgcgaattcgacgacgagaagatcttggtgcagcatcagaaagccaagcactttaagtgccatgtctgccacaagaagctctctanccgctggcggcatggccatccacgtcctccaggtccncaangaat

SEQ ID NO: 52027 - DNA, 288 bp, Glycine max
  unsure (1)..(288): unsure at all n locations; Clone ID: 701140924H1
tgcttctcccacaactccgncgtacngcagccttttcaccaaattgtcgaccaaccatcttcgttatttgcaaatttcgtttcctttgaattacaatttacaagacaaggaaggcagcctcgnnnnnnnnnnnnnnnnnnnnnnngttcttaggttttgttctgagacgcagtttttcattcttctaatggcccagtccttcggtcagaccgagatcaactgggacaagctagataaaactagattctatgtcgtaggagctggactctttacaggtgtttcggtggc

SEQ ID NO: 52028 - DNA, 239 bp, Glycine max
  Clone ID: 701140925H1
aagagaaattttttagaacaatggaggcatcaaagatgaagtttttcttggttttggtgattgccatgttggcgatggtagcaactggggtttcagctgctgaggcacctgccccaggtccttcatccgatgccaccaccttctttgtacccactgctcttgcttctctctttgttcttgcattggcctctcttctaataatcttcaacaacctttggttattgttacatacatatagg

SEQ ID NO: 52029 - DNA, 291 bp, Glycine max
  unsure (1)..(291): unsure at all n locations; Clone ID: 701140932H1
caagtcaagcattatcaagaacgatgattttgaatcgagaccaagtgttaccaagcatgatgattttgaactcaagtcaagcgttaccaagaacnatgattttgaaccgagaccaagtgttacaaagtatgataactttgaacccagaccaagtgttaccaatatgatgattttgaactcaggtcaagcgttaccgagaatgatgattttgaaccgagaccaaatattagtaagtatgatgactttgaactcaggtcagcgttaccgagaatgatgattttgaatcagacc

SEQ ID NO: 52030 - DNA, 288 bp, Glycine max
  unsure (1)..(288): unsure at all n locations; Clone ID: 701140933H1
ggaccctgaggaggcaaccaccattaacgagctgaagaagcctgttgtggagaaagaagctccagggcatgccatatgagggcatgcacgtacggcctcggaggggaaccagaaaattatgttaacaaaataatctggaaccctaatgtatcagtgtcatcatcagtgtgtagtttaagctagctttgctatggttacgttctttgagntgcagagtcttgatgaacagtaccatctgatgtattgctttccttgaaagttaatgcatgcttcttatcttctgtctag

SEQ ID NO: 52031 - DNA, 126 bp, Glycine max
  Clone ID: 701140935H1
caactctctaccttccctctttttccgaatctgaatagaaatggcttcggagactgagacgttcgcttttcaggccgagatcaaccagctcctcagtctaataatcaacaccttccacacaacata

SEQ ID NO: 52032 - DNA, 283 bp, Glycine max
  unsure (1)..(283): unsure at all n locations; Clone ID: 701140940H1
agagactgcaattgctgcacctgaaccaaatnnnactctcatgaaaactangtctggagaactcataagaccaaatgataaanataaaaaaaggatctacttttgtcagaatatgacctggaactggncgggattttctggctgaangggagtggtaaaatcatcaaagtgggagattctgtttatgtgcttcagaaggtctcttcaactgctgaagcagctgctgaactgtgtatgtggaatctatgtcgatgctatatcagaatnaaaggctatatgccat

SEQ ID NO: 52033 - DNA, 281 bp, Glycine max
  unsure (1)..(281): unsure at all n locations; Clone ID: 701140941H1
ctccctccttttctcttcgcttggttcaagttgttacagtgttanntttgaggggagtcatatttcttggttctgaaggccaccgttatggctgtacatacagaattccctcttattacttactcacaagagattgtagatggacagcctatttttgtctcttcaaactgtcttcctatcaaggcttgaaatttgaacctgcaggtcatctttccatctgctgcacttaaacttcttggtgttcaggaagataacaagagctgatgataaaaaagtggttg

SEQ ID NO: 52034 - DNA, 284 bp, Glycine max
  unsure (1)..(284): unsure at all n locations; Clone ID: 701140943H1
gtaacaaaaaattgcgtacaggaagctcacttttgggtggatatggtaangtgaagacatcaaggggtgaggacttcatagagaaatcaagtagccttgacattcttgggngatgaaaganaaactgctgctgcagctgatgtattggctggtatatgtggttctctttcatccgaggctatgagttcctgcataacnagttcagttgatcctgtagaaggtaacaggggataggaagttcctgaaataaaccctttatgcaaaccacccatgacacctgatgt

SEQ ID NO: 52035 - DNA, 286 bp, Glycine max
  unsure (1)..(286): unsure at all n locations; Clone ID: 701140944H1
gaaatatnctggaatatcagcttagaaggcnngtgtctttggtgctgaanaaatnattagttcacatccaaatctggatgaaaactttaagatcttgtgggctaatcatggggatgatataagtattcaatactcaggaactcctgctcttaaaggagactttgtcagncntgggcaccgcacaattcaagggacactacaagancggtgtcaatgctcttctacgatattatttcaataattttgttgatggaacgaagcaggatgcaattgatctcttgcaagg

SEQ ID NO: 52036 - DNA, 289 bp, Glycine max
  unsure (1)..(289): unsure at all n locations; Clone ID: 701140945H1
aggcaaacncacttcttctcgaacatggcatctcaaggtttgtgtccttccgataaaaaatattcntgcttttggnctctgaagggaagcgtgtggcagtcaagtattactcagatgactgccccaacaaacaatgcaaagttagcttttgagaagtttgtatttactaagactgttaagacaaatgctcgtacggaagctgaggtaacactacttgagaacaatatcattatttacaaatttgtacaagacctgcatttcttgtcactggtggtgaagatgaaaatga

SEQ ID NO: 52037 - DNA, 284 bp, Glycine max
  unsure (1)..(284): unsure at all n locations; Clone ID: 701140949H1
agcactgncattcttcaatcacactaatggctgtnancttntcagatcttcacacngaagagggnnatanaatccctcgatcaattcctttctgggaaaacctatatctctggggatcaattgacaaaggatgatatcaaagtgtatgcagctgttgtggaaaagccaggagactcttttcctnatgctgacaagtggtacgatgccgtctcttctnaacttgctccaagcttccctgggcagctcaaggggtaagattcagtggcgctgctgctccagctgaa

SEQ ID NO: 52038 - DNA, 279 bp, Glycine max
  Clone ID: 701140951H1
ggtattcttagcttagcagcgagcttatccagtacgacggatgggaagtgttccattggcctccgctgctgctcttgccagaaggctagaagggaaggtggcactgataactggtggagcaagtggtataggtgagtgcacagcaagacttttctccaagcatggagccaaagtggtgattgctgatatccaagacgagttaggccactcaatttgcaaagacttggattcatcttcagctacttacattcatgtgatgtcacaaaagaagaaaacatc

SEQ ID NO: 52039 - DNA, 260 bp, Glycine max
  unsure (1)..(260): unsure at all n locations; Clone ID: 701140956H1
atcgaatctcagaaaaatgagagagtcatcagcattcacataggtcaggccgggatccangtcggaaactcctgctgggaactctactgcctcgaacatggcatccagcccgacggcatgatgccttctgactccaccttcggtgtagcccacgacgccttcaacaccttcttcagcgaaaccgnatctggcaagcacgtcccccgtgctgtcttcgtcgacctcgaacccaccgtcatcgagaggtccgtgcggcactt

SEQ ID NO: 52040 - DNA, 278 bp, Glycine max
  unsure (1)..(278): unsure at all n locations; Clone ID: 701140958H1
agaatgtttgtaaaggtgatgagtgcacacgtgattttcttcttggtattggggaggataaacaacgttctgccaggcttacagcctggttccacactccagagaactnnnttatccatgcatatgaaaagcaccatcagaaattgttgtccacaagtttaatgctgncccacctttcagtcttctgaaactagaagcatcatcaacctggtgggcgtccatacgtgtttacacagatatacctcatgtagaggaatattgactcatccgaatttgca

SEQ ID NO: 52041 - DNA, 274 bp, Glycine max
  unsure (1)..(274): unsure at all n locations; Clone ID: 701140959H1
taagcttcagagtgatgctctaagagaagctatctcaggaatcatggctgattccaaggaaaagaacaggaaatttgtggagaccattgaactccnaattgggttgaaaaattatgatccccagaaggacaagcgtttcagtggctctgttaagttgcctcatattcctcgccccaagatgaagatttgtatgcttggagatgcccagcacgttgaggaggctgagaagataggattggactacatggatgttgaggccttgaagaagcttaac

SEQ ID NO: 52042 - DNA, 285 bp, Glycine max
  unsure (1)..(285): unsure at all n locations; Clone ID: 701140962H1
aaccacctttttcttctacgatgagaacaagaaccttgtgagtgtgaaagtgaaagattcntgtgactcgaaaaagatggggtatgtttaccaagatgttgacattccatggctccagaaaaggactaaacccaaaagaactagaaaagctaagcaggtggcgttcacacaacagtttgnagncattggtgcagcaatcgctgctgagactgggccaagttccaagtttcctctcactttattggactcaaaggtaactctacttgttaaaaggccaaagcagtt

SEQ ID NO: 52043 - DNA, 290 bp, Glycine max
  unsure (1)..(290): unsure at all n locations; Clone ID: 701140964H1
gnaaggttgagctatagcctaaanggagagacccataaatagtttctactttcnanttcntagatagatggctggccccaattatgagacctcagattgtgctatttggctcctccataattcaaatgagcttcgacaatggtggttggggtgctattctagctaacttgtacgctaggaaggcggacatcatcttaagaggatactctggttggaattcaaggcgggctttggaggttttggatganattttccccaaggatgcttatgtgcaaccatcatggtaatgt

SEQ ID NO: 52044 - DNA, 282 bp, Glycine max
  unsure (1)..(282): unsure at all n locations; Clone ID: 701140966H1
ctcacagtnactngtctgtgctttgtngtggttgtggttggagtgnttccacttccttagatgcacaactagattccctcgttttacagagacacgtgtcccaaggttcactccattgttcgcgaagtggtgaggaacgtttccaagaangatccccgcatgcttgccagtctcattagacttcactttcatgactgttttgttcaaggatgtgacgcatcagttttgttgaacaacactgccaccatagagagtgagcaacaanntcctgccaaacaacaa

SEQ ID NO: 52045 - DNA, 277 bp, Glycine max
  unsure (1)..(277): unsure at all n locations; Clone ID: 701140967H1
caccactgaattgggaagtgagatcaggtattgcacttggagctgcccgtggcattgagtacctacattcacgagggcctaatgtttctcatggaaatatcaagtcatcaaacatcctcttaaccanctcatatgatgccagagtgtctgactttggccttgcacaccttgttagcccctcctctacccctaaccgtgtggccggctaccgtgcaccggaggtgactgatcctcgcaaggtgtctcagaaggtagatgtgtacagttttggtgtgtt

SEQ ID NO: 52046 - DNA, 280 bp, Glycine max
  unsure (1)..(280): unsure at all n locations; Clone ID: 701140969H1
gggacttataccatagatggtaaggttacaacatgtctggagagtattgaatccnttgatgaacagagcaaaacaatcacctacaagctcttcagtggtgacattngtcntaattataagaactttaagttcatctttcaagccattgatgataatgatcatggcggtactattatcaaatggaccgttgaatacgagaggnttcgtgaggaggttgatcctccatatggccacattgaatacctgcacaaatgcactaaagatattgatggtcatcttc

SEQ ID NO: 52047 - DNA, 278 bp, Glycine max
  unsure (1)..(278): unsure at all n locations; Clone ID: 701140970H1
gttcattnnttagcaagantcgccttcatcaagtgggaatgtggatgcatgaatgccatnntgganccatcatctacttcatttgattgtttagggttaaacaatggttgggatctcccaagtagtttatgtccctgttgtgagcctagctctccggtatcagagcagttgcattgttggagagactactataagtggagatgcatcccgctagactcgcctgttgctttgctcttcaatggccacttacaatatatcncgctgctcgacttgttgga

SEQ ID NO: 52048 - DNA, 281 bp, Glycine max
  unsure (1)..(281): unsure at all n locations; Clone ID: 701140971H1
ctcacaganagtggngcactaatcttgnggnagatctacaatgtggggacatttttcatttgtttgctttagtgctcttcaggtgaactttcaatttctccattcctaccagataatggtgnnggagaggctgaggacttgagaagtgcaaagcgtaaatctgatactaccgagtcttcatatagtgataaagnccaaaaantccaaaatccttctntggagtagncagtgaaatatttctcgtcgggaaaaaggttttccggtatcnccattctncanac

SEQ ID NO: 52049 - DNA, 281 bp, Glycine max
  unsure (1)..(281): unsure at all n locations; Clone ID: 701140972H1
acgcattaacnttaaccgttgcaaagttcgccggggaatcgggcttggccaccgctctccgatgaacactccataggacaccatggatgagcaaaaaagcgccgccgtcaacgacggcgaatcagaaccgcagcaaaaccaccaccaacaaaaccacaccgacaacaacaataacaagagcnnnnnnnnnnnnnnnnnnnnnnnnnnnnnnnnnnngagtacatcagatcccgaactgttctgttgtttgcttcagccagccaccaccgacggngatcccg

SEQ ID NO: 52050 - DNA, 280 bp, Glycine max
  unsure (1)..(280): unsure at all n locations; Clone ID: 701140973H1
gcgaatctgaganatggcggattcttctcgggaggagaacgtttacatggcgaaattggcggagcaggccgagcgttacgaggagatggttgagttcatggagaaggttgcaaagactgtggaggttgaggagttgacggtggaggagaggaatctcctctctgtggcttacaagaacgtgattggtgcgaggaggcttcgtggaggatcatatcctccattgagcagaaggaggagagcaggggcaatgaggaccacgtggccattataaaggagtaca

SEQ ID NO: 52051 - DNA, 281 bp, Glycine max
  unsure (1)..(281): unsure at all n locations; Clone ID: 701140974H1
aacacttctaatttaaaanantaaatcaaaaatttaaaaccctaacccaatcaatcggaaccatgggatacggtgaaaaaggaggacgacctccattcaaaaagcacaaggcctcaactaaattcgaagatccccaaaaaggaatcgcctacgatgacgatggttatggcggcgaagatgcctacgacgatgacgatggtaaaaccaaggattttagcaaattagagctgaaaccggatcacaccaatcgccctctgtgggcttgtggcaatggccgcata

SEQ ID NO: 52052 - DNA, 72 bp, Glycine max
  unsure (1)..(72): unsure at all n locations; Clone ID: 701140977H1
ggaaccgtcgccggancctccggcgtccgatatcgtgttcgatgacttctccacagaanacannacnngncc

SEQ ID NO: 52053 - DNA, 284 bp, Glycine max
  unsure (1)..(284): unsure at all n locations; Clone ID: 701140979H1
gcaggatttcctanaagattggtggtattggtactgngccagtgggacgtgtagagactggggttgtgaagcctggtatggtggtgacttttggtcccactgggctgacaactgaggttaagtctgttgannncgcaccatgaggctctcacanaggctcttccaggtgacaatgttggntttaatgtgaagaatgttgcagtcaaggatctcaagcgtggttttgttgcatccaactccaaggacgaccctgccaaggaagctgccaattcacatcccaagtc

SEQ ID NO: 52054 - DNA, 277 bp, Glycine max
  unsure (1)..(277): unsure at all n locations; Clone ID: 701140982H1
gtgcttctctcctctgtctttttctctctcttgctatccttttggctagtngcactgctgcaagtgnaactccaagaagcgcagtgccaagccaccatgtttcaacattcaacagaagccttttccttccacttttctctttggancttggttcttctgcttaccaggcagaaggagcagcaagtgtagatgggagaggaccaagcatatgggacacctacactagacagcatactgaaaagatttgggatcatagcancgntcgacatgggagctg

SEQ ID NO: 52055 - DNA, 275 bp, Glycine max
  unsure (1)..(275): unsure at all n locations; Clone ID: 701140984H1
aaacagtgtgatgaaaatgaaggtccttgttttcttcgttgctacaattttngtagcatggcaatgccatgcgtacgatatgttccctctccgaatgaacactggctatggtgcccgtactccggaggtgaaatgcgcaagatggaggcttgctgtngaagcacacaacatctttggctttgagnccattcctgaagagtgcgttgaagcaacaaaggaatacatccatggcgaacaatatagatcagactccaaaacagttaaccaacaagctt

SEQ ID NO: 52056 - DNA, 275 bp, Glycine max
  unsure (1)..(275): unsure at all n locations; Clone ID: 701140985H1
ttcttcttcttttgttgtnctgtgtttgtgtttgtnttttctctcacctgaaaatgtcttgctgcggtggtaactgtggttgcggaagctcctgcaagtgcggcaacggctgcggaggctgcaagatgtacccagacttgagctacactgagtcaaccaccaccgagaccttggtcatgggagtggcacctgttaaggctcaatttgagggtgctgaaatgggtgtgcccgctgagaacgatggctgcaaatgtggaccaaactgctcctgcaac

SEQ ID NO: 52057 - DNA, 279 bp, Glycine max
  Clone ID: 701140986H1
ggcattcgtggagcactactacagcaccttcgacaccaacaggaacggcttagcgaatctctaccaggagggttccatgctcactttcgaagggcagaagatccaaggcgcttccaacatcgttgccaagctcacctccctcccttttcagcagtgccaccactcaatctccaccgtcgactgccagccctccggcgtcaacgccggcatgctcgtcttcgtcagcggaaaccttcagctcgccggcgaacagcacactctcaagttcagccagatgtt

SEQ ID NO: 52058 - DNA, 195 bp, Glycine max
  unsure (1)..(195): unsure at all n locations; Clone ID: 701140988H1
cctgngtnnttgataagcttaaggctgagcgtgaaagaggaatcacaattgatattgccttgtggaagtttgaaaccaccaagtactattgcacagtcattgatgcctcctggacacagggatttcatcaagaacatgatcactgggacatcccaagctgactgtgctgttcttatcattgattccacnnnnnnt

SEQ ID NO: 52059 - DNA, 275 bp, Glycine max
  unsure (1)..(275): unsure at all n locations; Clone ID: 701140989H1
ganaagagttttaaacacgttcgaggaaaaggacaagatggaatccaggtcatctcaagaatctgatagaagttcaggagttgggacatggaaagatgaatgtgaattttttgaattggcgggaatggaagaatcgagaagggtaactcaaccaacaaagcagagtaaggatttggtgcaaggtactgaagcccaaaaacatgaccagatggaaagagaagcatctaatgtgcaaganaagcataaacaagtaaaagcaatgcagaaattatcgg

SEQ ID NO: 52060 - DNA, 280 bp, Glycine max
  Clone ID: 701140991H1
ctttcctctcagaaccctcgatcactcccacgcgctcctatatcctctccttcaccgtcgctctctccaacgatcacaacaacatcgtcatcccatggcaaacgccgcatctggtatggcagtccatgatgactgcaagttaaggtttttggagctgaagacaaagaggacacaccgtttcatagtttttaagattgaggagcagcagaagcaggtcattgtggagaagcttggtgagccagcccaaggctatgaagatttcatgccagccttcctgctg

SEQ ID NO: 52061 - DNA, 280 bp, Glycine max
  unsure (1)..(280): unsure at all n locations; Clone ID: 701140992H1
tcctctctcactcagattcagcaattttctattttctcctctcatggcttcagattccaaaaaggatttccctgctgatgacaaagctggaacagcagagnctaaagcatccaaagatgaaacgtcatctaaagattctccagcagcacaaagagcnactacagctacttctggacctgcaactggttttccaggcaacccttttgnnttctctgcaatgtctggcctgctcaatgatccaagtatcaaggaattggctgaacagatagcaaaagatcca

SEQ ID NO: 52062 - DNA, 281 bp, Glycine max
  Clone ID: 701140993H1
cttgatctcatcataatcgtcagcgtcaattgaagaagatgccgatcagaaacatcgccgtcggaaggcctgaagaggcgactcaccccgacacgttgaaggcggctttggctgagttcatctcaaccttcatcttcgtgttcgccggctcaggctccggcatcgcctacaacaagctcaccgacaacggcgctgccacccctgccggcctcatctccgcctccatcgcccatgcattcgccctcttcgtcgccgtctccgtcggcgccaacatctccggc

SEQ ID NO: 52063 - DNA, 255 bp, Glycine max
  unsure (1)..(255): unsure at all n locations; Clone ID: 701140994H1
gtgagtcaacgtgagcaatggatggtagagtcgcaggtgtttcagatttaccaactcttcgccaccattcctcgcaacgcccaaacnctcatgttggagcttcaacgcgataatcacatgcagtatgtctccaaaggccttcgccatctcagntccgcattttccgttttggacgctaatcgaccctggctctgctactggatcttccactccattgctttgtcgggagaatccgtcgatgatgaactcgaagat

SEQ ID NO: 52064 - DNA, 284 bp, Glycine max
  Clone ID: 701140995H1
ctcactttctcgctcgccaaacgcccctctctctcctccaatggccgaccagctcaccgacgaccagatcgccgagttcaaggaggccttcagcctcttcgacaaggacggcgatggttgtattactactaaggaacttgggactgtgatgcggtcactagggcaaaacccaactgaggcagaactgcaggatatgattaatgaggttgatgctgatggcaatggaaccatcgacttcccagagttcctcaacctgatggctcgcaagatgaaagacaccgact

SEQ ID NO: 52065 - DNA, 285 bp, Glycine max
  Clone ID: 701140996H1
ggggttgtaagtttggtaaatcttgtaaatataaccacacaagaggaaaaatttcaacagcaccagcaccacttttggaacttaactttcttggcctgcctattcgtctgggagagagagagtgcccctactacatgcgcactggctcttgtaagtttggagcaaactgcaagttcaaccatcctgaccctacagctgttggaggagtaggaggtgatcctgcttcagggtatggtaatggagggtctatttcatacaaggtgtatcacaaacatctgtaccctc

SEQ ID NO: 52066 - DNA, 258 bp, Glycine max
  unsure (1)..(258): unsure at all n locations; Clone ID: 701141001H1
tgctactttgaatcacgcgattccgttgtcccaacagttgagttatttcaaggaataccaaggcaagctggccaaggtagctggcagtaaaaaagcagcctcaatcatcaaggatgcgttgtatgtgctcagtgctggaagcagtgactttgtgcaaaattattatgtcaatccttggatcaacaaagtctacactcctgatcagtattcgtccnacttaattggttcattctcaagttttgttaaggacttgtatgg

SEQ ID NO: 52067 - DNA, 252 bp, Glycine max
  unsure (1)..(252): unsure at all n locations; Clone ID: 701141002H1
aggaactaaatatggctgacttgttggaatggtcaaagcaaganaagaaacgaatgcttcatgtcgtctaccgtgttggtgancttgatcgcaccatcaaattttacacagaatgtttaggaatgaagctttgaggcaaagagatatcccagaggagaaatatgctaatgcttttcttggatttggccctgaagantcccattttgttgcnnaattaacatataattanggggttacctcgtatgacattgg

SEQ ID NO: 52068 - DNA, 256 bp, Glycine max
  unsure (1)..(256): unsure at all n locations; Clone ID: 701141003H1
ggagggttgtgtgaagaagttgctatgccttgttgggtttgtggtgcttgtgagtactattggtggggtggagagtgctggtgaatgtgggaaatctacaacccctgataatgaggcttataagcttgcaccngtgcctcagcagcacaagatgagaatgctagtgtttctcagagttgctgtgctcaggtnaagaaaattgggcagaaccctagttgcctctgtgcagttcttctctctaacacagccaaaatgg

SEQ ID NO: 52069 - DNA, 258 bp, Glycine max
  unsure (1)..(258): unsure at all n locations; Clone ID: 701141005H1
gaatatgaagttgtttgttttctttgttgctgcagtagttttggtagcatggccatgccatggcgcaggctaccaaaggttccctctccgaatgaaaactggctatggtgagcgttcttcggaggtaaaatgcgcaagtnttaggcttgctgtggaagcacacaacatccgagngcactaaaaccattcctgaagagtgcgttgaaccaacaaaggactacattaatggcgaacaatttagatcagactctaaaacag

SEQ ID NO: 52070 - DNA, 257 bp, Glycine max
  unsure (1)..(257): unsure at all n locations; Clone ID: 701141006H1
ggacgaaacagagggattataaaaanagaagttactcgatagttcaaatcagaagatggttcctgtcacaccaactcaataacagatcaaaccaaacccaaactgttaggtttcctttgtttggtgtgaagccaggctgattcttcttccaacctgaaatccgacgcgataatggagcagatgaagcaacacctcgccaccgacgctggcaaacaagtcaccaataaaattggactcgtttatcagtttcacattgc

SEQ ID NO: 52071 - DNA, 257 bp, Glycine max
  unsure (1)..(257): unsure at all n locations; Clone ID: 701141007H1
caatccccacttgaaacacccagaccacctggaaggtttagagnaatgttacaattcccaaaagtgtgattgtngtgaatttcaggctaaacatttaccgtgttctcacgtcatggctgcctgtaaatctgtcatgttgatcccatgacctatgtgccgatgatattcactttacaacacatnttgcacatctacgacaactcctttggtttattgccacacgaatcaatgtggcaagaatatgaaggagatcagtg

SEQ ID NO: 52072 - DNA, 257 bp, Glycine max
  unsure (1)..(257): unsure at all n locations; Clone ID: 701141008H1
tttctgctgattcatatctcaacatcttatacatgccatcaacanngaccccgttcanagaggtcaagacgatcacaagtgtctgcaaataataattctgtgtatagtcgagattttgaagatgggcctcggagtacctggacaatgttagatatactgaatgtgttacttacttganagagtatgcacgccagcagttgcttgcttttatgtttaggcatggtcattaccatgatgcttgctcctgttctttcctc

SEQ ID NO: 52073 - DNA, 253 bp, Glycine max
  unsure (1)..(253): unsure at all n locations; Clone ID: 701141009H1
ggaggaagacttctgcatggggctagcttcaagtatgttgtcaaatgttaaactctagcataaatttataaagaatatttatatgcaacgagaggagatgcatatctanatgccattcctccactttctctntgttatggttgctaaatctgcacttgcggattgctgcagtttcactgataatgcangcctatgtggcatacctggattacctacttgtggactcactttctgctggtgcnaagtgggatgg

SEQ ID NO: 52074 - DNA, 110 bp, Glycine max
  unsure (1)..(110): unsure at all n locations; Clone ID: 701141010H1
tagttttggtagcatggccatgccatggcgcaggctaccaaaggttccctctccgaatganaactggctatggtgagcgttcttcggaggtaaaatgcgcaagttttacg

SEQ ID NO: 52075 - DNA, 111 bp, Glycine max
  unsure (1)..(111): unsure at all n locations; Clone ID: 701141012H1
cntatttttcatggcttattcatctcataaactcttcttccttctgnttgcaattttcttctcacacgctagtgctgnaaactcttccgatgcttccacaacaattcanac

SEQ ID NO: 52076 - DNA, 261 bp, Glycine max
  unsure (1)..(261): unsure at all n locations; Clone ID: 701141013H1
gagactacacgggcagtatctaaaataacagtgaactttttttgagacnatcgacaggcatgcatcgagtctgaccgaaattgtggaagaagcacaattggtcaatgatcncaaattgtgtgaacttgagaagagtttgaggagtgtactncctatgangaaaaacaactactggagaaagtggcnaaaaagcnagcaatttcanntgcntannagnncccattgggtttcaaangccgccnnngnnnctnnggaaangtg

SEQ ID NO: 52077 - DNA, 111 bp, Glycine max
  unsure (1)..(111): unsure at all n locations; Clone ID: 701141014H1
ctgagactctgattctgagagtcgagangagtgagtgagtgctgcntcntcttctgaatcaaatgcattcatcactctctggttctgatttttctgacaccaaaatggtga

SEQ ID NO: 52078 - DNA, 111 bp, Glycine max
  unsure (1)..(111): unsure at all n locations; Clone ID: 701141015H1
gaagatgnaactaaaggnctcagatgtgttcaatgaaaagccacctgctgatgaacttttgtcagtttcggatattggaangccagttacancatcacttcctgataatgt

SEQ ID NO: 52079 - DNA, 253 bp, Glycine max
  unsure (1)..(253): unsure at all n locations; Clone ID: 701141016H1
tgaacccaaattatacagattttagattccctcagattaaagctcatccttggcacaaggttttccacaagcgaatgcctcctgaagcaattgaccttgcatcaaggcttctccaatattcacctagtctacctgcactgcgctggaagcatgtgcacatcctttctttgatgagcttcgcgagccaaatgcccgttcttcctaanggccatccactgcccccattttcaattcaaanaggngtgagtggngc

SEQ ID NO: 52080 - DNA, 257 bp, Glycine max
  unsure (1)..(257): unsure at all n locations; Clone ID: 701141017H1
gnggatttgaatatggatgagatttttgggctctctacacctaaganactaccactggaaactgttgtggagcctaggcttccataccatctttattctctctgagcagtgcctttgcacaaagcgtttctctctaataagattgttgtagggataatgggtcttgagtgagcttatgtttgtcacactggattgcaataaatttttctctcttttcataacaatgttagaaagagagaaaaaaaaaagatgttgtg

SEQ ID NO: 52081 - DNA, 257 bp, Glycine max
  unsure (1)..(257): unsure at all n locations; Clone ID: 701141019H1
ttcgctcttctcttcgaataaaccacaaaaccaacaaacgagaagnggagtgagagaagatggggttgtcgttcacgaagctgttcagcaggttgtttgcgaagaaggaaatgaggattctgatggtaggtctcgatgctgctggtaagacaaccatcttgtacaagctcaagcttggagaaatcgtcaccaccatccccaccatcggatttaatgttgagactgtggagtacaagaacatcagcttcactgtgtgg

SEQ ID NO: 52082 - DNA, 259 bp, Glycine max
  unsure (1)..(259): unsure at all n locations; Clone ID: 701141023H1
agccttanagatttctggaagacaaatgatgattaacaataatgaaaatatggccggggtagtgaatcacactgattatccttaacgattgtaaaagtgtggtttattcatatctttccaaaaaactatcatttgaggccgcaaatactgcattccgtatactatctgcttgcaaagtcaacaaagtttgtcctntgacttttaancagccaacagaagtaattaatgcatgttggaatgtagctgcccccagcccttc

SEQ ID NO: 52083 - DNA, 192 bp, Glycine max
  Clone ID: 701141025H1
ggctgccgaagaagagaacgttcaagaagttcagttttcgaggcgtggatctcgatgcacttctcgacagtccaccgatgaactcgtcaagatgttcagtgcccgcgctcgtagaaggttccagagaggcctcaccagaaagcccatggccttgatcaagaagctccgtaaagcgaaaagggaagctccacc

SEQ ID NO: 52084 - DNA, 259 bp, Glycine max
  unsure (1)..(259): unsure at all n locations; Clone ID: 701141026H1
ctcgacccgaaaacaaaggtcaagattaaccgtggtgttgccatctgtcacttggacacctccgattggagcccgacccatggagcattcatctcgttagggtcgggtccaggtcggattgangtgtgccactggatcttcgagaatgacgtggcgtggaccattgtgaagtgananaagagaacatcagaataaggaaggaagaagagttacctctataggaaattaaagtcnaatttttaaaaaaaagcncttctgt

SEQ ID NO: 52085 - DNA, 112 bp, Glycine max
  unsure (1)..(112): unsure at all n locations; Clone ID: 701141027H1
cnttgacantgaggcctgctcttgctttgcttcctcttctatttgctttcttgttagctgccactacagantcnagagcnagatacatgggaatattggnaaatgatcatga

SEQ ID NO: 52086 - DNA, 258 bp, Glycine max
  unsure (1)..(258): unsure at all n locations; Clone ID: 701141028H1
ggaggngcntcgccgcctccacagcatcgccaaaagacctcgaatcctctctcttctctcctccgaatttcgtaacntcgaaaagtnancgtcagaggaagcttctncgcagattccggcgccgatttcgaccggaactatnagtggcgccttcacctgcgctgaagtatgcggcactcgcgtcgttcnagtnggnnccaggatngtganaaanttaagnntangtgtnatggagggaatcnntgaganaaggtnnac

SEQ ID NO: 52087 - DNA, 86 bp, Glycine max
  unsure (1)..(86): unsure at all n locations; Clone ID: 701141030H1
gtccctttntgttctcttcactcttggtnnttgcgagagaaagccatgtccagancacgaagatttttggcatgctgtttggccaa

SEQ ID NO: 52088 - DNA, 239 bp, Glycine max
  unsure (1)..(239): unsure at all n locations; Clone ID: 701141031H1
cctaaacaggccaactattagcaganngattcatgcctgaaacngggtctcctgaatatgancgcgttggctaagaaccctgagaaggagtttttgaagactattactggcaagaaggagaccctcattgaccttacagttatagaatcttgtcaaggcacgcatctgatgagttctaccttgggcagagagatggnggtgactactgtaattctgntgccggtccattagnggntttt

SEQ ID NO: 52089 - DNA, 256 bp, Glycine max
  Clone ID: 701141032H1
cattttgcatctaacccttttgtcattaataatctctctgaccactctttccttggtcgatgccgccgatcccacatttggcttcacccctcttggattatctagtagctcaaacttgcaaatccaaaagcttacgacgttgcagtcaacgagcgctacagcttttcaaatggagtgcacagattttgggtatactccacggacaagcctcatatgcaaggcagcaatacgaagccacgaactgagattcgtatcg

SEQ ID NO: 52090 - DNA, 253 bp, Glycine max
  Clone ID: 701141033H1
cctcctctgcctccgtgcaaagatttcaagactcatcaaacagctggggcaacctgagacacactcgctcatccaacaaaacctcatggccaacgtggaaatcctcgttctacttgttgcagcggcattataatgccattgcgacacaccacagaagctgcagagcatgttgtgggtggttctgccggttggattattccttcccaaggagacacctccttatatacctcctttgcagctaataacactttca

SEQ ID NO: 52091 - DNA, 255 bp, Glycine max
  unsure (1)..(255): unsure at all n locations; Clone ID: 701141037H1
tctcttnaacgacggcanggnggatactggaatcagacacgtggttcgacagancctttgttgcngagagtagatgnggctcgcgatcggaaaccgagttcactgtccattgcgcggcctagcaagttcgtgcagctgtcacttgctcgnaccaggaagagttctttctttacggtgttatctgctgaaaaggaacaaattcacgttgtannagggaagtcgtgttgatgagttanatgatgcatggttacacgt

SEQ ID NO: 52092 - DNA, 257 bp, Glycine max
  unsure (1)..(257): unsure at all n locations; Clone ID: 701141038H1
tacagccnggnaaatccaatggcttcagagaanaaactttcgaacccaatgagggagataaaagtgcagaagcctcgtcctcaatatctctgttggcgagagtggagatcgtctcaccagagccgccaaggtgttgaacaacttagtggccaaaccnnagtgttttccaaagcacggtacactnttcgttcctttgggattagaagaaatgagaagattgcatgctatgtcactgtcagaggtgacaaggcaatgca

SEQ ID NO: 52093 - DNA, 253 bp, Glycine max
  unsure (1)..(253): unsure at all n locations; Clone ID: 701141039H1
ggcaagggaatgagcttaacaaccttggtagacggctgangcctganctgacncacaacagggttgcaggtcagaatgcagctgccgtgcngganatctcagatgaagacaatgataatgatggcaggtacnatgaagataataatagcaggtacaatgaagatactgatggcggtgtatcttggttagccgtctccaccgccatggtggtggcaganttttattgggtcgttctggtaggaggcgganatgt

SEQ ID NO: 52094 - DNA, 257 bp, Glycine max
  unsure (1)..(257): unsure at all n locations; Clone ID: 701141040H1
aaggacatcaacctaagctctctgctcttgctgttatgcttcaccactcttaccgaggctctatggttaaccatccccagcaagggatccaagtgcatgtccgaggaaanccagacacacgtcgtcgttntagagattactatgttgtagccgatgatgtccagggtcaccaacttcaaactatttctgccaaggtgacatccccttatggaaataatcttcaccagaatgaaaatgttactcacggtcagtttgca

SEQ ID NO: 52095 - DNA, 184 bp, Glycine max
  unsure (1)..(184): unsure at all n locations; Clone ID: 701141042H1
gataccccaagttctctgctttttggttgcaaaagttccttctcaagtgatctgaatttagtgttccttgacatgtctagtgtttttcttgtttatttccctagatttcatcgtatatcacttgtgttggagtaancaagagatcattttatcaaataaataatgccaaatggcatgtcgaagt

SEQ ID NO: 52096 - DNA, 255 bp, Glycine max
  unsure (1)..(255): unsure at all n locations; Clone ID: 701141043H1
gnccaaattggtgcttggnatgcagttgtaacttgtttctttatcgatactgctcataatcttgncgagtacattgaaataatttcaaaaattttganagatgggggagtttggataaatttnggacctcnacttatcactttgcagatatgtatggacaggatgatgaaatgtccattgaattgagtttggaagatgtnnagagggttgcntttcattatggatttgaatttgagantgaaaganctnttgaga

SEQ ID NO: 52097 - DNA, 261 bp, Glycine max
  unsure (1)..(261): unsure at all n locations; Clone ID: 701141045H1
gttgcttcataccaatgtgtcagagggagagtatggtgatgccatcattcaaggaggggtgtctctaaacttcaatttctcaaactgatgatggtgaattttcttggtctccaactaattgggttctgcataagttcanggcaatgctaatgaatctattcaggtagaattaaccaaacagaccntnagatgccagtatgggcttaaatnactttggnnctggggcnnncccccggganntcnngggggngagcgncnccc

SEQ ID NO: 52098 - DNA, 100 bp, Glycine max
  unsure (1)..(100): unsure at all n locations; Clone ID: 701141046H1
gaaggtccttgtnttcttcgttgctacaattttngtagcatggcaatgccatgcgtacgatatgttccctctccgaatgaacactggctatggtgcccgt

SEQ ID NO: 52099 - DNA, 251 bp, Glycine max
  unsure (1)..(251): unsure at all n locations; Clone ID: 701141049H1
aaaatttngatgatagcattggtgatgaaaaacttaaggngctgttctccccttttggtaccattacctcttgcaaggttatgagagacccaaatggcttaagtcgtggatcgggttttgttgcattctgactcccgaggaggcatctagagcactcctggagatgnatggcaaaatggtggtaagcaaacctctgtatgtgactctannncaaaggaaagaagataggagagctagactgcaggctcatt

SEQ ID NO: 52100 - DNA, 245 bp, Glycine max
  unsure (1)..(245): unsure at all n locations; Clone ID: 701141051H1
gccttacactatgtctcccagctgcaaacaagtggtgctggttngcnatgatggcattgcagtgtttgactggagctatacatgggagcaggggctgtggcctgtggagtgtggtggaatgttgggtnccantttcaaggnatggaacttgaatcctatgggattcctaatgtaaggtntatgtggctttggactctctccaactacaatggctagcatttgtggtaggtttcncntcatattaa

SEQ ID NO: 52101 - DNA, 257 bp, Glycine max
  unsure (1)..(257): unsure at all n locations; Clone ID: 701141052H1
gcaagctccaaagacagattcaagagnngagctggatggaattcaagtagagttgcaagcaactggatcctactgagatgggtcttgatgtgttcaaaagccgtgccaactaagatgattatataaaatagtaggctttctggtgggagcagcacccctgaagccttagttactcatatggaaaatatcctagtttgtgggatggtcaacttgggtacttatggtcccaaactctcaattttccaagttgtggcata

SEQ ID NO: 52102 - DNA, 258 bp, Glycine max
  unsure (1)..(258): unsure at all n locations; Clone ID: 701141055H1
gtttcctcatgaatctgtgnntttaagtgttaaactattctggttntgatggtaaagcaaaatagagtttgttcactttgatatacacactaatatcaatcagggacaaggtagtacttatcagctggtattctgggcttgtgtaaggtatggtgtttcatttgacaggtttggttttgttgctcattggctgttttagtacaattctttaagagantgatttgaaaaagggacattcaaacactagtngggcncccc

SEQ ID NO: 52103 - DNA, 257 bp, Glycine max
  Clone ID: 701141057H1
gaaaatcctctgatactgttgttttcctgaaaccatcacaatttgtttctcaatcatgtcaacctcatcctcttcccaaagcctcaaaattggcatagttggattcggcaactttggccagtttctggccaagacaatgataaaacaaggccacactctcacagcaacttctcgatctgattactctgaactttgtcctccaaatgggcatccattttttcagggatgtcagcgcattccttaccgcagacatagat

SEQ ID NO: 52104 - DNA, 255 bp, Glycine max
  Clone ID: 701141058H1
ggaaaatcatttagattctgaactgccactcatgcctaaagcagtggtcacaattctgcttagcaaaaattctttttcgggtgagataccaaatcactttagtgaattgagtcatcttcagcatctagatcttcatcaaatcatctcagtaagatgcccccatcttccttgttctctttgccaaacattagctatttgaatttagccagtaatgagctaagtggatcccttccacagaaactaaacgttaggcag

SEQ ID NO: 52105 - DNA, 126 bp, Glycine max
  unsure (1)..(126): unsure at all n locations; Clone ID: 701141059H1
agggtttgaatctcaccactctcccttctgtttgcaaaactgcttccttctgccatcatccgagganncaaagagaaaaacaagagatggagtggtgtgtgtcaatgccaaagattgaactgcatg

SEQ ID NO: 52106 - DNA, 84 bp, Glycine max
  unsure (1)..(84): unsure at all n locations; Clone ID: 701141061H1
caaacttagtccatgtnactatcncaanaatgaagaattattcatgaagtaactttgtggatacgtgttcccttctgttnctat

SEQ ID NO: 52107 - DNA, 258 bp, Glycine max
  unsure (1)..(258): unsure at all n locations; Clone ID: 701141064H1
ggncatctcaaggtttgtgtccttcgataaaaaatattcttcttttggactctgaagggaagcgtgtggcagtcaagtattactcagatgactggccaacaaacaatgcaaagttagcttttgagaagtttgtatttactaagactgttaagacaaatgctcgtacggnagctgaggtaacactacttgagaacaatatcattatttacaaatttgtacaagacctggcatttctttgtcactggtggtgaagatgaa

SEQ ID NO: 52108 - DNA, 253 bp, Glycine max
  unsure (1)..(253): unsure at all n locations; Clone ID: 701141065H1
caagactcatcaaacagctggggcaacctgagacacactcgctcatccaacaaaacctcatggccaacgtggaaatcctcgttctacttgttgcagcggcattattaatgccattgcgacacaccacagnagctgcagagcatgttgtgggtggttctgccggttggattattccttcccaaggagacacctccttatatacctcctttgcagctaataacactttcagactaaacgacatactcgtgttcaa

SEQ ID NO: 52109 - DNA, 253 bp, Glycine max
  unsure (1)..(253): unsure at all n locations; Clone ID: 701141067H1
cttggctccgccatttttcgtagctgctgttcttgcgcgtnaacaancctcaggtaagccaaaaccatggttaancataacaatgttatcccaaacggacacttcnctaagcactggcnganctatgtnagacttggttcaatcagccagcacggaagacaaggagacgattggctcgtcagaagaaagctgtgaagatattccccagacctacggctggacctctcaggcccattgtacatggtcaaacttt

SEQ ID NO: 52110 - DNA, 252 bp, Glycine max
  unsure (1)..(252): unsure at all n locations; Clone ID: 701141068H1
gatgcaacacctttgactcttggngcaagagtttagtgggtatactacacaagtgaagtacggtattgatncgagtaattggcactttgccgcacctgtatcagcttgcccagggtggtacagctgtagggactggattgaatacaaagaaggggtttgatgccaagatagcagcagcagtagctgaggaaacaaatcngcctttgttacggcagaaaataagtttgaggccttggctgcccatgatgcttt

SEQ ID NO: 52111 - DNA, 256 bp, Glycine max
  unsure (1)..(256): unsure at all n locations; Clone ID: 701141069H1
cctgcatcttcaaccatgtcagcaatgctgcaacctcagatcattcngctcaaggaaggcacggacactttcgcaagggaagccacagctggtgagcaacatcaatgcctgcaccgccgtcgccgacgtcgtccgcaccaccctcggccctcgcggcatggacaagctcatccacgncgacaagggaaccgtcaccatctccaacgacggcgccaccatcatgaagctcctcgacatcgtccaccccgctgcaaaa

SEQ ID NO: 52112 - DNA, 251 bp, Glycine max
  unsure (1)..(251): unsure at all n locations; Clone ID: 701141073H1
atccttatgttntcagctgaccttttaaagtaaatcataattatattattgacaagtctatgaatgattaanacaggatatcctaaataaaggctataaatatgtttggcnaganacactaaatttnnaaacactggatttcagcaaaatttgttagaaggtctgtntctttctattttattcttgcagatgacnaataaagttgggncggaattttccaagggntggaggacctcatgngccagtgggct

SEQ ID NO: 52113 - DNA, 182 bp, Glycine max
  unsure (1)..(182): unsure at all n locations; Clone ID: 701141074H1
cnattaatagattaatcaattgtcttgtgtttactttttattttatggtgtgtggctaaccgagggtggttttaggaaacggtggctagctactcaatttgccctatttgctttgggttttatttgtattttatgagatctgattctgagctagtctatatatgcatgctgtaattcagacc

SEQ ID NO: 52114 - DNA, 251 bp, Glycine max
  Clone ID: 701141075H1
tctatctctttgtagtgtaagcaacaaaattccatcaagtgtgatctcttaatatgtggagttgtgtgtggactactcttacttcataatttccatgcctgcaagtgcaagtgcaagtgccagttgctgagttgaacgtgccacttgaccgcaagtgtttttgttgtcaccatgtgtgtgaaagatggcgaacaagttggtgaagatcatatagagaagaacgttgataacaataggagagtttcatggcc

SEQ ID NO: 52115 - DNA, 234 bp, Glycine max
  unsure (1)..(234): unsure at all n locations; Clone ID: 701141076H1
tttttattctgtcattagagaggaacnaagttgactagagaangggcggagaaggctgtttactgcatcaacaaaaccagctcctggacttgcttgcatactctctctgttctttctattcaaagatctgtaaatttatatattatcttttatcatatatagtattagtatagtccacttgtttaaaccacctgtgttgcatattctgaatcctatcatcttgtggctttgatg

SEQ ID NO: 52116 - DNA, 256 bp, Glycine max
  unsure (1)..(256): unsure at all n locations; Clone ID: 701141077H1
gacaccntcgtncancgctgctacatcgnnatcggccagcttcagttcgtcatctccgagatccatgacgactgnnncacacctctccaagcantnaaactcctcgntctntatttctngtcccccgacaccaaggattccgccatcgcgagtntcaaggagtggcttgcngatcccgncattgcaaacaaangaaangntgaggntngtngcgggtctngttttncncaaggaaatngntttnaaggaagccctc

SEQ ID NO: 52117 - DNA, 251 bp, Glycine max
  unsure (1)..(251): unsure at all n locations; Clone ID: 701141080H1
aaattggttgnacaatcgaaaagctaggctagctcgcacagctagggatgttaaagcagcagcaggtgatgacaatcctgtcccagagaagcagagagggccagtacctgggtcctatgactcacctggcagtccaggtcaaaatgttgtgcttgttggtgtacgaggagacgaaattggcagaggaaaagtgtttcaggtgcacggtaaatggtatggnaagaccttggagnattatcnncccanttggg

SEQ ID NO: 52118 - DNA, 251 bp, Glycine max
  unsure (1)..(251): unsure at all n locations; Clone ID: 701141082H1
tttatcgtgaggngaatatgaagttgtttgttttctttgttgctgcagtagttttggtagcatggccatgccatggcgcaggctaccaaaggttccctctccgaatgaaaactggctatggtgagcgttcttcggaggtaaaatgcgcaagttttaggcttgctgtggaagcacacaacatccgagcgattaaaaccattccanaagagtgcgttgaaccaacaaaggactacattaatggcgaacattta

SEQ ID NO: 52119 - DNA, 254 bp, Glycine max
  unsure (1)..(254): unsure at all n locations; Clone ID: 701141083H1
ttntnttntctctcaacaacttcanctnnntccaacntngatcatgtctncncttcaagggcaagtaccatgatgagcttatcgccaatgctgcgtacattggcactcctggaaagggtattcttgctgctgatgagtcaacagggacaattggcaagcgtttggccagcatcagtgtagagaacattgaatccaacaggcgagctcttagggagctgcttttnactgctcctggtgttcttcaatatctcagt

SEQ ID NO: 52120 - DNA, 254 bp, Glycine max
  unsure (1)..(254): unsure at all n locations; Clone ID: 701141085H1
attccataaatctntgtatnttantnctcgatttnanngcaanatgancanaanaaggaaatggnaanancaacttctgnatgagtnttaacaacaacggntacattagcgctaatgacccgttgaactgggcgnggtggnggagncgatggcngggagcnacctngangnggtcaagngcatggtggaggagtaccggaggctggtcgtgaagctcggcggcgagaccctgtacgatctcgcaggtggnggcg

SEQ ID NO: 52121 - DNA, 251 bp, Glycine max
  unsure (1)..(251): unsure at all n locations; Clone ID: 701141086H1
gctatagaaaatgttcaaaaaattttcaggtgaagatgtatctgcacagaaccaagtgaaggcatctgttcaacgaaaaatacggcanagtattgctnaagagtatccgggtctgaacctgtgttggagatatacttcccaagaagtcccctctaatagttgctaaatgtcagaaccatctcaatctggttcttgtgaacaacgtgccactgtttttcagtgtccgtgatggaccatacatgcccaccttg

SEQ ID NO: 52122 - DNA, 252 bp, Glycine max
  unsure (1)..(252): unsure at all n locations; Clone ID: 701141088H1
gcttcaaatagtcactcaacaaaagagtccgaggcctcatccaaatctggcatatctgctatactatttcccacatcaagtcagcctccatcccatgttgacttggctcaagcatccaaaacacaaaatgtaaagcaaaccctggtaatggtgcaacccttgagttgagaaggacatcatcttttgacagaantgggaagagactgtggcagatctgtagctaatggactggggttanaagctttnttccnc

SEQ ID NO: 52123 - DNA, 255 bp, Glycine max
  unsure (1)..(255): unsure at all n locations; Clone ID: 701141090H1
gagaaacagcacaaggatggagctttctcaacttggttttctggatgagctacttgntccatngaaaagacactacttggagtaatgctttgtcaactgggttgaatgagttactactccntagtggttggagctttgactcttttgatgagaaccaaggtttagctactttgaatccctcatttgctgcattttccacaccactagaccacngatttgaatgcccttatggaagtgaagcagcatacccttttg

SEQ ID NO: 52124 - DNA, 253 bp, Glycine max
  unsure (1)..(253): unsure at all n locations; Clone ID: 701141091H1
ggcagtattgcaaataccacttgtcgtgatgtgtggactgaataccatgaaatgggatttgaaggagtgagagcagttgctgaacataaagtttacacagctggctcantcgttgacctccttcaatttgtgctccaaagatgatgnnncgtggtagtgctcatttntcttatggaattgctgacaatttggatgaccctaaatataatcactacaagtattggtcaaaccccttggaaacaaaatnaccaaa

SEQ ID NO: 52125 - DNA, 256 bp, Glycine max
  unsure (1)..(256): unsure at all n locations; Clone ID: 701141094H1
gggcacgcgtctacaccgatgtcaatgttcttcgccccaaagagtnctgggattacgagtccctcaccgttcaatggggtgatcaagatgattatgaggttgtgcgcaaagtgggaaggggaaagtaccgtgaggtttttgaaggcataaatgttaatagcaatgagcgttgtgtaatcaagattctcaagcctgtcaagaaaaagaagattaaaagagagataaaaatacttcagaacctttgtggggggccaaa

SEQ ID NO: 52126 - DNA, 95 bp, Glycine max
  unsure (1)..(95): unsure at all n locations; Clone ID: 701141095H1
tncgtcctangcaactgcccgcanttcggccctcgctntttccttcggcgccacccaccgtggcgcngttcgtcaaccaacaggctcaacgccct

SEQ ID NO: 52127 - DNA, 252 bp, Glycine max
  unsure (1)..(252): unsure at all n locations; Clone ID: 701141096H1
cgattttttcctaaataagtgaaagtgtagttacacctttttttgtgtgtttaccacttttgagtgccacagagttctgagtttcataggagaaaaaaaatgacagaagaacaaaccaaaacggttgagtcagaatcagtaacaccaccacnnnnnnnnnnnnnnnnnnnacaggttcctcctgctgctgaggctgaacatgttcctgaggctccaaaggatgtgactgaggagaatctgtattccagtgcc

SEQ ID NO: 52128 - DNA, 272 bp, Glycine max
  unsure (1)..(272): unsure at all n locations; Clone ID: 701141101H1
agaaagcagcagggaaggaggaggagggaaaactgcagaagggaattgcagagttctacgacgagtcgtctggcatatgggngaacatttggggcgatcacatgcaccacggcttttatgacccggattccaccgtttctgtttctgatcatcgcgctgctcanatccgaatgatccaagaatctcttcgttttgcctctctgctttctgagaacccttctaaatggcccaagagtatagttgatgttgggtgtggcatagggggcagctcc

SEQ ID NO: 52129 - DNA, 274 bp, Glycine max
  unsure (1)..(274): unsure at all n locations; Clone ID: 701141102H1
cggnntgcnactatgacgcaaggattatctaatcatactttctctccttctttccacggtgcttgcaactnncaagnnnnnnnnnnnnnnnnnnnnncctctatcttgggaagggcttctcccatcgcaaattgtctcccagttatcacattcacaaaaccattgacgaatcctatgcagttatcttcgatgctggtagcacgggaagccgtgtacatgtctatcgttttaaccaacaattagatctccttcgcattggccaagaccttgagtt

SEQ ID NO: 52130 - DNA, 273 bp, Glycine max
  unsure (1)..(273): unsure at all n locations; Clone ID: 701141104H1
cttagaanaatcgaaaacgtcttcaaaaaaccaagccantattaatggctgtcgattccttcttccagaaagaacatcaaataccgggagtntgtggacgggaatggaaacgtagctgtcggtttgaagttgcataataaaccaagtaatgatggccttaaccgacagtttcctctagagattccgccgattctatttgaagagacttcacttccagcaggattgcacggttcacatactaaagatgtttatagtatttcagtgttgcctgag

SEQ ID NO: 52131 - DNA, 272 bp, Glycine max
  unsure (1)..(272): unsure at all n locations; Clone ID: 701141105H1
tctgcagctacgatgggtaagggaacggggagtttcggtaagaggaggaacaagacccacaccctctgtgtgaggtgtggccgccgcagcttccacctccagaagagtcgttgctctgcgtgcgcttaccccgctgcgcgcaccaggaaatataactggagcgtgaaggccattaggagaaagaccaccgganctggaaggatgaggtacttgcgtaacgtgcctcgcagattcaagagcggcttcagagagggtaccgaagctgcacccag

SEQ ID NO: 52132 - DNA, 240 bp, Glycine max
  unsure (1)..(240): unsure at all n locations; Clone ID: 701141106H1
agcngtgnaaaangctgcagaggcagcacacgagctgtattgatactacnttgctgtacntcaatttcatgtccaaagttgtgatgaaattgaagatgtaatcagcagatctcaatttccagaagggttccttttcggaacaggcacttcctcttaccagattgaaggagcgtattttgaagatggaaagggtttaagcaattgggatgcttttagtcatacaccagganagataaaaaa

SEQ ID NO: 52133 - DNA, 272 bp, Glycine max
  unsure (1)..(272): unsure at all n locations; Clone ID: 701141107H1
tttcgtggcttcctgcgcatctattcattctctctgctttcaattacaagcaccaaaattccgacgaatcagtcatcttccgaaacctcgcagtagctggcttagcatgatggattcaaactcaccgtttctgcctcattgcaattctgatncaaaaaatgcatttcgcaagccttctggtgatgcagctaataggaattatcggcgtcggtnacctgttgaaggntcaccctcacctgatgctagtcctaggcatggacatagctcaagtc

SEQ ID NO: 52134 - DNA, 272 bp, Glycine max
  unsure (1)..(272): unsure at all n locations; Clone ID: 701141108H1
tccctccttcctctgccttataattcttgtgacccttttngctggtagcattgaaagtgcaccagcaaacgtgaagccaagccattatgctgcacccttcaataggagtgtttttccttctggttttctatttggaataggctctgcagcttaccagatagaagnagcagcagctatagatggcagaggaccaagtatatgggacacctatactaaacagcaaccagggaagatttgggatcatagtgatggaagtctagcaatngattttt

SEQ ID NO: 52135 - DNA, 92 bp, Glycine max
  unsure (1)..(92): unsure at all n locations; Clone ID: 701141109H1
ttccaattcctgttgantcnnttgtaactgtttaantaccgtctnntccctccgattcacgactngcctgagtctnctcaactcggaacgat

SEQ ID NO: 52136 - DNA, 273 bp, Glycine max
  unsure (1)..(273): unsure at all n locations; Clone ID: 701141112H1
gtttttcntctacgggcgtttctcntctccagcttctgtgggtgaagcgagtnnttggcgatggagaaaggaggaaagggcgcttcgctgttcagcaaagggggactaggatcncctaaaagggaaatatgacattgcaacaaaatcagcaaantgnaaggagggttcagttttctactgatggtccattatttgaatctggagtaagtagtaactcagccacttcactaaaatctggtggaaaaggaggaatgggagacaatgttgcaaaag

SEQ ID NO: 52137 - DNA, 267 bp, Glycine max
  unsure (1)..(267): unsure at all n locations; Clone ID: 701141113H1
atgaaggtccttgtnttcttcgttgctacaattttngtagcatggcaatgccatgcgtacgatatgttccctctccgaatgaacactggctatggtgcccgtactccggaggtgaaatgcgcaactnggaggcttgctgtggaagcacacaacatctttggctttgagaccattcctgaagagtganttgaagcaacaaaggaatacatccatggcgaacaatatagatcagactccaaaacagttaaccaacaagcttacttttat

SEQ ID NO: 52138 - DNA, 265 bp, Glycine max
  unsure (1)..(265): unsure at all n locations; Clone ID: 701141115H1
gangctaagatttttgtgaaatctcttcgctccacattctcatttctanaggatgttcgtgttccaactattgctgttattgaaggagtagctcttggtggtggacttgnaatggctcttgcatgtgatattcgaanntgcggagaaaatgctctgatgggtttgccagagacaggacttgcaataatccctggggcaggtggaactcagcgactgcctagattggttggaaaagcaatagcaaaggatattatatttactggtc

SEQ ID NO: 52139 - DNA, 260 bp, Glycine max
  unsure (1)..(260): unsure at all n locations; Clone ID: 701141116H1
caactttgtgcttctcattagtcgccaagggaaggngagactgacaaaatgntcactcaccttattctcagaaagaaaggagtaaggtaatccgtgagctcagtggaatgattctttncccgtgctcccaagcaatgtaattttgtagaatggcgaggacataaagttgtttataaaaggtatgctagtctctatttctgcatgtgcattgatcaagatgacaatgaattagaagtccttgaaataattcatcatttgtg

SEQ ID NO: 52140 - DNA, 270 bp, Glycine max
  Clone ID: 701141117H1
ttcttttcctttctgctgataagctgtgtgagtgagttcattgacaagcctgaaatgacaactatgctgacaaatgagcatggtctgagtttgaacctcaaggagactgagctttgcctcggtttgcctggcgggggctctgaagtggaaactccaagggccactgggaagagagggttctctgagaccgttgatctgaagcttaatcttcagaccaaggaagatctgaatgagaatctgaagaatgtctcaaaggagaagactctcctt

SEQ ID NO: 52141 - DNA, 269 bp, Glycine max
  unsure (1)..(269): unsure at all n locations; Clone ID: 701141118H1
tccaagcagcctccaattcgtgccactctcttcaaaatggccgttaccttctctnatctccacacagaatcaggnnnnaagtccctcgacgacttcctctctgggaaggtctacgtttctggggatcagttcacaaaggacgacatcaaagtgtatggtgctgttttggagaagccaggtgactcttttcccaatgctgccaagtggtacgaggttgtctcatctcagcttgctgcaagcttccccggcaatgctcaaggggtgagatt

SEQ ID NO: 52142 - DNA, 268 bp, Glycine max
  unsure (1)..(268): unsure at all n locations; Clone ID: 701141121H1
acactcccatacacacacgttgtntcgcacacattccttcattccgcagcagcaaacatctctaccttaaacgacaacaatggccgatgccgaggatattcaacccctcgtttgcgataatggaaccggaatggtcaaggctggttttgccggagatgatgcgccgagggcggtgttccccagcattgtggggcgtccacgtcacacgggagtgatggttgggatggggcagaaggatgcgtatgttggggacgaggctcaatccaag

SEQ ID NO: 52143 - DNA, 271 bp, Glycine max
  unsure (1)..(271): unsure at all n locations; Clone ID: 701141122H1
cgaagtcatcaagcacgagcgcctcgtcgacgaccggttcttcctcatctgcaaggggcaagagcggttccgcgtanaatggtgttgtccgcaccaaaccctacctcgtcgcgcaggtgacgtggctcgaggaccgcccttctccctccaccgacctcgatctcgacggtctcgccaccgaagtggagacctatatgaaagacgttatccggttatcgaaccggttgggagggaaaccggagaaggaggttggggatttgagacgaaacct

SEQ ID NO: 52144 - DNA, 144 bp, Glycine max
  unsure (1)..(144): unsure at all n locations; Clone ID: 701141123H1
attccatatccccgttttccntcactcttgaaccccgattcatttccacacnacatangaggnnggcngnaatatnaataccttctcacatgaaagcttggacatactgngagtatggaanatccaaggaagttctcaagttta

SEQ ID NO: 52145 - DNA, 269 bp, Glycine max
  unsure (1)..(269): unsure at all n locations; Clone ID: 701141125H1
ctccctccttgttcaatggncttagggtttccggtgtccatgcgtngaagctagcaataatgcgtttttgaaacccgtatncatctgtatccaacgatttactagaangagatcgcaatttctccatcttctcgtttcggtggctcgtgaaatcgaaagttatcgaaactttcgcgcgacacgaagtattgggaaccaagcaaaatttctatggctgacgaaccactatatccaatagcagtgcttatagatgagttgaaaaatgatga

SEQ ID NO: 52146 - DNA, 267 bp, Glycine max
  unsure (1)..(267): unsure at all n locations; Clone ID: 701141129H1
gagttttcaaatggcagaggngaaaaggtagagtttgtgtcactggaggcactgggttccttggttcatggatcatcaagagactccttgaagatggatatgctgttaacaccactattagatntgacccaggacgaaagagagatgttagcttccacacaacatangnncggacatccgnnaagctaaaaattttcaacgctgatctcagcgaccctgaaagttttgatccagcagttgagggatgtgttggaattttccacacag

SEQ ID NO: 52147 - DNA, 220 bp, Glycine max
  unsure (1)..(220): unsure at all n locations; Clone ID: 701141132H1
tagtgcctccttgccaggngctgccactcctctctttctctctcttcatccttctgttgggttggntgtggagtgttgttttctgttgtgcacgtgttgtcattttttaccctcgccacagatctgaagtgttcaagtttggattttgtgcttctgggttggtttgtnttgccttttcctcaactgggtcgaccgtgtttaactgaatttgtctctcgga

SEQ ID NO: 52148 - DNA, 267 bp, Glycine max
  unsure (1)..(267): unsure at all n locations; Clone ID: 701141133H1
gcatctttacctcttccattttatacaccagtatcgctctgtatttgtctcatcctcctaactgaaccctaatttcttctgggaaactctattttctctaatatggagcaatactggtctgggagtgccatcaatgaaaacaaaggaatggtagataatttgcatcgttatggagtaatcacatctagaaaggtagctgaagtaatggaanccattgatagagctttgtttgtacccagcggcggcggactccaaccttatgtggac

SEQ ID NO: 52149 - DNA, 268 bp, Glycine max
  Clone ID: 701141134H1
ttctcttctgtcattgcttctcctccacacacgcacagagaccacacacttttgcagtcacattgagaatggggcgtgttcgcacgaagacggtgaagaaatcctcgcggcaagtgatagagaggtactactcccgcatgacgctggacttccacacgaacaagaaggttctggaagaggtggccatcattccctccaagaggctccgcaacaagatcgcggggttctccacccatctcatgaagcggatccagaagggtcccgtgcg

SEQ ID NO: 52150 - DNA, 271 bp, Glycine max
  unsure (1)..(271): unsure at all n locations; Clone ID: 701141137H1
agaggagaatgctctgcttcagcttcagcttcagccaatccctccagatgaaatctgggcnaagnttgttctgtcagatgagagatattcancatgtgnagataagttcagatgaaaaagtaatatcttcagagatatcagctacttctaatgncaaacatagctggngcaaaatagtaaggaatcctgatctatgttccagccacaatggaaaacnntngtcangntcacaatacttgttgatggggtcaaggtacacagtgatgatacc

SEQ ID NO: 52151 - DNA, 267 bp, Glycine max
  unsure (1)..(267): unsure at all n locations; Clone ID: 701141139H1
gntgaangcngcanagatgtttcctttcgggcaaaagggtcaaaagatnaaggggactatggtggttatgnngaanantgtgttggatatcaacagcatcaccagtgttggagggatcgttgaccaaggcttaggcntcataggcagtgcagtcgatgcacttacttttgcagcccccanaatctccatccagtngatnngtnctaccaaggctgntggtgggaaaggaagnattggnnagngtacaantttaagaggnnagataac

SEQ ID NO: 52152 - DNA, 266 bp, Glycine max
  unsure (1)..(266): unsure at all n locations; Clone ID: 701141140H1
cttcttctcttcccctttctttttcttcttctgagcttgtttaagctctttctatttgattccattaacatatattatcgncaatgtgtggtattcttgctgttcttggttgttctgatgactctcgagccaaaagggtccgcgtgcttgagctctctcgcagattgaagcaccgtggccctgactggagtgggctccatcaacatggtgactgctttttagcacatcaacggttagccatagttgatcctgcttctggggatcaa

SEQ ID NO: 52153 - DNA, 266 bp, Glycine max
  unsure (1)..(266): unsure at all n locations; Clone ID: 701141141H1
aggcttcnaaatcaacggacacnaaattagttgggccaactggaagttccatattggatttgatccacgtgccggaattgtaatatcactggcatccatttataatttggagaagcacaaatctcgtagtgtgttatacaaaggttacatttctgagctgtttgtgccataccaagacccaacagatgatttactataagactttctttgatgctggagagtttgggtttggtctctccacggtctcattggtgcccaaccgtgat

SEQ ID NO: 52154 - DNA, 263 bp, Glycine max
  unsure (1)..(263): unsure at all n locations; Clone ID: 701141142H1
cctataacaagaaacaggcggaaggtcctactggtggggatgaagaagaatctgagaagtctgtatctgaggtgannnnnnnnnnnnnnnnnnnnnnnngcagtggcgaggaagaggatgacgattagagaatggactgataattgcatttatgtaggttctgatgattttgatcatctgttgtaggtggtctggtcatttcctgataaacatatttcttgcttccaaaaaatatttccctgctccctccgtaaattggttgt

SEQ ID NO: 52155 - DNA, 136 bp, Glycine max
  unsure (1)..(136): unsure at all n locations; Clone ID: 701141147H1
ggcacttcnttgcttggtgaagtcccttnntgttctcttcntcttggncttgcgagagaaagccatgccaganacgaagatntttggcatgctgtttggccaaacantcccattccaagtncattgcgagnangcg

SEQ ID NO: 52156 - DNA, 261 bp, Glycine max
  Clone ID: 701141148H1
cctttcttctccgtttccgtttcctcgttcgaattcgctttttgatctgcgaaaatgagagagtgcatctcgatccacattggtcaggctggtatccaggtcggaaatgcttgctgggagctctactgcctcgagcacggcatcgggcccgatgggcaaatgccaagtgacaagacagttggcggtggtgatgatgctttcaatactttcttcagcgagactggtgctggaaagcacgtgccacgtgcagtgtttgtagat

SEQ ID NO: 52157 - DNA, 266 bp, Glycine max
  unsure (1)..(266): unsure at all n locations; Clone ID: 701141149H1
cgaacatggctaagtatcattcaagtgggaaaagctcttccatgactgctatngccttcctgtttatccttctaatcacttatacaggcacaacagatgcacaatccggggtatgttatggaagacttggcaacaacttaccaacccctcaagaagttgtggccctctacaatcaagccaacattcgcaggatgcgaatctacggtccaagcccagaagtcctcgaagcactaagaggttccaacattgagcttttgctagacatt

SEQ ID NO: 52158 - DNA, 265 bp, Glycine max
  unsure (1)..(265): unsure at all n locations; Clone ID: 701141150H1
gttttctctctcaccctcatatccatcatcttccanacaacanacgagcncaaggagnaatcaataatcaagncacgcacagaccaaccaaggggggaganactgangnacttgcattttttctaccacganatcttagagggcaagaacatcacggtggtgaaaatcatcgagccatcagcgagcgaggttcgtgaagcaactgggtttggaaccactttcatgatgganaatgttttgaccgagggtccagagctgagctcga

SEQ ID NO: 52159 - DNA, 264 bp, Glycine max
  Clone ID: 701141153H1
ccagttttcgaggacactatcattggttacattgatctccagaaactatgcacaaataagaccattggtgatgaatggagagttgaactaggatgtcgatgaaaagcaaagtcttcactgtcttctatttctagtatgctgctatgctatgacatgacacaaatattttgatgagggtaactagtggatgaatgctacgtccagaagtaaattcaattccttgcttttcctgtatgatattgtataacttatattattccctgt

SEQ ID NO: 52160 - DNA, 265 bp, Glycine max
  unsure (1)..(265): unsure at all n locations; Clone ID: 701141155H1
gcaaagtctttcaaggctcgaatgacggtgcgcctagctgttgctggtgctttccanacnagatatnngnnnanagctgtgtcaagattggaagcagcattggcaacaacagaaatnngaaccccaagaataccagtcatctccaatgtgnntgcacagccacatacagnttntatnacaataaagaagatattggcacgccaggttacttcacctgttcaatgggaaacaacagtgaagactcttctaaccaagggtctgaaga

SEQ ID NO: 52161 - DNA, 266 bp, Glycine max
  Clone ID: 701141156H1
attcgttatcgctttgcactagcagctttgaaacccggttcatccgaagcccttcaccgaaccatgtcgaggagaaaggttagagagccaaaggaggaaaatgtgactctgggtccagctgttagagatggtgaacacgtttttggcgttgctcgcatctttgcctccttcaacgacaccttcatccatgtcactgatttgtctggcagggaaacccttgtccgaatcactggtggtatgaaagttaaagctgacagagatgaatc

SEQ ID NO: 52162 - DNA, 261 bp, Glycine max
  unsure (1)..(261): unsure at all n locations; Clone ID: 701141158H1
tatttgcggntgacancganaaggaaagnnggaaaaaaaanacnaanaaggagnagatgggtagtnaggtttctnatggaaattggcggatcatccaaagcttccaaagggtaagactgnngntgttgtggtattggatggttggggagaggccacanccaatgagtannnactgnatccanaaggctgaaacaggaagnatggattcacttaaaaagggtgctctgaanggtggagattggtcagggntnatggtatgct

SEQ ID NO: 52163 - DNA, 261 bp, Glycine max
  unsure (1)..(261): unsure at all n locations; Clone ID: 701141159H1
ctcaaccccatttctgaacggccatggccatggctccagccttctctggaaacccagttcggcggngactcagacccactgggccccgccgagtttgctgcctcaaatcaatgngatgaagacgangcagggaaaagtggtgtgctccacgaacgacaagacggtggaggtggaggtggtgcggctggcccctcacccaaagtacaagaggcgcgtgaggaagaagaagaagtaccaggcccacgatcccgataaccaatt

SEQ ID NO: 52164 - DNA, 228 bp, Glycine max
  unsure (1)..(228): unsure at all n locations; Clone ID: 701141160H1
ctcgagnncggcaacatcgntgaagggtgagctcaataaagtgtcntctnaaaatggncctgtgngaaagtgganactcaganccgatggacnagaaaggcaaatgataaaacangncacnaggaatacgangncatcaccgnnntcttctacagccgnttgnnagtcnagcttgggtgttaaccagatgcacanatgngattttgnatngcaagcgtgcnatacaca

SEQ ID NO: 52165 - DNA, 259 bp, Glycine max
  Clone ID: 701141164H1
acccctaatatttggaccagctagccttgtaaatggaaacataacaactgagagagaaagaatggcagctcaggtcttccaacctagtcataggtacgcattatcccctttatcaataaatgcatgcaacctggctaagaaaggcttggaatagggaaatataagttttttaaacagaccatgtgcccaaaaagagatgaagttttatttccttgtagttttcagtgttatattgcctaggactccccattggttgcct

SEQ ID NO: 52166 - DNA, 261 bp, Glycine max
  unsure (1)..(261): unsure at all n locations; Clone ID: 701141166H1
gcaaattcttctgtggatagtttaacttcactgcattggctgctttccatagcttttttnattnttancttttancctcaaacacctattctctttttagtaaatcttatttgagactcaatcaaacactaaatgcaaacatctctcttaaaagagatttgaatcttgattcactaggttatcagaaagtaacattttctactagacttaatcttattgattgccacttccatatagctagctgctgagagagcctcgtca

SEQ ID NO: 52167 - DNA, 257 bp, Glycine max
  unsure (1)..(257): unsure at all n locations; Clone ID: 701141168H1
tcatgcgtaatncnggtgatgtttctcactgttttnnaattcttggattttctttttgtttctatcattctttgtntatagttatgagccattagtttttcaattttattctcctttatttccaattggggccttacagggaagattgacaatggatgttggtaggatgtggaagcagtggagattattgacgtactcactgtgaagccttaggttttattatcctacgttatctttgttttcttaattgttgtttc

SEQ ID NO: 52168 - DNA, 259 bp, Glycine max
  Clone ID: 701141170H1
cgattgaggtgaggaaccatgtttccccagaaccagagccagagtcggaggaggattccagttgttgttgcccaatctgcttgggaccattccttcaactttcctacctcgacaaatgttttcataagttttgcttcaattgcattttacgctggaccaaggtggttgctggcaagcaccgttctccaccttcttctgtaaaatgccccctctgtaagactgaaaatttttctatcatatatggagttgatgggagttg

SEQ ID NO: 52169 - DNA, 261 bp, Glycine max
  unsure (1)..(261): unsure at all n locations; Clone ID: 701141171H1
gaacacctatgataataaganaaagattgancagatgatggatcttattaancgccttaagctctgcgttcggtggtttaagagaatcgaagaagggtatatgcaaganaaggaaaagcttcaatctgagctagagactgctgagaagaagtgcactgatactgggactgagatgaagagtaagattgaggagttggaagagactgtatctgatttgaggaagacaatttcttctctagaagagagaattgtaaaggaaga

SEQ ID NO: 52170 - DNA, 243 bp, Glycine max
  unsure (1)..(243): unsure at all n locations; Clone ID: 701141173H1
ctgttaggcggcaaacatagagtgcgtntctaagctacacttcacagttgggacccaatggattcgttctcaaatccatccagtggttcgtcgcaccaattatctgcgcacgatctcaaaaatcagttgaagaatcaacttgccattgagtatgctcaacaatttcttgagactgtgggaagaaagtgttttgagaagtgtgttacaaaaccaggttcaagcctcggtgggagtgaaagcagt

SEQ ID NO: 52171 - DNA, 243 bp, Glycine max
  unsure (1)..(243): unsure at all n locations; Clone ID: 701141174H1
gtctcttcctctnccgcaacaatggttntccgccaagaaaaccaagaagncccatgaacgcatcaacaacaggcttgctcttgtcatgaagagcggcaaatacacccttggttataagaccgttctcaaatctcttaggagctccaaagggaaattgattatcattgctaacaactgcccccctttgagaaagtcagagattgaatactatgccatgttggcaaaggttggagttcatcatta

SEQ ID NO: 52172 - DNA, 132 bp, Glycine max
  unsure (1)..(132): unsure at all n locations; Clone ID: 701141175H1
anttttcaaatggcagangnaaaaggtagagtttgtgtcactggaggcactgggttccttggttcatggatcatcaagagactccttgaagatggatatgctgttancaccactattagatctgacccagga

SEQ ID NO: 52173 - DNA, 132 bp, Glycine max
  unsure (1)..(132): unsure at all n locations; Clone ID: 701141176H1
tcggttcagtgtctctctttgacggtggtgctgtcagcattgacctcagcttgagcagtaaaacatcatcagcactactacggtanntggctgtgctgcaatctttcgtttcggtccacccagattctcact

SEQ ID NO: 52174 - DNA, 247 bp, Glycine max
  unsure (1)..(247): unsure at all n locations; Clone ID: 701141180H1
gtttatcgtgaggagaatatgaagttgtttgtnttcnttgttgctgcagtagnccttggtagcatggccatgccatggcgcaggctaccaaaggttccctctccgaatgaaaactggctatggtgagcgttcttcggaggtaaaatgcgcaagttttaggcttgctgtggaagcacacaacatccgagctattaaaaccattcctgaagngtgcgttgaaccaacaaaggactacattaatggcgaa

SEQ ID NO: 52175 - DNA, 257 bp, Glycine max
  Clone ID: 701141181H1
ctttgaaggagctcatgtggctgttgtagaagtccaacattcatcccttctgtattggtccatctatcaatgagctatggaataagtcagattaaatttggcattgaatattaacgtttatttctggaaatgagttttaggtgataaaggtataattgatggattcagttgtcagtgactttcctcataaacacatttaaaaatgtggaactatgaatatctgtttaggaaaattttgtttaatgcaaattgttgtt

SEQ ID NO: 52176 - DNA, 258 bp, Glycine max
  unsure (1)..(258): unsure at all n locations; Clone ID: 701141182H1
ccaacaccaacaaaatctttccaatttaggaaactcttctctncagccttccttccccttctctcttttccaaaactaatggaaggttctgtccttgaacgtcttgattttgggaagatgggatacgggtgcaagcattatagaagaagatgcaggattagagcaccatgttgcaatgagctctacttttgccgtcattgtcataacgaggcaacgagcatgctgagcaacccttttgatcggcacgaactcgtccgc

SEQ ID NO: 52177 - DNA, 256 bp, Glycine max
  unsure (1)..(256): unsure at all n locations; Clone ID: 701141184H1
ccagattcaaccagttaaacttggaacccaaggctttgaggtttcaaaattgggattcggatgtatgggccttactggagcgtacaatgaccctctccaagaanaggatggcatatctgttatcaagtatgcgttcagtaagggaatcacattttttgatactgcggatgtttatggagccaatgctaatgaacttttggttggaaacgctttgaagcagctgcccagagaaaagattcagatagccacaaaattt

SEQ ID NO: 52178 - DNA, 132 bp, Glycine max
  unsure (1)..(132): unsure at all n locations; Clone ID: 701141186H1
aaaaacagcaccctagatttgctcttctttgcttcggaanaaagagaaaaacaaataacaatggcgttcgcttctttcctcggcagagttctcttcgcttccgtcttcatactctctgcttaccaagaattt

SEQ ID NO: 52179 - DNA, 256 bp, Glycine max
  unsure (1)..(256): unsure at all n locations; Clone ID: 701141187H1
ggnagtgctgacaaacaaggattcccgatgaaacagggagtncttactcctggtcgtgttcnnacnttgcttcacaggggaactccttgcttccgtggatatggaaggcgtaatggagatccgtaggagaaagtctgttcgtgggtgcattgtcagcccagacctctctgtnttgaacnggtaattgtgaagaagggtgagaatgatttaccaggattgactgatgctgagaagccaaggatgagaggcccaaaga

SEQ ID NO: 52180 - DNA, 257 bp, Glycine max
  unsure (1)..(257): unsure at all n locations; Clone ID: 701141188H1
tctgtctcgccaaaattcatgatttcgtgttgaatgcntcatcagagttaggtttatttttngacattnggtgtaaaatgggggtgccaacttggagaaaaccagtgntctactgggtttgccttttcgtcattatcaatgcgtttgtacaaattagcaatgcattttatcttccgggaagcnacatgcatacttantcaaatggagatccgatatatnccaaggtnaattcattaacttctattgagaccgagctc

SEQ ID NO: 52181 - DNA, 255 bp, Glycine max
  unsure (1)..(255): unsure at all n locations; Clone ID: 701141189H1
caccatgctgtgacaaggtgggtttaaagaagggaccgtggacgccagangaagatcanaagctcttggcttatattgaagaacatggccatggaagctggcgtgctttgccancaaaagctggacttcagaggtgtggcaaaagttgcaggttgagatggactaattatctaaggcctgatattaagaggggaaagttcagcatgcaagangagcaaaccatcattcaactccatgcactattagggaacaggt

SEQ ID NO: 52182 - DNA, 255 bp, Glycine max
  Clone ID: 701141190H1
tccttcctcactctaaatccgccattgccattgggatggcgaagaagcgaaggtccgtggccacgcgccttgacgaagtggatcgaaccatgtactcgactttctgcagcaccgccaactccctctctcatctctacacccacgccatgaaccaacaaaaactctcattccaggccggtgaacgacacgctcttgaaaaattgtatcaatggattctcaggcaacagcgagatggatctaggctgaccaccattg

SEQ ID NO: 52183 - DNA, 253 bp, Glycine max
  unsure (1)..(253): unsure at all n locations; Clone ID: 701141191H1
aaaaataaaaatcaaagagcataatgtcaggnatcattcacaagattggggagacccttcatgtgggagggcacaagaaggaggaggagcataagggtgagcaccatgctggagaatacaaaggggagcaccatggtgaacacagtagtgagtacaaaggagagcatcatggtgaacacaaagctggagagtaccatggtnagcacaagccagagcacaaagaggggttcctagacaaagtcaaggacaagat

SEQ ID NO: 52184 - DNA, 254 bp, Glycine max
  unsure (1)..(254): unsure at all n locations; Clone ID: 701141192H1
gatatatggatttanacanacgtgtcatnatttccctttaataaacggatctgtcatatggttgtantgagcttaatatatttatgcaattgcaaactgtcttcaaaaagttgaagattcacaagaggttttttaaccccccggctagggaaaacagcgtgaaaaagttgcagcaagagataaaacttgaataagttcatatatttgaagtccgatcaagcatcaattctcatattgctgtttgtgatcttttt

SEQ ID NO: 52185 - DNA, 253 bp, Glycine max
  unsure (1)..(253): unsure at all n locations; Clone ID: 701141193H1
anngagaagganatgtatagcaatttcaaagagcaagcaatagagtacgtgaaacaagcggtagatgaagacaataagggaaactacgcgaaaggttttcaactttacatnaacgcgttggagtatttcaaaacgcacctcaagtacgagaagaaccctaagatcaaggangccatcactcagaaattcaccgagtatctccgccgggccgaggagatccgggccgtcctcgacgatgggcccagcggcccgg

SEQ ID NO: 52186 - DNA, 252 bp, Glycine max
  Clone ID: 701141194H1
ccacaacaccccaaaaaccaaggaagcatattactacagaatgatctttgagaggttcttccctcagaactcagctaggctcactgttcctggaggagcaagtgttgcatgtagcacagccaaagctgttgagtgggatgctgcttggtctaacaaccttgatccctctggtagagcagcacttggagtgcacatttcagcctatgaaaaccagaacaacaagggtgtagaaattgagaagataatacctat

SEQ ID NO: 52187 - DNA, 126 bp, Glycine max
  unsure (1)..(126): unsure at all n locations; Clone ID: 701141195H1
acattttcatgactgatggtgcaagccctgctgtccataatatgatgcaattactcattagatcagaaaatgatggtattctgtgtcccattccacagnacacncnnccntnagcctcaattgccc

SEQ ID NO: 52188 - DNA, 227 bp, Glycine max
  unsure (1)..(227): unsure at all n locations; Clone ID: 701141196H1
tcaatagtaaacgcaaaanctccacaaacaacanaacctctgctgggtcttctcttcggggtcagactctaaaagcaagcatctatctaattgatggaagcgtgttttcgtaattttatttcattttagtttttgttattatttcatgaatcatgatcatcgtcttcttctctcgacaaaaccaataagtgtccacttcttttcacgttttcaatcgttctagtctt

SEQ ID NO: 52189 - DNA, 271 bp, Glycine max
  unsure (1)..(271): unsure at all n locations; Clone ID: 701141201H1
cagccaacaagaagcaaaacactgaaacaaaagcaaaaaagagctgtgagacagtgatggctcacggtgcttacagcaagcngcgcgtgagncaaacgcgttcgatccaactccaagcctctgggcatcgccaagaagcccaagcccaagcccaagccctccgtttccctcaaaaaccagattcgatcccttgagcgcatgctccgcaagaatctgcctcccgaggtgcgagacgcgcaggaacagaagttggaggcgctgaagaagnacc

SEQ ID NO: 52190 - DNA, 251 bp, Glycine max
  unsure (1)..(251): unsure at all n locations; Clone ID: 701141202H1
tagccatnnannanatnggccnccncnannactngctgggacganaccgtcgccggcncaaggccggaaaacggtctncggcaagctccgaaaacaccacaccttcactttccgacctagctccggcnaggaaacggagggcgggagcgtgagatcgtacggagncgaatcgtcggaggaagcgacgagagtgacgcgtagtatcatgattcgtgaaaccgcccgggtaccagagtggatcgcctccggtt

SEQ ID NO: 52191 - DNA, 250 bp, Glycine max
  unsure (1)..(250): unsure at all n locations; Clone ID: 701141204H1
cttcattggttcctatgcccctgtcccagcctctgaaacctaccctgaggctacctcttctcttctcttctctgtcgtgagtcaccatggtgagggttagtgtgctgaacgatgctctgaagagcatgtacaatgctgagaaaaggngaaagcgccaagtcatgattaggccatcctccaaagtcattatcaaattccttttggtgatgcaaaagcacggatacatcggagagtttgagtatgttgatga

SEQ ID NO: 52192 - DNA, 255 bp, Glycine max
  unsure (1)..(255): unsure at all n locations; Clone ID: 701141205H1
aaaatggagccattattttcttcagcagcagcaatatgtgtggtgactgtnttggtagctgtgattcccatatgggcactgnagatgctgaactcgctgtggcttaggccaaagaggtttgaaaggcttcttagagcgcaaggttttcatggtgacccatactcactttctcatcacaactccaaccaaacccttttgcaacaacaccagctcaattcccaaccttttcctctatccgatgatgttgctcctcgt

SEQ ID NO: 52193 - DNA, 257 bp, Glycine max
  unsure (1)..(257): unsure at all n locations; Clone ID: 701141206H1
ctgctatggctgctctgcaatacttggnatcgctgcgtaattcgcaccctgagctctccgattggtacaattcgctggcggatctgtatcagaagaagctctggcaccagctcactctcaagctcgagcagtttgtggctctcgccgtcttccaggctggtgatgctttaatacaattatatcacaatttcatcacagactttgagncgaaaatcaaccttctcaagcttgcacattttgctgttatagtttctcgg

SEQ ID NO: 52194 - DNA, 258 bp, Glycine max
  unsure (1)..(258): unsure at all n locations; Clone ID: 701141208H1
cgtgaggtgagtntctgttctttctctctcgcaaattcagttganttgattaacactcgtttgttaatgtagtttgtnctgtntttgtttagggtttaaaattaaggatttagggttagggtttaagatttagggtttaagaagtagccataaganggctctattataagantcaacagcaggggcttatttcaatggccacctgactgccgcttagagccaaaacggaaaaaaccagttgaagatccttgaaatcaa

SEQ ID NO: 52195 - DNA, 258 bp, Glycine max
  unsure (1)..(258): unsure at all n locations; Clone ID: 701141209H1
ccagtnttggagggatcgttgaccaaggcttaggcttcataggcagtgcagtcgatgcacttacttttgcagccaccaaaatctccatccagntgattagtgctaccaaggctgatggtgggaaaggnaaaattggaaagagtacaaatttaagaggaaagataacattaccaaccttgggagctggcgaacaagcatacgatgttaattttgaatgggacagtgacttcggaattcccggtgcattttatattaaga

SEQ ID NO: 52196 - DNA, 259 bp, Glycine max
  unsure (1)..(259): unsure at all n locations; Clone ID: 701141210H1
gangaagcatttggtcacttgaagtcatcagattttctcgcttatggaatcaaatctgtatcccaagatgtcttgcctgtccttgactgatgcattcgatggaaatattttgagccttgagtttgataattttgctgaagtgcacaaactctatgaaggtggagttacactacctacaaactttcttagcaagatcgcccctataccagtgatcaaggaaatttttcgaactgatggcgaacagttcctcaagtatcca

SEQ ID NO: 52197 - DNA, 69 bp, Glycine max
  unsure (1)..(69): unsure at all n locations; Clone ID: 701141211H1
gctcactccnactgtatcccattcctctgcnanatccngancatacgttttcanaacactnaccttntg

SEQ ID NO: 52198 - DNA, 243 bp, Glycine max
  unsure (1)..(243): unsure at all n locations; Clone ID: 701141212H1
tgaagactgtttttcaagcccaccacngctgtgtcttngtaacctgttggtgttaagactaacagtacaaaaagcacaagcacnagcatcaacccttctttgaagatacctcaacaacaaaatganccacctttgcaaaactttgctgtgccagggaaggcaaggagcaaaaggaagaggctttcagcaccaagaaccaacaaagaccctctaagcatatggtcacaccatttgaaccctcaa

SEQ ID NO: 52199 - DNA, 245 bp, Glycine max
  unsure (1)..(245): unsure at all n locations; Clone ID: 701141213H1
ggcagctctatggcaacgacttgttcatcaacggaaagggtagggaagccatngaaatacggtccattcattgagtcagtgaacaagagagggctgaacctctctgaggtggtgtgttccacattcacaatgancntaaannggagaaaccaaggacagaaggacagtgagagtggaatgcttcatgaaagaaagcagccccaatatctgggtgaggcctatcagtggantcacaatggtggttg

SEQ ID NO: 52200 - DNA, 256 bp, Glycine max
  unsure (1)..(256): unsure at all n locations; Clone ID: 701141214H1
atcgatcttaaggctgggggtaagagcaaaaagaccaaaagaacagcaccaaacnccaatgacatctacctcaaattacttgtcaagctttatcggttccttgttcgaaggactggcagcaatttcaatgctgttatactcaagcgcttgttcatgagcaaggttaacaagcctccaatttctttgtcaaggttaattaagtatacaaaggggaaggaggataaaattgctgtaatagtggggactgtaactgatg

SEQ ID NO: 52201 - DNA, 267 bp, Glycine max
  unsure (1)..(267): unsure at all n locations; Clone ID: 701141215H1
caagggttcaatctttttggctgtgttatgcttctcagcactgtcactgagtcgttgtcttgcggaggataatggacttgttatgaacttctacaaggaatcatgccctcaggctgaagacatcatcaaagaacaagtcaagcttctctacaagcgccacaagaacactgctttctcctggctcagaaacatcttccatgactgtgnctgttcngagttgtgatgcttcactgttgctggactccacaagaaggagcttgnctgaga

SEQ ID NO: 52202 - DNA, 267 bp, Glycine max
  unsure (1)..(267): unsure at all n locations; Clone ID: 701141216H1
ctcactgtgctcaccattattggctacaaaaggcagactgatacaacggtaggtggcaccgactgtnatggggttggcattttgggcatcgcttgggcctttggtggcatgatcttcatccttgtttactgcaccgccggtatttcaggaggacacataaacccggcggtgacatncgggttgttcctaggacgcaaggtgtcgttgataagggcgttgttgtacatggtggcacagtgtgccggtgctatctgtggtactggattg

SEQ ID NO: 52203 - DNA, 260 bp, Glycine max
  unsure (1)..(260): unsure at all n locations; Clone ID: 701141217H1
ctcgngacngactcngtgagtnagnnagcgnncgagttactcanggcgnaacgcggcgcttgcggaacgtgaaggtgnncacgaactgcgggcnaatatggaggaagcgcgtcancgagtctttcgaattcttgcagaacggctggcagatcgctanccttccgttatggantnctacaacctctaacgacgtcgtttncgtctccgaactccgctccnccgtcgcctcccagatccgcaacaacatccantcaccgatc

SEQ ID NO: 52204 - DNA, 78 bp, Glycine max
  unsure (1)..(78): unsure at all n locations; Clone ID: 701141221H1
aattgatctaaaggcaaggcgcattgtcctccgacaatattcacttccnnggaatgggcttccctgaccctttccgtt

SEQ ID NO: 52205 - DNA, 76 bp, Glycine max
  unsure (1)..(76): unsure at all n locations; Clone ID: 701141222H1
gntgttttacgaatccggtatatactaacttcgatgattncaaacgccgttttcgtcgaccccgttcggcgtnnct

SEQ ID NO: 52206 - DNA, 256 bp, Glycine max
  unsure (1)..(256): unsure at all n locations; Clone ID: 701141223H1
tgggctcaacgattatccaaacacagcttaacatgaacttctttctntcgctagctcgctcaggttctctctcgctgaaanataacaaagttgcaaattgctctctctctgtttccagtgaaagaaaaggatgtcaagtggagcaacatactggtgttacacatgcaggcagccaatctgccttgcaaggagggatcacatttgcccctactgtgacgaaggcttcttgcaagnncttgatgaattgcaaggaggt

SEQ ID NO: 52207 - DNA, 256 bp, Glycine max
  Clone ID: 701141224H1
cgctgttagaaaactgaatgatgcaaagaaacttgaatccagtgctcactacagtgctgattttggcaaagactaaaggctattataaaattctgagccatggatatctagggtgttcatcttttgagccagaaatacttcatgcaattaggctaactcagacggtctcttttagctatgccttgtattgtctgacttatgcagttccattgggaagatgagcagttgaattatttgcctaaactaattgattatt

SEQ ID NO: 52208 - DNA, 257 bp, Glycine max
  Clone ID: 701141225H1
cgagtcttcagtttctcctcgttgttcttcgctttcctgttttcaatttcgattctttcgttaatttaataagatgtttgggagggcaccgaagaagagcgataatacgaggtactacgaaatcctcggcgtctccaagaacgcttcgcaggatgatctgaagaaggcttacaagaaagccgccattaagaatcaccccgacaagggcggtgatcccgagaagtttaaagagctggcgcaagttatgaggttctgag

SEQ ID NO: 52209 - DNA, 258 bp, Glycine max
  unsure (1)..(258): unsure at all n locations; Clone ID: 701141226H1
caacaccatagtgaaanngcttccaaggctgcacttctctngtgtttcaatgttctcttcttcaccgtggttagctccacatatgtgccatgcnacccaccccccaaaactccaaaacacccacctgtcccaaagccaccttccccaaagcaagcaagttgccccaaagacactattaagtttggtgtgtgtgctgatgtgttaggtttgatcaacgtgcaacttgggaagccaccaaagaccccatgctgcaacctc

SEQ ID NO: 52210 - DNA, 257 bp, Glycine max
  unsure (1)..(257): unsure at all n locations; Clone ID: 701141227H1
ggaaaggaaagtgagatactctctctatcaccaaaccaaaagcacaaaaaaaaagtttgtgaagttttgattttgcagtaaaagggtgtggtgctgttgtggaganccnngatttgtttcgtctcttatgccccatgaggagtttcttccctgctgaatcctgtaaagaggctcacccaaatgctttnaatcctcagtcttggcttcatattgaaagagggaaacttcccaagttgtcatcacacccctcatctgcc

SEQ ID NO: 52211 - DNA, 260 bp, Glycine max
  unsure (1)..(260): unsure at all n locations; Clone ID: 701141229H1
cttttattcattttccgatggcttctgcagatgttgagtaccgttgctttgtcggtgggctcgcttgggccactgacgaccatgccctcgagaganccttctctcagtacggcgaaatcgttgaaacgaaggtctgtttgttgcaggcatcacatctgatctcacacgattcggattcggaattnnctcgatcccgttctgatctgtgatctctgatctgtttgcgttacttgatcttatgatacttgtgttactatatg

SEQ ID NO: 52212 - DNA, 265 bp, Glycine max
  unsure (1)..(265): unsure at all n locations; Clone ID: 701141231H1
tntccatgcttcatagccccncttgtgaattcccctggtgctacccttggttatgatgacagcaaggagctcttctccatgggaaggnttgattctcagtggcttaatcgatccgcaaacaaaggaaacnntccccaatgggnataatactcaaatcttagattttgatgaggctgatctatttgaaatagtcttggatggttcagaaaagtctcaaaacacagtgtcatagctcatagcaaaggaggcatnnttcaatgtggtt

SEQ ID NO: 52213 - DNA, 269 bp, Glycine max
  unsure (1)..(269): unsure at all n locations; Clone ID: 701141232H1
aaacttccttgctatctaagttgaaagatcttgctgagagaagaaagctagaagacttgacaatcggcccagtcctcacatgtacgactacgaatgatgctagaacacaagaataaattgcttgagataccagncatcaaagctgctctttgggggtagtcctctagagaaccattcaattccacctatttatggtgccattaaaccaacagctgtctatgttcctctcgaggaaattatgaaggataagaattttgatcttgtaacaa

SEQ ID NO: 52214 - DNA, 258 bp, Glycine max
  unsure (1)..(258): unsure at all n locations; Clone ID: 701141233H1
aaaaacctcgccgtcgacacgatggcggagttncaggatgagaaacttgttgtcccgtgtcaaaaagaaaaccatcaaaaacagaaacagaagttgcatttccattacaaaagagttacgacatctnnnnnnnnnnnnnnnnnnnnnnnnnnnnnnnnnnnnnnnnngtttcaacatcaaaagctctgccccatcacacactcacggtgttcaacccttggggaatctctatctgaacacaagttccacnaantnnag

SEQ ID NO: 52215 - DNA, 257 bp, Glycine max
  unsure (1)..(257): unsure at all n locations; Clone ID: 701141234H1
cctgccttcactttgacaactgctataaatgaatggngctccncgttatactcaataatctacagttcattgccaactataattgttggtattctcgacaaggatcttggtaaaaggactctccttaagtatcctcaactttatggggcaggacagagacatgaggcctacaacaagaaattatttttgttaacaatgttagatactttgtggcaaagcatggttatcttctgggcacccctctttgcatattggag

SEQ ID NO: 52216 - DNA, 252 bp, Glycine max
  unsure (1)..(252): unsure at all n locations; Clone ID: 701141235H1
tctgctgttgtttacaaggnctggnttttcactgatcaagcactgcccaatgatcttgtcaagagaggagttgccgttaaggatccatcngctccccatggagttcggcttttgattgaggactatccttatgcttctgatgggctagagatatgggatgccatcaagtcctgggtgcaagaatatgtgtcattctactacaagtcagatgcagcaattcaacaagaccccgaactccaagcttggtggaaa

SEQ ID NO: 52217 - DNA, 253 bp, Glycine max
  unsure (1)..(253): unsure at all n locations; Clone ID: 701141238H1
acatgccggnaatgttgaaaacattgtcagagaagcagtcaaaaagaagtttcatcaaacatntgtnacggttcctgctaccattcgtctcttcttccatgattgcttcgtgcagggttgtgatgcctcggttttggttgcatccacaaaaaacaanaaaaccagagaaggatcacccagataatgtttcactagcnggagatggatttgacacagtgattaaagcaaaagaagcagttgatgcagttccatt

SEQ ID NO: 52218 - DNA, 254 bp, Glycine max
  unsure (1)..(254): unsure at all n locations; Clone ID: 701141239H1
gaagctactagaacactagtttgttgagcactgcgatgaggaagtggacggttgcttccgctctnncctcttctctcctctcctactttctctttgcagatcaaggtcgaaagtttcangcgaatgccgagggagattccgacgagcttgtagatcctccgaaggtggaggacaagatcggtgctgtgcctcatggcctttccaccgattcagananggacaagagggagtcggagtcgatctcgaagagatct

SEQ ID NO: 52219 - DNA, 252 bp, Glycine max
  unsure (1)..(252): unsure at all n locations; Clone ID: 701141240H1
cgcaatggcgaggntcaaggtttacgagctgaggcagaagacgaaggctgatctgctgaatcaactgaaggacctnaaggcggagttgccttgcttcgtgttgctaaggtcaccggtggtgcccctaacaagctttccaagataaaggtggtgaggttgaacattgcccaggttttgacggtgatttctcagaagcagaaggctgcgttgagggatgcctacaagaataagaagtacttgcctctcgatctc

SEQ ID NO: 52220 - DNA, 253 bp, Glycine max
  unsure (1)..(253): unsure at all n locations; Clone ID: 701141241H1
gctcagcctcttcttccagaatgtggtgctccatccccgaacgggttcagctgcatgcggccatgttggccctgcagtttggctatcctggctttcatgtggtctcaagagctgcccttaacatgggcattagcaaacttgttttcccagtctaccgcaacattattgcttttctcctcctcctnccttttgcctacttcttggaaaagaaggagagacctgccattactttaaacttcctcttacagttctt

SEQ ID NO: 52221 - DNA, 259 bp, Glycine max
  unsure (1)..(259): unsure at all n locations; Clone ID: 701141247H1
cgcgacacnaagatcggagacagaatggcgaaaacnacgtcgttgctgctctttacactgctcctcttcggaaccctanctctcatccaggcgaagaantcgaaggaggatttgaaggaggtgacccacaaggtttactttgatgttgagattaatggaaaagaagcaggtcgtattgtaatgggtcttatgggaaggctgttccaaaaactgcagaaaacttccgagcactttgcacaggggaaaaggganngntaaa

SEQ ID NO: 52222 - DNA, 265 bp, Glycine max
  unsure (1)..(265): unsure at all n locations; Clone ID: 701141248H1
ctttctttcttctcttttaccctcactcaccccccatattctattancctcaaaatatctttctattttcctctcaaccccaacaaaattccaaatttcccccctctccttttcacgtcacttagcacaacccgggatgctccactttctcaaggattatttgctaactgaatcctaagtgtaattgagatggacggtgatatatttggagaattaggcaattcaactcaagtagatagcaggcttttacaggtatttcagaaga

SEQ ID NO: 52223 - DNA, 256 bp, Glycine max
  unsure (1)..(256): unsure at all n locations; Clone ID: 701141249H1
ccctcaggtaagccaaaaccatggttaagcataacaatgttatcccaaacggacacttccgtaagcactggcagaactatgtgaagacttggttcaatcagccagcacggaagacaaggngacgattggctcgtcagaagaaagctgtgaagatattccccagacctacggctggacctctcaggcccattgtacatggtcaaactttgaaatacaacatgaaagtnagaggtgnaaggggattttctcttgaaga

SEQ ID NO: 52224 - DNA, 246 bp, Glycine max
  unsure (1)..(246): unsure at all n locations; Clone ID: 701141250H1
cacgctgcgtctcttcctcttctctttcgatccatcccncattcctnatcctcacntccaaccacctcancctcacactcacatatacanatatctgaacgcgnatcgtccctcctatggcttcaaagcgcatcctcaaggagctcaaggacttgcagaaagacccaccaacttcttgcagcgctggtccagtagctgaggacatgttccattggcaagcaacaataatgggtcctgctgatagtc

SEQ ID NO: 52225 - DNA, 250 bp, Glycine max
  unsure (1)..(250): unsure at all n locations; Clone ID: 701141254H1
cttgtcncnaagantaagccntgcatgtgtaagnatgaactaantcagacngtgaaactgcgaatggcncattaaatcagtnatagtttgnntgatggtatctactcagntaaccgnagtaattctagaggnaatacgtgcaacaaaccccgacttctggaagggatgcatttattagataaaaggtgcaacacaggctctgcctnntgcttngatgantcatgataactcgtcggatcgcacggccttt

SEQ ID NO: 52226 - DNA, 249 bp, Glycine max
  unsure (1)..(249): unsure at all n locations; Clone ID: 701141256H1
gtagaacccttccactgtggtgactctgcgatgggtgcctacaagtatgtttcagagctatggcgcaagaagcagtctgatgtcatgcgcttcttgcagcgggtgaggtgctgggagtataggcagcaaccttccattgttcgtttgacaaggtctacccgccctgacaaggctcgtcgcttgggcttcaaggctaagcagggctatgtgatttaccgngttcgtgttaggaggggtggccgaaagaga

SEQ ID NO: 52227 - DNA, 223 bp, Glycine max
  unsure (1)..(223): unsure at all n locations; Clone ID: 701141257H1
aaccctctctaggagacccagagtctgcagcaccctaggggcagtggacatacacggagcgaacgtcacagtcgttttctaacaatcgtncacggcggtttcagctctcgctcttcatctcagacaactgggcagaagaaccagagttttattgaaatgatgaagtctgcaagggatagtaatgcccaggatgaagtgctagaaagcgaggaaacattttttc

SEQ ID NO: 52228 - DNA, 254 bp, Glycine max
  unsure (1)..(254): unsure at all n locations; Clone ID: 701141258H1
gagtccgncaagacgcaantntacctntncaganaaaagggaggtgnagcncaagtggttcagataatgtcgaagcnccaagaanaaatcatcgcaaggcctgnnttcgtatgaatacctcataaatntgaagaatataattttgtgaacgaaattnacncntgcacaagaggggaataaagctgatctaggtgggagcaggaatgacaaagttacaacacagaaaaccccttccttcaaagagggatggangg

SEQ ID NO: 52229 - DNA, 252 bp, Glycine max
  unsure (1)..(252): unsure at all n locations; Clone ID: 701141259H1
gcggcganagtcactctccgacaacaanacttccncggcgaaaaatgtctctggtggcgancgaggatttccagcacattctgcgtgtgctgaacaccaacgtggatgggaagcagaagataatgttcgctatgacctccatcaagggtattggaaggagattcgccanccatcgcttgcaagaaggccgatgttgacatgaacaaaagggctggtgagttgagtgctgcagagttggatagtgtgatgact

SEQ ID NO: 52230 - DNA, 50 bp, Glycine max
  unsure (1)..(50): unsure at all n locations; Clone ID: 701141260H1
ggcactttcttgttttctctctcacactcatatccatcanctanccacac

SEQ ID NO: 52231 - DNA, 254 bp, Glycine max
  unsure (1)..(254): unsure at all n locations; Clone ID: 701141261H1
cgctgtttgcttcgagtttgctctctcgctcccgctctaaaccctagagcacgctctttctagggtttagatttcgattccncgttgatttcggaattcgtgttttacacgttgatcggagaattttttttttctatcgaattttcggggtcatggctcttccacgtctcgctgttatactccaagccgctctcagtcccaatccggatgaacggaaaacagctgagcagagcttgaatcagtttcagtatgcg

SEQ ID NO: 52232 - DNA, 259 bp, Glycine max
  Clone ID: 701141263H1
cctcagtctcacgaggtggagtgcggattggaaaagtgctactgttctttatgagcaggcagctaatgggtttagagttgccaaggactatgagaatgctaaaatagcatatgagaaagcttcgaaaggacaagaaatgctttcttcaccttgggatgcggctaagcacatggaatccgctgctgctctcgcaaaggatctaagacactggcaagaagttgtggacttctatcgaaaggcatctgaattatatatggag

SEQ ID NO: 52233 - DNA, 263 bp, Glycine max
  Clone ID: 701141264H1
caaacccgtccctcacactctccaaaccctagcggcactacacactagttctatcgctatctccccaagatgtcgagcgccgatcccgagcacagagaagaggaggaggcacccgccgttggcgacgacgaggacaccggagctcacgtcgctccaatcgtcaagctcgaggaggttgctgtcaccaccggcgaggaggacgaagatgcaatcctggatctcaaatcgaagctttaccggttcgacaaggacgggaaccagtg

SEQ ID NO: 52234 - DNA, 250 bp, Glycine max
  Clone ID: 701141266H1
cagtgcacaacatcgattatccaaatgggcgaacaaaggccttggttccggaatcggtggtgaagaaggagaaaaggaacgccgagtgggctttggcgaagaagcaggaactcgatgccgctaagaaaatgaggttcgaaacgcggaagctgatttttaacagagccaaacaatactcaaaggaatacgacgagcagcaaaaggaactgattaggttgaagcgtgaagccaagcttaagggagggtttta

SEQ ID NO: 52235 - DNA, 247 bp, Glycine max
  Clone ID: 701141267H1
ctcgggtgctgggtcaaaggagtatgtgcatattcgcgttcagcagcgaaatggtaggaaaagcctgacaaccgttcagggattgaaaaaagaattcagctataacaagatacttaaagacgttaagaaagagttctgttgcaatggaacagttgttcaggacccagaactaggacaggttattcaacttcaaggtgatcagaggaagaatgtttctactttcctagtacaggctggtatcgtgaag

SEQ ID NO: 52236 - DNA, 118 bp, Glycine max
  unsure (1)..(118): unsure at all n locations; Clone ID: 701141280H1
atacaggcaagngctgcttcaatgagcctttgtataaggatatgttccttgctgcttcttcccngctaagtattgttcggcaattagatggcatagaggctgaatccacacaacntag

SEQ ID NO: 52237 - DNA, 266 bp, Glycine max
  unsure (1)..(266): unsure at all n locations; Clone ID: 701141281H1
ccgagntcngctngagctagccatnnatngcggnngctgtngtagtgtctanctctctgtctntgtgtttcaactatggctatcatcgtcgtccatccanttccgntctctcttgtcattcgaattccatcaccaaaacaaacctaaaactcagttcgcaatgtttctccaactcgaattacggtagccccgatttattgccgcaagtttgttgctcgcacttcaattggagaaaacgagagcgagagcgagaaggagttagggtt

SEQ ID NO: 52238 - DNA, 245 bp, Glycine max
  unsure (1)..(245): unsure at all n locations; Clone ID: 701141282H1
cnaacttccctttctaacccaaggcccttcaatggatctggagggaatggctaaaatctccatcttgttggtggggctatggctactagttaactggtcagggttgttggatgcaaaatacatntngtacaagaaccctaaactgtcaattgatactcgggttgaggatctgttaagaggatgactcttgaggaganaattggccaaatgttgcaggttgagcgcaagtatgtgcctgctgattt

SEQ ID NO: 52239 - DNA, 241 bp, Glycine max
  unsure (1)..(241): unsure at all n locations; Clone ID: 701141284H1
ctgaaagatgggtttgaagatggcgttactgatcctaggcctttccctcatgctccttttggtctcctctgaggtggcatccacgaatacaaaagaggaggcaaatggagtggatgatgccaaatatcccggtggaagctatggagggggttacccaggtcatggcggtggcggttatcctggccatggcggtggcggttatcctggccctggcggtggtggtngcnatcctggtcatggt

SEQ ID NO: 52240 - DNA, 243 bp, Glycine max
  unsure (1)..(243): unsure at all n locations; Clone ID: 701141286H1
gtccctccttcctctgccttataattcttgtgacccttttngcnggnagcattgnaantgcaccagcanacgtgaagccaagccattatgctgcacccttcaataggagtgtttttccttctggttttctatttggaataggctctgcagcttaccagatagaaggancagcagctntagatggcagaggaccaagtatatgggacacctatactaaacagcaaccagggaagatttgggatc

SEQ ID NO: 52241 - DNA, 247 bp, Glycine max
  unsure (1)..(247): unsure at all n locations; Clone ID: 701141287H1
gcgatctctctctattctttgaaaccaaagttcaaactctgtcttccctgggttctatttcgaaatcaacgacgatgagttccacagaggcagcagccacagagaagaaaggtggaagagggaaaccgaagacttcaaagtccgtttcccgttcctccaaagctggccttcagtttcccgtcggccgtgtcgctcgctacctncaaggccggtcgctacgcccagcgcgttggctccggttcccctg

SEQ ID NO: 52242 - DNA, 245 bp, Glycine max
  Clone ID: 701141288H1
caacatctctggtggccatgtcaaccctgctgtgacttttggattggctcttggtggccacatcaccatcctcactggcttcttctactggattgcacagcttcttggctccatcgtggcatgttttcttctcaactatgtcacaggaggcttgccaactccaatccacagtgtggcttctggggttggagctgttgaaggagttgtgaccgagatcatcatcacatttggtttggtgtacacag

SEQ ID NO: 52243 - DNA, 245 bp, Glycine max
  unsure (1)..(245): unsure at all n locations; Clone ID: 701141289H1
ttcttgcngtggaacanataaccaaaggccnganccttcngggagcaccatggaccctgacntcatcgagattcctcccccaattcaccaccctccgagatttccgcgagcagaacaaggtcnttttgcatgatgtgattgacattgatgatgactctgaggatgtagtgattattggcgaaaaagttaacaatagtaacaaagggaagactattgacgccattcatgatgatcatcaagttgtg

SEQ ID NO: 52244 - DNA, 110 bp, Glycine max
  unsure (1)..(110): unsure at all n locations; Clone ID: 701141290H1
accagccagatgcgttctttgagtggttgtntgacttgccatgccttttaagcattctttcatgtttgagtgatgtttggattgtccaatacttatttgttatattgaac

SEQ ID NO: 52245 - DNA, 249 bp, Glycine max
  unsure (1)..(249): unsure at all n locations; Clone ID: 701141292H1
gaccatgtctcccaaaagcataagttggtaggggatttgatcatatgattgcttttaatatctatcacctcattnntgcaagaatcctttgagcttgaagcatgacaatttcttcacccactatcttgtgctgaaattcaatttttatttgaaagaatggggccaacaaggattgaactcttgaccacttggtaatagaagttttgataccatctcatggaccaaatcaccagtttaagttgttgaata

SEQ ID NO: 52246 - DNA, 250 bp, Glycine max
  unsure (1)..(250): unsure at all n locations; Clone ID: 701141293H1
cgagtcccngcagaaaccatgtattattttcctgctgagaatagagccaaattctggtataaagcagattatggcctgtttcgtttctgcatagcagatagtgaacntgactggagagaaggatcagaacaatacaaattcattgagcattgtcttgcaacagtngatagaaagcatcaaccatggctaatcttttcagctcatcgtccccttggctactcctctaatctttggtatggcatggagggtt

SEQ ID NO: 52247 - DNA, 251 bp, Glycine max
  unsure (1)..(251): unsure at all n locations; Clone ID: 701141294H1
cgcttttcaccaganaaagcttccatttttgctcagatcttcctcttgctcctcctgttcctgggaggatacttgccaattgataaacagtgaagaatagctcctccatatagttttatgaacatacagttacagaagttccaacataaatgggaatcatcactcgcagttctgctggtagaaaaccaagtgaaattatgaggttttttgtgacaacttttattagtatagttttaggattctttatagga

SEQ ID NO: 52248 - DNA, 295 bp, Glycine max
  unsure (1)..(295): unsure at all n locations; Clone ID: 701141301H1
gcatccctcttgatttgtagtttgttttgtgctttagataaaagttctgccaaatcaagaggggttttaagatcatagtgtgtgttttgcaacaatggctaagttctttgctgctatgatcttggcactcttngccatttccatacttcaaacagtggtaatggctgctaatgaacaaggaggccacttgtatgacaacaagagcaaatatggaagtggaagtgtcaagagttaccaatgcccatcacaatgctcgnggagatgtagccagacccaataccacaagccctgcatg

SEQ ID NO: 52249 - DNA, 291 bp, Glycine max
  unsure (1)..(291): unsure at all n locations; Clone ID: 701141302H1
ctttcacttcacttgtggttcctcactctctctctctnccacaccacactgaggancggagacagtggaaggaaggaacactcaaatcactgaaccagccatggctaccttctccaaggaacgcgagaactttgtatacgttgccaagttagctgaacaagctgaacgctatgatgaaatggtggaggccatgaagaaggtggcgaactggacgttgagttgagtgtngaagagaggaacctgttctctgttgggtacaagaatgtggtggggtcagganagntcatggat

SEQ ID NO: 52250 - DNA, 249 bp, Glycine max
  Clone ID: 701141303H1
aagagaaattttttagaacaatggaggcatcaaagatgaagtttttcttggttttggtgattgccatgttggcgatggtagcaactggggtttcagctgctgaggcacctgccccaggtccttcatccgatgccaccaccttctttgtacccactgctcttgcttctctctttgttcttgcatttggccttctcttctaattaattcttcaacaacctttggttatttgttacattacatatatggaat

SEQ ID NO: 52251 - DNA, 285 bp, Glycine max
  unsure (1)..(285): unsure at all n locations; Clone ID: 701141304H1
caagaatggtgttctctacagaggtgtgtcacctgatgttttgatgttggaacaaactggacatatacagctggtggacttcagatttggaaaacagctttctngtgagagaacattcacaatttgtgggatggcagattcactggctccagagattgttttgggaaaaggccatggtttccctgctgactggtgggcgttgggagttttaatatattatatgttacgtggtgagatgccatttggatcatggagagaaaatgaacttgatacagttgccaaaat

SEQ ID NO: 52252 - DNA, 239 bp, Glycine max
  unsure (1)..(239): unsure at all n locations; Clone ID: 701141305H1
caattcatgttctcttattcttgattgattctcttctattcgattcgctccttctatggaaccgcagcttcaccccaagctggaccccgcgccggaggttgttagcggtggcggtggggattcggagaagtcgcatgtcagtgatgtcaccgaggttcgcgacgttgacatggcgcaggcaaacggcgcttgttgcccttccgttttgaaacggaagcncggtcgcccggccaagggaa

SEQ ID NO: 52253 - DNA, 281 bp, Glycine max
  unsure (1)..(281): unsure at all n locations; Clone ID: 701141306H1
cttcgatagtgaagcancgattcaatagttgacaagtggttttggnttgatatatagatgtggtgcgcgtcgtgttgttcgaaggaagtgaagtaaagactaaagagagttgtggtgtggtggtggttgtcgtttttgaaatggcagcgtcgtcgtcagagaagcaagtggtggtgataggcatagacgacagcgagcagagcacgtacgcgttgaattgggctctggataactttttcccgagcccattttcaagcccgttctcatccactccaggccca

SEQ ID NO: 52254 - DNA, 281 bp, Glycine max
  Clone ID: 701141307H1
agattgtattagaaatgattgaacttcgagaactggatactgcacgtgctattttaaggcaaacgcaggtgatgggtgtaatgaaacaagagcagcctgaaagatatttgcgtcttgatcatctcctagttagaacttattttgcatccaaatgaggcttatcaagactcaacaaaagagaagcgacgtgcacaaatagcccaagctattgcagcagaagttactgtagtgccaccatcccgattgatggcttaattggtcaggcttgaagtggcagcagc

SEQ ID NO: 52255 - DNA, 281 bp, Glycine max
  Clone ID: 701141308H1
caaatttgctgttgctcttgcattatcggctctcaaagctattcaacacggaacattgaagcttacacttggaggtgtggtattaggagacacctggatctccccagaagattttgtgttttcatggggtcctctgcttaaagacctatctagaattgacgacaatggactgcaaaaagcaaacagtatagctgagaggatcaagcagcaacttgaggcaggtcaatttgttgatgcaacttactcatgggctgatcttgagaatgagattgtcgctagca

SEQ ID NO: 52256 - DNA, 279 bp, Glycine max
  unsure (1)..(279): unsure at all n locations; Clone ID: 701141311H1
cttcgtctctgatccatggcttacgttgagcgaggtgttgtcaaatcaaagcgatcaatatggcgccttaaaacaatcactgattttttctgggccattgttaacttcataggcgtgtttttcgcaactatgttctcgatggaaaagtcagatgcgtacagaaaacgttctgtgggtaanaaatgggatggcggtgctcctggaggaggtcctggcggcggtggtggcggtggtagcggtccacgaggccctcctcgtgggggtctcgacaatgttcct

SEQ ID NO: 52257 - DNA, 278 bp, Glycine max
  unsure (1)..(278): unsure at all n locations; Clone ID: 701141312H1
gaagctgnagatggatctgatatttataagctatatggtgttgtagtacatattgatatgctaaatgcttcattttttggtcattacatctgttacatcaaggatttccagggaaactggtatangattgatgactggaaggttatgactgtggaggtggaagaggtactttctcagggagcatacatgctcttgtatagcaggtgtagtgcccggacatcaagctttcaaattcaaactagcgaatcttcagggatagcagaagttcagacagaagt

SEQ ID NO: 52258 - DNA, 272 bp, Glycine max
  unsure (1)..(272): unsure at all n locations; Clone ID: 701141313H1
ctatggtgatgtgagccgcccaaagccaatgaccgtcttctggtcatctctggctcagagctttaccaagcgcccaatgaagggaatgcttaccggtcctgttaccattctcaactggtcctttgttagaaatgaccaacctagatctgagaccacntaccagattgctttgtctatcaaggacgaagtggaagaccttgaaaaggctggcatcactgttatccaaattgatgaagcgctttgagagagggtcntccactgaggaaatcaga

SEQ ID NO: 52259 - DNA, 285 bp, Glycine max
  unsure (1)..(285): unsure at all n locations; Clone ID: 701141314H1
aacatagaagaagttaacaggggtaatgttggaatttttaaaaaaatgttgggggtagaannccatattaactatgcaggaaaaaaatcccatgcaaatttgcaatcaattggtccanatgcttnnttgattcctgttttaaacccaagaccttgggtgttactttgggcacccaacaccccaggtgaaaaggctaaaatgtccttcacccatttnatatatgantgaacagtgacttgtccgtacgagtcacttgttcatcctctcgcgccgctacttcgtctt

SEQ ID NO: 52260 - DNA, 288 bp, Glycine max
  unsure (1)..(288): unsure at all n locations; Clone ID: 701141316H1
gctgttgcaaaggctgcccaagaacatggtatgggaccaaggggttctgctcttatttgtggatataccaattatcataggttacttgagtcaagcctggcagatttgaaaaagaaagaggtaacagctggcttgcaagaactacttaaacccttcgagtttgtttattcgntctactttatatcctaactgaagaataattagccgatggctatgatcaaatctgagaatctaaaatcttatgccattgtttaatgtaattgaatactatgaaatggttctccgtcc

SEQ ID NO: 52261 - DNA, 285 bp, Glycine max
  Clone ID: 701141319H1
ttgtctttctctatctctatcggtcatgggtgcttttgcttttgatgaggaaaactcctccaccgtggctccggcaacactctacaaagctctgacaaaagatgctgacactatcatcccaaagattattggggccatccaaactattgaaatcgttgaaggaaatggaggacccggaaccgtcaagaagataacagctagtgaaggtgaccaaaccagtttcgtgctgcaaaaagtggatgcaattgacgaggctaacttggtatacgactacagcatagtggg

SEQ ID NO: 52262 - DNA, 283 bp, Glycine max
  Clone ID: 701141320H1
atttggtcgtctttgatatctaccaacccctctacgacttggccaccaagccttctgaaaacggattttttgaagcaaggaaggcttgttgtggaacggggttgatcgaggtatctattttgtgcaataagaagtccataggaacatgtgctaatgcatctgaatatgtattctgggatggttttcatccctcagaggctgcaaacaaggttttggcggatgaattgattacttctggcatctctcttatatcctaatcaaacacttcacgagtcatactttg

SEQ ID NO: 52263 - DNA, 281 bp, Glycine max
  unsure (1)..(281): unsure at all n locations; Clone ID: 701141321H1
cctgcagcaaacctcaatagtgatcaagtggcaccaagtgtgtcttatgcttgtcaaaatgcagattgcacaagtcttggatatcaaacttcatgtggtggtttagatgctcgtggtaatctttcttatgcattcaatagttacttccaagtgaatgaccagattgacagtgcatgcaaattccccggtctttctgttgtcactgacaaagatccttcaactggagattgcaagntcaaaatcatgattcagacagattctgctggtctacatgggaatgg

SEQ ID NO: 52264 - DNA, 279 bp, Glycine max
  unsure (1)..(279): unsure at all n locations; Clone ID: 701141322H1
gcgagtctgggccacagcaaccagcgacnacaactcaatcagctagggttgctttgcttgctatcttgttggaggattttctgttcaagagaagatggtaactagaattgtggatcttcgttcagacacagttacaaagccaactgaagcaatgagagctgctatggcaagtgctgaagttgatgacgatgttctaggctatgatccaactgcttttcgcttagaaacnagagagggcaaagacatgggcaaagaagctgcccttttngttccacctgg

SEQ ID NO: 52265 - DNA, 272 bp, Glycine max
  unsure (1)..(272): unsure at all n locations; Clone ID: 701141324H1
aagtaggaggaagaaaaggggaaaacgcaaagaaaaaaagaggaagatagatcaagatctcccttgcgtttgtctcagttgaagaaattcaagagcagaacgagactaactcaacggtatcagacgtttcagggtttcagcacttccattttttttttcnaggatttgagttggaagaagntcaaagaggttcctanttncttggatngttccncgggtggtggagactnggggtatttnaaattgganttnnaatnccngggggggggggg

SEQ ID NO: 52266 - DNA, 279 bp, Glycine max
  Clone ID: 701141325H1
cgaactcaaatcaagcaatcaatttcaaatccaaaaatggggagctccacaaccttctgtgccttcttcctcgtgtgtacgatcttgtccgtccacgtggcgcaatcctcatcctccaccctcgacctggacacctttttcctccctctcaaatccggctgccgcggatccgtcgccgagtgcagcctcctcgccggcgacgacgacaccgagtttctgatggagtcggagagcaaccggcgcattctagcaggaaggagctacataagctacggtgcg

SEQ ID NO: 52267 - DNA, 283 bp, Glycine max
  unsure (1)..(283): unsure at all n locations; Clone ID: 701141326H1
gnttgattangatcanncnagctaatgtggcctcctactggcgttggngaatnattacccantcggtgttcaatgtgantgatggtgtcaatgggaacaatttatggagganaaggctgttnagcaagattgcgtctttccagcngtntatccctcnagattntgatgccagtnatcatgngacatcgagcttcccngtggcttctgtgcnnacgtatagggatnttggacattaggattcttaacacggataggcatgctgggaacttgttggtnangaaat

SEQ ID NO: 52268 - DNA, 276 bp, Glycine max
  unsure (1)..(276): unsure at all n locations; Clone ID: 701141327H1
caccaaacccgtttgcnttgttgtttgcgaataaatggcaactaagaggagcngggaacgttgaaggagggtgatttgaaggggaagagggtattcgtgagggtcgatctgaacgtgcctttggatgacaaccttaacatcaccgatgacactagagtccgtgctgctgttcccaccatcaagtacttgtctggttatggtgctaaagtgatcctttctagccatttgggacgtccaaaaggtgtaacacctaaatacagtttgaagcctcttgtg

SEQ ID NO: 52269 - DNA, 278 bp, Glycine max
  unsure (1)..(278): unsure at all n locations; Clone ID: 701141328H1
ctcgccaaacgcccctctctctcctccaatggccgaccagctcaccgacgaccagatcgccgagttcaaggaggccttcagcctcttcgacaaggacggcgatggttgtattactactaaggaacttgggactgtgatgcggtcactagggcaaaacccaactgaggcaganctgcaggatatgattaatgaggttgatgctgatggcaatggaaccatcgacttcccagagttcctcaacctgatggctcgcaagatgaaagacaccgactccgagg

SEQ ID NO: 52270 - DNA, 258 bp, Glycine max
  unsure (1)..(258): unsure at all n locations; Clone ID: 701141329H1
ggctcccatgaactatcctcatgcactatggcggntatggacnatgttttggctcccacttatccagcaggcttactaccgatagaaatgacaacctttgaanatggtaaccactgatatgacgaccttgatccaatttacttttgccaatgttgtttgtaatcactaaccgtttaacggtagcagttcgtgtgttattaataactntgnccnattcntgcncgggcatggggagaagttgtatttcnatntngaccc

SEQ ID NO: 52271 - DNA, 123 bp, Glycine max
  unsure (1)..(123): unsure at all n locations; Clone ID: 701141330H1
ggattttncaacatgttactgtgggagagtaaatgananangaaaaagaagggaaacactgaaacantggtagangantttaatgtgatttgntctttgtaacctgtgagtgtggaaganaac

SEQ ID NO: 52272 - DNA, 278 bp, Glycine max
  unsure (1)..(278): unsure at all n locations; Clone ID: 701141332H1
ttttcagccctattcctgaggacggaagaaggaaagcctatgctgaaatgcacnaaaaagcaaaggctnaggaagaagcaagagtggcagctgaaaaggccaatgaagcttctgnatcagcaaagaagttggncgaagaggtgaagaagcttttgcagcaagaagcacgggctgcaagtctggctcaggaggcccnngagaaggcagangcagctggggcttcggtggaaaacctcttgaacancgcaaaagactttggtgcagggtttcctgggaaa

SEQ ID NO: 52273 - DNA, 281 bp, Glycine max
  unsure (1)..(281): unsure at all n locations; Clone ID: 701141333H1
ggaatccgttgcaaaattatgtttgaggcaaanctaattttgctaacggatcatgacccttgcttttgcgttcattttgtttttaactgttggatttatcttgaaacgtgcancgcagcgttttcaactgcaaatcaaacattcattgtaatgtagttgaggtttgttctaagttgaaagtaattagttttgtctttgattagttcttggttggttttcagatactgggtttgngttcactgtggggatggctcctttggtcaactggggcaggggataat

SEQ ID NO: 52274 - DNA, 286 bp, Glycine max
  unsure (1)..(286): unsure at all n locations; Clone ID: 701141334H1
cgcanttttaagctcagggaaacgttttatttcacactctgcgattcgcgatggccgacgatgactatgaggatatcgacatggggtacgaggatgagccaccagagcccgagattgaggaaggtgcagaggaagatttggagaacaaaaacgatgagttaactggagagcctattgacactgaggataaggaagaggaacaaccagtggagcggcctcgaaagacatcaaaatatatgactaagtatgagcgtgctaggattttaggtacccgtgctcttcaaat

SEQ ID NO: 52275 - DNA, 280 bp, Glycine max
  Clone ID: 701141335H1
ggtggggttgcaacttcagacttttatagggccatagagacgatgcctattgtcactgaagatatggattctgcattccaaactgcaggagcaaacccgtatccttacaaccattttctttcaaattgctttatagtttgtgttagtttgttgaataggtagtagttattttttagttcagacatttcatgctaaagaaaataaaattcgttttaatttctaatgacaaaggcaccaaaatgaatagctggttaactagcatagcccatgtctcatggtt

SEQ ID NO: 52276 - DNA, 277 bp, Glycine max
  unsure (1)..(277): unsure at all n locations; Clone ID: 701141338H1
atggctcattaaatcagttatagtttgtttgatggtatctactactncggataaccgtagtaattctagagctaatacgtgcaacaaaccccgacttctggaagggatgcatttattagataaaagnncaacacaggctctgcctgttgctttgatgatncatgataactcgtcggatcncanggcctttgtgccggcgangcatcattcaaattgctgccctatnaactttcganggtaggatngtggcctaccanggtggtgacggtgacggana

SEQ ID NO: 52277 - DNA, 273 bp, Glycine max
  unsure (1)..(273): unsure at all n locations; Clone ID: 701141340H1
gtttgtnataaatnagattagnagcggcagattgatgtatagacctganaaggtatggcattacctgattgttttccttactgnaacaagaatgtatcctcncntgtgctggtgaaaatgangtacatacatttcaggacaatttagtaatagatgatggatatttggctctggtatgttcttatccctcctataccattttcacaatgggngggtcntatcctnnggctgccccatnnaangggggactagnaaatgntgtcctntnccccc

SEQ ID NO: 52278 - DNA, 277 bp, Glycine max
  unsure (1)..(277): unsure at all n locations; Clone ID: 701141341H1
aagaggttgagatgagtggatgcaaaggacccataacaactttcattgttgaaccttntaatcccacacaatgaagagtttccaccttaacattgtctccgagagacttgggaacagtataagcttttcagaatgtggaggaattgaaattgaagacaactgggataaggttaagactgcatttgttccaactggaatgtctcttacgtcagaaatcgttgccccacttgttgcaacccttcccttggagatcnggggaannatnggaggntttctc

SEQ ID NO: 52279 - DNA, 274 bp, Glycine max
  unsure (1)..(274): unsure at all n locations; Clone ID: 701141342H1
gaaaanatagccttgctgggtgccatacagtctctctgtgaaggttcaatgtacacctttgtgtntctatggactcctggcattgagcccaaatgatgaagagattccccatggttttatttttgcaacatttatgttggctcaatgttgggaagctcgcttgcatcgaggttgatggcccgttcttcactccgagtagagagctatatgcagattgtntttgcagtttcttctgctgctctgatgctccccattttgaccactgtnagctatt

SEQ ID NO: 52280 - DNA, 274 bp, Glycine max
  unsure (1)..(274): unsure at all n locations; Clone ID: 701141344H1
tgaaactcaagtgcttcaactgaaagataattctgaaatatgtagggatactgtttctncctcctccctcaacttcnagcccatcgtcttctggagggaaaactgagactttggagtccctgataagagctgatgtgagtaaaatgaacagctttaggatcatggaagaggagcgtattcgaatgcaaaccaatgcaaggctgaaagcctcaaatctgctgatgcaactgatctcgtgtgggtctatatcagtgaaaaaccatagtgttggcct

SEQ ID NO: 52281 - DNA, 276 bp, Glycine max
  unsure (1)..(276): unsure at all n locations; Clone ID: 701141345H1
ctcacccccacactcccatctcacncacccntcgcattcaacaatgtctctcaccattccctccaacctctccaancncgcngccctccgcgccaaactaagcccaaagctaaggtccgcngccacaancaccatcgtctgnnnnnnnnnnnnnnnnnnnnnnnnnnnnnnngtgtcctccgacctgaaggcgttctccgccgcgctggccctctcctccatcctctctcggccctctccccgcnggcggagacatctcggggctcancccatgca

SEQ ID NO: 52282 - DNA, 281 bp, Glycine max
  unsure (1)..(281): unsure at all n locations; Clone ID: 701141347H1
gtgcatccatcgttaagctagtggcgatcggatccagctacagcatagagatcnnnnnnnnnnnnnnnnnnnatgttgggtgttataaggcacaagagtattcgccctnccttctccgcaatcagacacttgtcntctgcagctaaagagattactgtcagggaggctctgaactccgcactgcgatgaggaaatgtcagctgatcctaaagtgttcttgatgggtgaagaggttggggaatatcagggtgcatacaagatatccaaggggctgctcgaca

SEQ ID NO: 52283 - DNA, 122 bp, Glycine max
  unsure (1)..(122): unsure at all n locations; Clone ID: 701141348H1
aaccaacgtgatcnacancttgtggantgcaagnactttccantccaatccatggcaaacgccaattcctgagnttnagcgatttctctatgtgaaagcctaactanagancacgattttcc

SEQ ID NO: 52284 - DNA, 283 bp, Glycine max
  Clone ID: 701141349H1
gctacctccatggtgaagcttatgcttttctctgctctcatactcttgtccttgcaagcagttgtgtctgtaacaccactgcattttcaacatccactagaccctttaaccaaacaagagataagtcttgtccaaaccatagtccaaaacaagtacccaagctcaagtaacaggttgagcttccactacattggactctccgaacctgaaaaggatgccatcctcaaatgggaatccatcaaaccaactgttataactgtccctcgcaaagccttggccattg

SEQ ID NO: 52285 - DNA, 281 bp, Glycine max
  unsure (1)..(281): unsure at all n locations; Clone ID: 701141351H1
tagggtacgtgttcgataatactgtggtttctgttcttccagactaaggtagacgtccagtgcgcnntgcatgcaagcagcaaaatgggtganaaatatanaccttggatcatctttcttcatctactagtaatcacgtgttcctgcaatagaagctgcagagccaggggattgattganacagangacaaattcttcaaagcaacctcaaatgatcatcatgaaacanancatncacatgctcnctctcacgtggatcacataggatccttctgtgatng

SEQ ID NO: 52286 - DNA, 270 bp, Glycine max
  unsure (1)..(270): unsure at all n locations; Clone ID: 701141353H1
ctcgctgttaagcttgttggttaccaaaatagagtgtctggntggntcagtattgtgaaagttgctgatgatgcttcttcttcttctgtgggctataagcttgtnttctgtctatggccagaagaagaggtgatgattcacttatgtaagaatgttgggattcgtaccgatggtaagggaatcaggcgcttggtgctgtctgagaacactcctttagtcgttcagtttcagaaattcgatctgcactggccctgaataatcatgtgcttc

SEQ ID NO: 52287 - DNA, 88 bp, Glycine max
  Clone ID: 701141355H1
agcaacactacttaaggaacctgtggttaggtcttcctttgttcaggctgatggggtcaagttacttgtgcccttgatttcgccagca

SEQ ID NO: 52288 - DNA, 117 bp, Glycine max
  unsure (1)..(117): unsure at all n locations; Clone ID: 701141356H1
ctgaaaccctccttcgccattctcgttctgcncccgtccctctcgatcttcgccaggnattctctggcaggtattgttgatctgttcggtnctagatcttttcgggngggttttgtt

SEQ ID NO: 52289 - DNA, 270 bp, Glycine max
  unsure (1)..(270): unsure at all n locations; Clone ID: 701141357H1
acatattaacttgattagaaaaaagatgttacctcagaagcaagctgaagaagccatgatgtcaagcctcactcaaacgatggagcgggaggagggagaggaagtgataggggagacctcaaattttagctttaaaaatgctctctggcatggtggttcngcctacgatgnttggttcagctgtgcctcaaatcaggttgctcaggttcngttgactctgccttactcatctctcagctgggaatggtttcaggcatcatattccaagtg

SEQ ID NO: 52290 - DNA, 268 bp, Glycine max
  unsure (1)..(268): unsure at all n locations; Clone ID: 701141359H1
ttcactgtngttgttggtcacattcacagtggcctcatctgccaatgtcagctacgacggtcgctccctcattattgatgcccaacggaaacttcttatctctgcctccattcattacccacgcagcgttcccgcgatgtggcctggtcttgttcaaacagccaaggaaggaggagtagatgtgattganacctatgttttctggaatggccatgagctttctccaggcaatattactttggaggaaggtttgatctggtcaagtttg

SEQ ID NO: 52291 - DNA, 271 bp, Glycine max
  unsure (1)..(271): unsure at all n locations; Clone ID: 701141361H1
ttcttctcttctcgcaaagctctgtatcanattcntnccgctgttatcgtaaganggtatcagcggttacggnacaatttgncaattgcatgnagangcaagtagaagcaattgcgcganttttgcatntatngtcaatcctanaaagaggacaatnttccgtgcanatcgacgnnngtctcgatttgggttngntgncatgcagctaacnagcctgcttttgaagactgtnatatactcacgtttngcngtggctgggtagatancacct

SEQ ID NO: 52292 - DNA, 117 bp, Glycine max
  unsure (1)..(117): unsure at all n locations; Clone ID: 701141362H1
cgattttgtagtaagtgaggtgccaatatggtgaagatagctcttggtactttggatgactcttttagcgctgcctctcttaaggcttatttcgcagagttccacgcaactctggnt

SEQ ID NO: 52293 - DNA, 279 bp, Glycine max
  Clone ID: 701141363H1
gatggcttcttttcatatccaatattcattccttgtgcttgtgcttgctatggtgatcacattgatgaaccctaccaatgcaaccctctctccccatttctatgataaagtttgccctcaggcattgccagttataaagtcagtggttcaacgagcaattatcccgtgagcgacgcatcggagcatctcttctgcgcttgcatttccatgattgtttcgtaaatgggtgtgatggatcaatattgctagatgacacccgaaacttcactggcgagaaga

SEQ ID NO: 52294 - DNA, 278 bp, Glycine max
  unsure (1)..(278): unsure at all n locations; Clone ID: 701141366H1
cagtttccacactgcntaccttangtcttccgaattcgaagttaatttgcaagatggcnaaggaaaaggctcagatcaacattgtggtggttggtcatgtggaccctgaggaggcaaccaccattaacgagctgaagaagcctgttgtggagaaagaagctccagggcatgccatatgagggcatgcacgtacggcctcggaggggaaccagaaaattatgttaacaaaataatctggaaccctaatgtatcagtgtcatcatcagtgtgtagtttaa

SEQ ID NO: 52295 - DNA, 269 bp, Glycine max
  unsure (1)..(269): unsure at all n locations; Clone ID: 701141372H1
aagatctatgcttacctcttcctttgcatgctcttcctctcctcngncactcccattgctcggttgtggctactgtggcaaacccccnaaaaagcacaagcctggtaaaacaccaaagacacccacagtacccgttgttaagccaccagtcacaatccctcccattgttaagccancagtcagaatccctcnnattgttantccagnagtcacaatccctcngttgttaattccaccngtngnanttccctnnnattgnnagtcnggag

SEQ ID NO: 52296 - DNA, 268 bp, Glycine max
  unsure (1)..(268): unsure at all n locations; Clone ID: 701141373H1
gagatcaaccccgacgaaggcaaggggtttttctcggcttcttcagatttctgaaatggcgcctgtttcagcnttagccaagtacaagctcgtcttcctgggtgaccaatccgtgggcaaaaccagcatcatcactcgcttcatgtatgataaattcgataacacctatcaggctacaattggtattgattttctatcanaaactatgtatcttgaagatcgaactgttcgactgcagttgtgggatacagctgggcaggaaagattt

SEQ ID NO: 52297 - DNA, 266 bp, Glycine max
  Clone ID: 701141376H1
caaaattaaaagaagcaagcatgggggaatccaatgtcatgaccaagactgaggatggtgcttgtctgtctgcaatgctgcttagtactaatctagtgtaccctgcagtactgaatgctgctattgagctcaacttgtttgagatcattgctaaggcaacaccagctggttcttttatgtcatcccatgaaattgcttctaagctcccaacacaacaccctgacctgcctaataggcttgaccgcatgctgcgtttgcttgctagt

SEQ ID NO: 52298 - DNA, 275 bp, Glycine max
  unsure (1)..(275): unsure at all n locations; Clone ID: 701141380H1
gcttcttccgccactcagcacttcgctccctctgtgcttcaccaaccatggccgaaatcgaagctancgttgccagatccctctcanatcgacgtcaaacttttcaaccgctggagcttcgacgacgttgnntctactgatatgtctctggctgattacattggagtgtccccgtcaaagcatgctacatatgttcctcacactgctggtaggtactcagtgaagaggttcaggaaggcgcagtgccccattgttgagagactcaccaatctctc

SEQ ID NO: 52299 - DNA, 275 bp, Glycine max
  unsure (1)..(275): unsure at all n locations; Clone ID: 701141381H1
aataactacccctatcntcacnanaatcnantaggtcgnaacnccagntgggatagganaangagcngcctangaatggtcaccgannagctgcncgangnggccgnngaagnccccaaganngaccaaggnancatccctgtgcgtttagaatcctgttgcattgcgagggatgcgtcaagaagntcatacnncacatgtcgncantncaaagtgtggaanccgttatngcagatctatcgtctacanagtggatgttaccggctaaattggtt

SEQ ID NO: 52300 - DNA, 269 bp, Glycine max
  unsure (1)..(269): unsure at all n locations; Clone ID: 701141383H1
gaaaaatatcaatagtagtaataacaataagacaaatggtctttcttccatcattancantggnacgttcagatggtaacagagccgagcctggntcaaaggaatgggagatgaggccangtggaatgctggttcagatgagaacaactgactcggatcggaactcagcacttgtgcccanaattagagttanggncaaatatggttcaatttatcatgaagtcaacattagttcacaagctacatttggggagttgaagaannactgt

SEQ ID NO: 52301 - DNA, 264 bp, Glycine max
  unsure (1)..(264): unsure at all n locations; Clone ID: 701141385H1
cattttttgccaagaatgcctctaaatatatccttacagaataaaaaaattgtgtcttcgtcttgaagcatggaagatcatggacagaaccaaaggaagaggcacaatgtatttggtgcgtttgtggataaatcacttggntacccatcttctggtgcagatgaccatgaccccaagaagcttaaacccaattctgaagctcctttatcaaccatagaccaacaagtccctgcattaccccttcccaatatattggtttctgca

SEQ ID NO: 52302 - DNA, 262 bp, Glycine max
  unsure (1)..(262): unsure at all n locations; Clone ID: 701141387H1
agctgatccaaaggaaatcgttgatcttttcaagaaacgttttttggctcaacagtgaaaatttggttgcagtgggtatcctctaagttgtagattgngngtcaataaagtgttaccaaatatgntgattttgaactcaggtcaagcgttaccgagaatgatgattttgaaccgagaccaaatattagtaagtatgatgactttgaactcaggtcaagcgttaccgagaatgatgattttgaatcaanaccagtgttaccaa

SEQ ID NO: 52303 - DNA, 263 bp, Glycine max
  Clone ID: 701141389H1
aaacacccttcaatggctaccactaccactaaagtttacattgtttactattctatgtacggacatgttgagaagctagctgaagagattaaaaaaggagctgcttctgttgaaggagtagaagcaaagctatggcaggtacctgaaacactgcctcaagaggtccttgggaaaatgggagcacctccaaagagtgatgtaccaattattacacccaatgagctacctgaggctgatggcttattgcttggtttccccacaag

SEQ ID NO: 52304 - DNA, 265 bp, Glycine max
  unsure (1)..(265): unsure at all n locations; Clone ID: 701141390H1
gggcgaaaagggggaaaacaaattggctagtgctgtgcgtcacgtctaatatcttagtttgtctgatctaatctaaattttctgcgcaaacagannaaaagtcaagcgcggcacgaatcgcgannnnnnnnnnnnnnnnnnnnnnnnnnnnnnacaatcctnncgnangccaagccgcagagtcaacttgtacaaatgcccaccgaatccattaaaactaaaaaatcttctaccacgaacacttgtcttcattcttcaaccttcg

SEQ ID NO: 52305 - DNA, 264 bp, Glycine max
  unsure (1)..(264): unsure at all n locations; Clone ID: 701141391H1
gccaaaggaatcgatgacaatgattttctctccagcattgatccttatgtgattctcacatacagggcacaggagaaaaagagcactgtgcaagaagatgctggatccaagccacaatggaatgagagctttcttttcactgtctctgacagtgcatctgaacttaatcnaaagataatggataaagacaactttagtcaagatgattgtcttggcgtggcaaccattcatctggatccagtgtttgaagcgggtagcattcca

SEQ ID NO: 52306 - DNA, 265 bp, Glycine max
  unsure (1)..(265): unsure at all n locations; Clone ID: 701141392H1
atttgagtgtgatcgatggcatacccaaacccttatccggctcagccctatccctccgcctccgcgccgatgccggcggttccctccgccgtgatcggcccccagttctgcgcgccgtacccggtggatctggcggtggtgaagaaggtgatgaccanctctgacaacttcgttgtcaccgacgtcaacggcaacatcgtattcaaagttaagggatcgctcgcgaaccctccgtgnaccgccgngtcctctnngncgccgggga

SEQ ID NO: 52307 - DNA, 249 bp, Glycine max
  unsure (1)..(249): unsure at all n locations; Clone ID: 701141394H1
attttccttcgttttctctctctttntcagtttctcagtttancagtcatcaccatcgcagcacgcaagatgtggaaccaaccattcggaatcaccgatttggaaagcggttctcggcctctgtatccgatgatgctcgagagccctgaactgcggtggtcgttcatcagaaaagtgtactccataatcgccatccagttgctcgtaaccatcgtcgtcngcgccgtcgtcgtcaccgtccgcccaatc

SEQ ID NO: 52308 - DNA, 276 bp, Glycine max
  unsure (1)..(276): unsure at all n locations; Clone ID: 701141396H1
gggcgttctatatattattgaattgacaatgagggcctgctncttgctttgcttcctcttcctatttgctttcttgttagctgccactacagaatcaagaaaagatacaggggaatattggaaaatgatcatgaaagatcaggaaatgccagaaggacttcaaggtcttgtttcatttcaatctgaaaataatcctaagactcaagagcagcttggtaaaggttccaaaaaccattgtgangagtctctagttacaaatacacaagttaatagtga

SEQ ID NO: 52309 - DNA, 279 bp, Glycine max
  Clone ID: 701141401H1
ttggaaatggcagcggcaggttgtcagaagcttctggaattgagcacgaagatcgtcgctgttggcagaaactacgctgctcatgccaaagaactaggcaacgccgttcccaaggagccggtgttgtttctgaaaccgacgtcgtcttacttgagtaacggcggaaccattcaaatcccacacaacgagggctctctgcatcacgaggttgagctcgctgtggtcatctccaagaaagcccgtgacgtctccgaatcctctgccatggattacgtcgcc

SEQ ID NO: 52310 - DNA, 277 bp, Glycine max
  unsure (1)..(277): unsure at all n locations; Clone ID: 701141404H1
gcttccttaagctccttagtgctgctccttgcagctctaattctatcccctctccgttcttgcaaactatgagaatncccccagtgtacaagcctcccantgagaaaccaccagtttataagcccccagttgagaagcctcctgtttacaancctccagttgaaaagccnccantttataagccnccagtagagaagccaccagtgtacaagccnccagttgagaanccnccagtntacnagccgccagttganannccaccngttncgagccacct

SEQ ID NO: 52311 - DNA, 274 bp, Glycine max
  unsure (1)..(274): unsure at all n locations; Clone ID: 701141405H1
ctggggatcatcatggttgcccctatcgacatttcagtgaagagaacctcngagctgctcttagcggaatgggggtaaacagttgggncaatggncngatgtgatggacaaagtgagaaatagacattatgngttggcttgcaccttgacatttgaagctcttcatggcatgccgtgtgatgcagggattaaccatccaaatcaatacttcagtgacagtcaaaagatattaaagccaaagaaggatcttcagcctaagtattttagttattgc

SEQ ID NO: 52312 - DNA, 273 bp, Glycine max
  Clone ID: 701141407H1
tctctctctctatctccgtgtttcattccaactgcaaaacaacaactcaattaagaaattcttctaccggagccatggcagatctcaagtctacactcttgaacgtctattccgttctcaaatctgaactcctccacgaccccgccttcgagttctccgatgatgctcgccattgggtcgaccggatgctagactacaatgtgcctggaggaaagttgaaccggggactgtcagtcattgacagctacagattgttgaaagaaggacaggctt

SEQ ID NO: 52313 - DNA, 271 bp, Glycine max
  unsure (1)..(271): unsure at all n locations; Clone ID: 701141408H1
gctgagatacttgaagctgccagaagaaaactcggtagggaggtcgctagcaatgaatataccaaggtcatgagcgantnatgtgtgtcaaaaggttctgtttgggtcttgaaaagcggtgatggaagtaagtaagcaatgatccgaggtccccgaggattgaactgcccacctgctcatgaatggaagtcatactctgctttctcatgagactaccagagtttagtttattggtcatagtcatattctcaaatattcaaatcttttccaa

SEQ ID NO: 52314 - DNA, 274 bp, Glycine max
  unsure (1)..(274): unsure at all n locations; Clone ID: 701141409H1
ggaacttcttgtttggtgccttctgttctggagctagcaaaacaacccatcatcgaagttccagnacgatatgttcatgccaatcaagatccacatattctttccaacacaatttctttanccacaagttcccatcatagacttgcatcaattgttgnctgaagatccaagtgaactagagaagctggaccatgcgtgcaaagaatggggtttcttcagcttataaaccatggagtggaccctccagtggtggaaaatatgaagataggtgttc

SEQ ID NO: 52315 - DNA, 105 bp, Glycine max
  unsure (1)..(105): unsure at all n locations; Clone ID: 701141411H1
tcacctatttcaccatctgcaagagnttacacttacagagncanacantacaatgtcggtggatgtanttacgcacaggacnctacncaagcaacagangnnnag

SEQ ID NO: 52316 - DNA, 271 bp, Glycine max
  unsure (1)..(271): unsure at all n locations; Clone ID: 701141412H1
aaaacaagnagtgttccgaaaaggtggctcagcaggangtggtagaagggttcaagttcgaacannnnnccnggnannagcgcgtgagagtnncgcgcgtgtggaagacgaagcaggggcagnncttcgttgtggagtggcgcgtgggcatcactctcttctcagactgcgtcnnactcgtatctccgcgatgacaactctgacatcgttgctactgataccatgaaaaacacagtgtatgcaaaagcaaaggaatgctcagacntactct

SEQ ID NO: 52317 - DNA, 269 bp, Glycine max
  unsure (1)..(269): unsure at all n locations; Clone ID: 701141414H1
gcaacataccatcaaaaggatttatgtcagtcttactgctgggctacccactccagttgctgggcgtgttgaggttccagttggccgtgatcctaataatcggattcgtatgactgctgtagctggaccagttaattctagaaaggcccgtcatgctgctagtaggtacaaagtaattgagatacttnctggggggagttgttctttggttgagtggaagttggaaactggacgcactcatcagatacttcatgacacaactttgagga

SEQ ID NO: 52318 - DNA, 271 bp, Glycine max
  unsure (1)..(271): unsure at all n locations; Clone ID: 701141415H1
gcaaatgccaagtgacaagacagttggcggtggtgatgatgctttcaatactttcttcagcgagactggtgctggaaancacgtgccacgtgcantgtttgtagatcttgaacccactgttattgatgaggtgagaaccggaacttaccgncagcttttccacccagagcagngcgccgcggnaaagaagatgccgcnaacaactttgcncgtggccatnataancattgggaaaagagattgnngatntgtgcttggancgcatcanaaa

SEQ ID NO: 52319 - DNA, 272 bp, Glycine max
  unsure (1)..(272): unsure at all n locations; Clone ID: 701141416H1
gccgtcttcatggttcacttggctacaatccctgtacactggaaccggcattaaccctgcaaggagtttcggaccagctgtgatcttcaacaacgacaaagcctgggacgaccaatggatttactgggttggaccgtttgttggagctgcggtggctgcaatctaccatcaatacattctagaggttctgcaatcaaagctcttggatcctttcaggagcaacgcttaattaaaaaaaaaaaaaatcnagttnctccnctaccaannttang

SEQ ID NO: 52320 - DNA, 273 bp, Glycine max
  Clone ID: 701141417H1
acttgctttctctcagaagctgtctggtctcccaccagaaactgtgttccaaccacttcttaaagataaccttgtggccaaagggctagttctgtcatttatgactgacttctttaaggagtatctgattgacaacagccttgatgatcttatttcaattctaaaacggggaaaagtagaggaggatcttttggacattttcccccctacaaaaagatccattgaagctttctctgagcatttcaccaaggaaggattggtggccttggtgga

SEQ ID NO: 52321 - DNA, 270 bp, Glycine max
  unsure (1)..(270): unsure at all n locations; Clone ID: 701141419H1
catttttctagctccttctctcatcactcatctntggctacctttccctcccnnnnnnnnnnnnnnnnnnnnnnnnnaattccgtctccaagatctagaatgttttactatgctggaagtgaagaccactatgaggagcctcacttcctccaagcttgtnttctttgcagaaaaccactaggccaaaatcgtgacatcttcatgtacagagggaacacaccattttgtagcaaagagtgcagacaggagcaaatagagattgntgnggcc

SEQ ID NO: 52322 - DNA, 267 bp, Glycine max
  unsure (1)..(267): unsure at all n locations; Clone ID: 701141421H1
cagagactccataacccgaaaatgcctttcaagaggtacgttgagattggaagggttgctcagatcaactatggcaaagagtatgggaggctcgtggttattgtcgatgtcattgaccagaatagggctcttgttgatgctcctgacatggtgaggtcccaagtgaacttcaagaggctatcactcactgacatcaagatcgatattaagaggatccccaagaagaaggatctcntcaagccatggaggctgctgatgttnagaaca

SEQ ID NO: 52323 - DNA, 268 bp, Glycine max
  unsure (1)..(268): unsure at all n locations; Clone ID: 701141422H1
gccggcactaaacaacatggcggacaaggcannccaccatccgaaccaggaagtttatgacaaacaggcttctactccagaaagcagttcgtcgttgatgtccttcatccagggagggctaatgtttccaaggctgaactgaaggagaagctnnggnagaatgtatgacgtgaaagacaccaacactgtatttgtctcaagttccgaatcatttggtggtggcaagtccatgggtttggtttgatctatgattcagttgagaatgcta

SEQ ID NO: 52324 - DNA, 272 bp, Glycine max
  Clone ID: 701141424H1
tcactacaagctgcagctaccttcatgcaacccaccaaggtgggcatggccactacgcaacctcaaatctacacaatgcatttctaaggcttttggcttggaacccgctgcagctaaactcatttgctcccttaagcccgatctcaaagattttgctcaaaaatgtgtcgacgccaccaaaattgcaggattcgcccttgccacctcagctctcgttgtttctggagcgagtgcagaaggtgttccaaagaggctaaccttcgacgaaatcc

SEQ ID NO: 52325 - DNA, 255 bp, Glycine max
  unsure (1)..(255): unsure at all n locations; Clone ID: 701141425H1
ggcgcaggtaagcaaaagctcgtgaccnttgctagcaatggangnggatcaaggtttacgagactgaggcagaagacgaaggctgatctgctgaatcacctgaaggacctgaaggcggagttgccttgcttcgtgttgctaaggtcaccggtggtgcccctaacaagctttccaagataaaggtggtgaggttgancnttgccnaggtttgaacggggatttctccagaagncaaaaggcngcgttngagggant

SEQ ID NO: 52326 - DNA, 241 bp, Glycine max
  unsure (1)..(241): unsure at all n locations; Clone ID: 701141426H1
ctttcaaccccaacaactccaagcctcaaggcaacaagcacaaatgcaatgacnttatccaactcatagattattgtctcttaagaacccagtatcanataccagaggattttcatcaaaagagaatatttttatcagaggtcaccaaatcaatataaaacaattttttggccttatctcgggtcgtacgccacgaaacaaagcaggagttgtttccccaaggtgtggcctgccatgacag

SEQ ID NO: 52327 - DNA, 264 bp, Glycine max
  unsure (1)..(264): unsure at all n locations; Clone ID: 701141427H1
cgcaaacantgagccatggccgtcggaaagaacaagcgcatctccaangggaagaagggtggcaagaagaaggcngctgatccctttgccaagaaggatttgtatgacattaaggctccntctgtttttcaagtgaanaatgttggcaaaaccctcgtctctcgtantcngggtaccaagattgcttctgtaggactcaagcanaaagtgtttgaggnctcctggctgatcttcacnggggtnngntcntcntccannanattt

SEQ ID NO: 52328 - DNA, 263 bp, Glycine max
  Clone ID: 701141429H1
ctcaaagattaagccatgcctgtgtaagtatgaactaattcagactgtgaaactgcgaatggctcattaaatcagttatagtttgtttgatggtatctactactcggataaccgtagtaattctagagctaatacgtgcaacaaaccccgacttctggaagggatgcatttattagataaaaggtcaacacaggctctgcctgttgctttgatgattcatgataactcgtcggatcgcaggctttgtgccggcgacgcatcat

SEQ ID NO: 52329 - DNA, 264 bp, Glycine max
  unsure (1)..(264): unsure at all n locations; Clone ID: 701141430H1
cacccattcatacgtggtgttgttactgctgctcttttctcttttcttttctctttagttctctcttcccctttnnnnnnnnnnnnnnnnnnnnnnngagcttgtttaagcttttcttccattaacatattatcatgcatgtgtggtattcttgctgtncttggntgtnctgatgactctcgagccaaaagggtccgcgtgcttgagctctctcgcagattgaagcaccgtggccctgactggagtgggctccatcaacagggg

SEQ ID NO: 52330 - DNA, 266 bp, Glycine max
  Clone ID: 701141431H1
ggaaaatttgcagtttcttagcatagattggaggaagaagattgttggcaactgttcccagggagaacaaccttcatcttcttctgaaggtgctcggtgaaagggtgtttgaccaagagaagaaatccagttccagagattttttattcaagctcggcattgtggaaatttacaaaaggaggatggcacttatccttgcagcaaatatgtgctccattacaaattccaaaacggttgaagtgataaaaagaatcgatattgaagat

SEQ ID NO: 52331 - DNA, 267 bp, Glycine max
  unsure (1)..(267): unsure at all n locations; Clone ID: 701141432H1
ggnnatattncncgtgcaaggtgggcaatgcnggnaccnaatcggttccnanttctgggaagtgatatgcgacgaacacggcatcgaccccaccggaaattanaccggcgagaggctccgatttccaactggagaggatcaacgtctactacaatgangcctccggcggaaagtacgttncccgggccgtcctccatgatntggganccggcacaatggacagnataagatccggcccntanggtaagatttanagcccganaantt

SEQ ID NO: 52332 - DNA, 272 bp, Glycine max
  unsure (1)..(272): unsure at all n locations; Clone ID: 701141433H1
cagagtttgagtgagtagtatggntcccgacggcgtggtcgcngcggaggcgcttatggcgtcgggtcggngttcggagaagctgagccttccatcactccaatccaaaatgaagtgcgatcccgaaggctacgantcggagctactccttctctacaaccaattcaattcctncgctcgaactctttcagaaacaagccgccatgaacttcacctccatctccggcatcggcagcgaccccaccgtcgccaangacctcggcgacagggcc

SEQ ID NO: 52333 - DNA, 271 bp, Glycine max
  unsure (1)..(271): unsure at all n locations; Clone ID: 701141434H1
tggagaccgttgggttgttcttcnagaccctctctgactcgcctggttggactccgctacgaagtttaggggtttctgattcgcccgcngacggatctcaattttgtctcagttaccatctttagctncattcgtgtcananccctttgaacacncgtcacctacaggaaaagcaaanggnatcatntcaccatggnggcactaattcttgttagagggtttngaanaaggttganggcantgncatcatgttgncaancctcttgttgat

SEQ ID NO: 52334 - DNA, 262 bp, Glycine max
  unsure (1)..(262): unsure at all n locations; Clone ID: 701141437H1
ggtggccgcgacaagagactttggctttgttaaggatacgctccgacatggacgtggcgtttcgagatgcaagtgttnaaggtcccttgtgggaagaagtatccaggnaaatggcanagcttgggtatcacagaagctccaagaagtgcaaagaaaaattcgagaacgtgtacaagtnccacaagagaaccanagaaggtcgaatggganacnagatggnaaaacatatcgtttcttgatcaatacaanccttgaganncct

SEQ ID NO: 52335 - DNA, 266 bp, Glycine max
  unsure (1)..(266): unsure at all n locations; Clone ID: 701141440H1
ggcgaatccgccgngctcattganttgccgtctgccaccacgcctagagtgctcncacccaagagggntnataagnataacggntacttgatggtgtcgtgcaatggangnctcaaccaaatgagggctgcgatatgtgacatggtggcgattgcaaggtatttaancgtnacgcttatagtgccggaattggataaagcgtccttttgggctgaccccagtgagttccaagatatctttgatgtggaccantttattacatcctt

SEQ ID NO: 52336 - DNA, 266 bp, Glycine max
  unsure (1)..(266): unsure at all n locations; Clone ID: 701141441H1
cgaaatttacgatagcttttganggtaccagtttttgtcatcactctctcagctgatcggtgcttatagatccagcgtcagcagnttcaatttgacactggaagcaatttctccatttcaaagattaagtgaaaacatggttgtccttgctgcatccattgtgagcaaatctggcaaagttctagtttctagacagtttgtggacatgtctcgtatcagaattgagggtcttctagcagcatttcccaagttaataggcactggaa

SEQ ID NO: 52337 - DNA, 265 bp, Glycine max
  unsure (1)..(265): unsure at all n locations; Clone ID: 701141443H1
gangatgtcgaccgtaccaggacagctcatctgggagatcgtgaagaagaacaactacctttttggtgaaagagttcggaaggggcactcagagcgtgcagttcagcagagagcccaacaatctctacaacctcaacactttcaagtactccggtttggcgaaccagaaaactgtcactgttcaacctgctggtaaagaccagtccgtgttgctcgcaacaaccaagacaaagaagcaaaacaagcctgcngctttgcttacana

SEQ ID NO: 52338 - DNA, 260 bp, Glycine max
  unsure (1)..(260): unsure at all n locations; Clone ID: 701141446H1
ctctggtctttctacatctgaaccaagggcgttatcatctgggagnggggcaaacccgagatcagcttcatggttggagaggcaaggtgatagtgaatttggaattccttattcactacgtactttggctgttgcaagtnaaggaggaagtagtagacttgtatctganctccgcaatgttttgggccttatgcgtagaggtgggaatgtgcgatttgaggatgttgtgcatccctgatcctcatcatttctttctggaa

SEQ ID NO: 52339 - DNA, 259 bp, Glycine max
  Clone ID: 701141447H1
ctcacccattttcttcgtagccaaacactctgaaattctcagttatgtcgtggcaagcgtatgtggatgatcacctactgtgtgaaatcgaaggtaaccacctcactcacgccgctatcatcggccaagacggaagcgtttgggctcagagcaccaacttccctcagttcaaacctgaggaaataactgccatcaataatgactttaatgagcctggatcattgctccaatggattgtatatcggtggcaccaaataca

SEQ ID NO: 52340 - DNA, 267 bp, Glycine max
  unsure (1)..(267): unsure at all n locations; Clone ID: 701141449H1
atgacaacaacaacaaaggcctattacttgncctagggctagtactttgtgtcaccctgtccttcttcccaagggtcacaganggnagggtgccctttgcatgcgaccctnggaacggtctcacgaggggttncaagttttgcaacacgcacgtgccaataccacgtgaaggtgcaggacctcattncgangctcacattgccgganaagatcaggctcgtggtcaacaatgccatcgccgtgcccaggctcggcatccaaggctac

SEQ ID NO: 52341 - DNA, 267 bp, Glycine max
  unsure (1)..(267): unsure at all n locations; Clone ID: 701141450H1
gaggaaccctagctagggtttggaagaagctgatccgagaagatggtgcagcgtagtcacctaccgcaaacgccacagctatgctaccaaatccaaccagcacagagtcgtcaagactcccggtggcnagcttgtttatcagaccacgaagaananggccagcggacccaagtgccctgtcactggaaagaggattcaagggattccacatttaaggccagcagagtataatagatcaaggttacacagaaaccgaaggactgtgaa

SEQ ID NO: 52342 - DNA, 244 bp, Glycine max
  unsure (1)..(244): unsure at all n locations; Clone ID: 701141451H1
gcgactcactctagtgaganancnangaagcgnagnnaannaacacncacacacaaacacaagcanagttgaaaatggctctgcttaccctctctncgctgcaatgaagaaacgtttgtttntcttctccgaagaagaaaaatggctctcggcgacgatgcgcagaccactctccctcgtncctcgatgcccttctctgngaagagcgagaaaccttcgaggaagactttgatgagaacggtta

SEQ ID NO: 52343 - DNA, 249 bp, Glycine max
  unsure (1)..(249): unsure at all n locations; Clone ID: 701141456H1
aaccctcgatcactcccacgcgctccnatatcntctccntcaccgtcgctctctccaacgatcacaacancatcgtcatcccatggtcggtttnattctctaatttctctcttccttttttcgttatccganttgttctcangcatcaataactaagtccgcgantttctagcgttncangntttgnncnanttangtggggtcgnaatttctnagnnggattcggantgganctgcncntttnnntng

SEQ ID NO: 52344 - DNA, 263 bp, Glycine max
  unsure (1)..(263): unsure at all n locations; Clone ID: 701141457H1
ccatacccccaacacaatcttcccctacatcttggtgtttgaacgttgcatagcttctcatttaccatggccaatgcactacataacgctgccatctccagagtcatgtttggagaccaatattccatttctcgttgcgtggttccatccctatccactcttcctctcagagccatgcacaaaggaaaacacgttgagctgaacagaacggttatggtggtaaaggcaaagactaatagngattttgatgntcannngtngnc

SEQ ID NO: 52345 - DNA, 234 bp, Glycine max
  unsure (1)..(234): unsure at all n locations; Clone ID: 701141458H1
tcaattttctgagcagccaaacactctctctctcancctctacgaaaattctcagtttgcagagaaaatcacgatcatgtcgtggcaagcgtatgtccgacgatcaccttctgtgtgacatcgaaggtaaccacctcactcacgctgctatcatcggccaagacggcagcgtttgggctcagagtaccgattccctcagttcaaacctgaggagataactgccatcatgaatga

SEQ ID NO: 52346 - DNA, 261 bp, Glycine max
  unsure (1)..(261): unsure at all n locations; Clone ID: 701141459H1
tttcctattttataatctctagcataattcagcatggccaaagacaagtacaggtctttcttgcatgatgaacctgataacgttcagtggagacatggtggccctcccacttatgatgctgttaacaagctttttgaagaaggaagaacaaaggagtggacaganggatcattggaggagatagtgcaaaatgctattaagtcatgggagatggagctctcacacaagacccgtttgcaggacttcaagcacaataaaccc

SEQ ID NO: 52347 - DNA, 260 bp, Glycine max
  unsure (1)..(260): unsure at all n locations; Clone ID: 701141462H1
ttcgagncacccaaggcacnggtcactgggattnctncccangaancgtgctgctcgtcatagggganaagtgaaggcattccccanggatganccattccaaggcacccaagctcactntcattgttgggttacaaggctggtanactcacattgttagganaggtncgataagccangatcaaagctcnccnaganggaaacatgtgngcctntnacaatnatnanacncctncantggttatngtaggggtngtggg

SEQ ID NO: 52348 - DNA, 260 bp, Glycine max
  unsure (1)..(260): unsure at all n locations; Clone ID: 701141463H1
ctcacaacagcagctgcagcagcaatggctcccaaacgaggtggaaaggctccggctcttgccgctaagaagaagcctgagaaggtcacgaatccgttgttcgagaagcgtccgaagcagttcggaatcggangggcgttgcctccgaagagagacttgactaggttcgtgaagtggccaaagaatgttcaaattcagaggangaagaggattctgaagcagagttnaaggttcccccagntttgaaccagtttaccaaa

SEQ ID NO: 52349 - DNA, 265 bp, Glycine max
  unsure (1)..(265): unsure at all n locations; Clone ID: 701141464H1
cacccatccacaaacgaacacacactttgattgagaatggggcgtgttcgcacaaagacagtgaagaagtcctcgcggcaagtgatcgagaggtactactctcgcatgacgctggacttccacacgaacaagaaggttctggaagaggtngccatcattccctccaagaggctccgcaacaagatcgcgggattctccacccaccttcatgaagcggatccagaagggtccgtacgtggaatctccctcaagctgcaggaggagg

SEQ ID NO: 52350 - DNA, 263 bp, Glycine max
  unsure (1)..(263): unsure at all n locations; Clone ID: 701141465H1
gnagatgggaaangttccatgtgnatatttgctactancaccaagatctgcaccgacgaccgcttccgcccgggctcgcgccctgggtnttgcagcgaccgccgcgccctcctaactcatcggggcttagtccttgccccgacngcngggtataggtcgcgcgctttangccatccattttcngggctanttgantcggcaagtgannngtnanacactccttagcggatncgncttccagaccaccgtccngcngtcttaat

SEQ ID NO: 52351 - DNA, 244 bp, Glycine max
  unsure (1)..(244): unsure at all n locations; Clone ID: 701141466H1
tccgcagcagccttcttcgccgttacagctacaagagccaccacncaggtaagatatggttaancataacaacgttatccccaatgggcacttcaggaaacactggcaaaactatgtgaagacttggtttaatcaaccagcacggaagaccagaaggcgtttagctcggcagaagaaggctgtcaagattttcccaaggcctactgctggacctctcaggccaattgttcatggccagactctg

SEQ ID NO: 52352 - DNA, 262 bp, Glycine max
  unsure (1)..(262): unsure at all n locations; Clone ID: 701141469H1
gatganagacaaagcaagagngaatttcaataacttgcaacttgcctacnnccatattttcntttgntcacaatttaatatatggnatctagcctgtggtgtggccataacaagaagggngagnaancaaaataatttacggttgagatgnggangtgnnagctctgnaacagtcccgcgaagttgttctgcgaatcagantcaagccanccnctggntggaactgcgatgcnaaggttcacagtgcaaacttcctcgtcac

SEQ ID NO: 52353 - DNA, 254 bp, Glycine max
  unsure (1)..(254): unsure at all n locations; Clone ID: 701141471H1
gtgaagtgagtagtgagtgctgaatcgantcgaatcgattctccgaacatggcggcgagcgatcgcacagtgttgcaattntcttcatcatcttcntcttcttcgcagatcttgtccgcgaaggtccaccctctggtcatcttcaacatctgcgattgctatgttcgacgccctgaccaagccgaccgcgtcatcggaaccctactcggctcgtcttccgagggaacgtcgatatccgaattccnatgtgtncc

SEQ ID NO: 52354 - DNA, 261 bp, Glycine max
  Clone ID: 701141472H1
gaaggccctgtcgtgcccagttcaccgtctaggagtcctccgtcaccggctcgtcgtcgcaagctttctccatcactaagtcatcgtgccttgttccccgtgtaggagtcctctgtcaccagctcgccatcaaagttgtgctgccatcattgtaaatgccaccaccgtcacgtaagccttcgtgaagttgctgtcgtggctgggcaaacactagaagcaataaggacatgacaaagatatcattagctttggtatttgcat

SEQ ID NO: 52355 - DNA, 251 bp, Glycine max
  unsure (1)..(251): unsure at all n locations; Clone ID: 701141474H1
cgattaccctagtttcaaactcgtcatcgtcggtgacggtggtacaggaaagacaacgttcgtgaaaaggcatcttaccggtgaatttgagaagaaatacgaaccgaccattggagtggaggttcacccattggatttcttcacaaactgtggaaagattcgcttctactgttgggatactgccggacaagagaatttggtggccncagggatggtttatatccngggnangnccattntcnttttggtnt

SEQ ID NO: 52356 - DNA, 235 bp, Glycine max
  unsure (1)..(235): unsure at all n locations; Clone ID: 701141478H1
gggaactgcnatttctatcaaccctacntgtgatttgggcttangcaggactcctcatcaatnccatcaacagcattcctgcaggagagcttgatggagggagaatttcgtttgccctatggggaanaaaggcttcattacgcttcacaggggtttcaattgcgttgctgggagtctcgtcatgcttaatgatgtagctttctattgggtagttctgatattcttccttgnaaag

SEQ ID NO: 52357 - DNA, 258 bp, Glycine max
  unsure (1)..(258): unsure at all n locations; Clone ID: 701141480H1
caaaaacatcgaaagagagaggcatggccgagcaaaccttcatcatgatcaagccagatggcgttcaaagaggccttattggcgagattattagcagatttgagaggaagggtttttacttgaaagggttgaaactcgttactgtggaccgtcctttgctgagaagcactatgctgatttgtctgcaaagcctttctttagtggtttggtggattacatngtctctggcccctgttgttgccatgatctgggagggta

SEQ ID NO: 52358 - DNA, 262 bp, Glycine max
  unsure (1)..(262): unsure at all n locations; Clone ID: 701141481H1
gctgtacgtagtgggcaaaacggtaaaaaaacatgagaaccatgtcgttaatggaagcttataataattaaaattgtattattattgttttacacaacgagttgaancatccaggttcaagtttggcatctgnctcccaatacggaacccaaaattagctcgattaaatccaaatctgagagaagcattgattggtacggtaatggcggaagggaaggaagagagtaaatctagcgaggaaagtgtgaagctgttcgtaggg

SEQ ID NO: 52359 - DNA, 257 bp, Glycine max
  unsure (1)..(257): unsure at all n locations; Clone ID: 701141482H1
atcaccattcttgaatacccttttgctcctctgcactactctcctccncncaccntgntacctggctctccctnaccctgatgctgatgcggttcagccaatcatcccanacccctcatcttcaacaggaacaatccctgcattcccagaacaagctgatgctgcagggtgccctctcagcctctcagatgagcactacgaaggnataaagagtgcatgtggctccaacaaacatgctgcanagatgatgatgacct

SEQ ID NO: 52360 - DNA, 256 bp, Glycine max
  unsure (1)..(256): unsure at all n locations; Clone ID: 701141485H1
cagtatctganttttttcttcaaactcaaaccctaacaaacaaaaaccatgtatcgttttttctcttccattcgccatggccgtggatcttccctcgcatctcttctcgcgccgaaacctgcacttccattcaacgccgctctnncganctcgccgtttacctcaaaacgacgggcatgttagaggattttctagctcgaatttagattggaggaggcttatgtgaaccagnatgtgaatgcagatgcaaatgctc

SEQ ID NO: 52361 - DNA, 255 bp, Glycine max
  unsure (1)..(255): unsure at all n locations; Clone ID: 701141486H1
ggaaaacngcaccgccgccgtanaagacaacaaccatggtgcacgtactccttttacaggaactatgggaagacattcnagaagccgcgtacgnccgtacgagaaggagcgtctcgacgcggagttgaagctggttggtgagtacgggcttcggtgcaagagaganctgtgganggtgcatacgcgctcagccgcatccgcaacaacgcgnggaanctcctcancctcgacganaaagaaccgcnccggttttct

SEQ ID NO: 52362 - DNA, 258 bp, Glycine max
  unsure (1)..(258): unsure at all n locations; Clone ID: 701141489H1
ctagaatcccatctcataagcttagcaatggcctctacgtatcaggacggccggagcagcccaaagaaagaactccaacaatgacatcaacagccgtgccatataccggtggagacataaaaaagtctggagaattggggaagatgtttgatattccngttgatggctctaaatctaggaaatctggaccaataacaggtgctccatcacggactggatcttttggnggagctggttcgcnttnnttnnnntntgccc

SEQ ID NO: 52363 - DNA, 256 bp, Glycine max
  unsure (1)..(256): unsure at all n locations; Clone ID: 701141490H1
atcactctagctgttgcaaatttctactatttttcaatggcttctgcagatgttgagntccgttgctttgttggtgggcttgcttgggtcaccggcaacgatgccctcgagaaagccttttcaatctacggcgacatcgttgaatcgaaggttatcaacgancgtgagactggaaggtccagaggattcggatttgtgaccttcgcctncagagcagtcaatgaaagatgcgatcgcaggaatgaacggccaggac

SEQ ID NO: 52364 - DNA, 258 bp, Glycine max
  unsure (1)..(258): unsure at all n locations; Clone ID: 701141492H1
caaccctgacactccttcttctcngccttcctcttcgattcatcgcttcagaatgccgccgaagttcgacccctncccagatcgtcgacgtcttcgtacgcgtcaccggcggtgaggtcggcgcggcgagttccctcncccccgaagatcggtcccctcggtctctcccccaagaagatcggagaagatatcgccaaggaaaccgccaaggactggaaggcctccgcgtcaccgtcaagctcaccgtgcagaaccgtc

SEQ ID NO: 52365 - DNA, 252 bp, Glycine max
  unsure (1)..(252): unsure at all n locations; Clone ID: 701141493H1
ggtcgcggaggatcggcagggaacaagttccgcatgtcactgggtctgccggtggcggcgacggtgaactgcgccgacaacaccggcgcgaagaatctctacatcatatcantgaaggggatcaagggaaggctgaaccggttgccgtcagcttgcgtgggtgacatggttatggccaccgtcaagaaggganagcctgatctccgtaaaaaggtgctccccgccgtcatcgtccgtcagcgcaaccgtggc

SEQ ID NO: 52366 - DNA, 253 bp, Glycine max
  Clone ID: 701141494H1
gctggtgctcctttgtcatctcatcctgacgtagacaagatttcctttactggaagctctgcaactggaagcaggattatgacagctgcagcacagctaacgaagcctgtttctctagagcttggtggaaaaagcccaatcattgtttttgaggatgttgacctgataagactgctgaatggaccatctttggctgcttctttacaaatggtcagatatgcagtgcaacatctcgccttattgtgcatgaaag

SEQ ID NO: 52367 - DNA, 253 bp, Glycine max
  unsure (1)..(253): unsure at all n locations; Clone ID: 701141495H1
gggtatctatatttccacaaggcaccaaacancagaagagtttcatcaagaaacatgccgcaagattaaagcactccacaaatatgattgcttgcgagccaataaatcgacctttgcctggggtctagaagccagagtgccatttttggacaaagattttatcagagttgcaatgaacattgatcctgattataaaatgnttaaaaaggaagaagggcgattgagaaatgggtactgaggagggcctttgatg

SEQ ID NO: 52368 - DNA, 261 bp, Glycine max
  unsure (1)..(261): unsure at all n locations; Clone ID: 701141496H1
tggcaatgcaaatttgtttatccctgtggtgttgggaagtgattgctcatgtctttttgatctgcggggtaaaagagtaacagataatttagatgaagcacttttagaaaatgaatggaaccatgcagaagttacatgtccaggttttacttttacttttgccccaacctttataaaaactggactacatgtattgaaacaggaaagtgacatggaggatatncgattcccggatccttgtngaaaaaacaaaattgggtt

SEQ ID NO: 52369 - DNA, 272 bp, Glycine max
  Clone ID: 701141501H1
gttatcatttctccatttccattttctctctcacttttcaagaatcgtaagctatgggaaagtcttacccaactgtgagtgctgattaccagaaggccgttgagaaggcgaagaagaagctcagaggcttcatcgctgagaagagatgcgctcctctaatgctccgtttggcatggcactctgctggaacctttgacaagggcacgaagaccggtggacccttcggaaccatcaagcaccctgccgaactggctcacagcgctaacaacggt

SEQ ID NO: 52370 - DNA, 265 bp, Glycine max
  unsure (1)..(265): unsure at all n locations; Clone ID: 701141503H1
ttcttttacaatatataactgtaactacttatttcctaagaattataacttacgtaaaacatgttgggctatgcgaacccgncggggaatctggctgtggatggagacatgacagtgttggaaagacagagggcgaggatgaagtggcaagaagagcaagagtacttttctggaaacagcttcaacggtgtnnnnnnnnnnnnnnnnnnnctgcacgttccagattccatatggtggctgctgactccggttgtgcacttgctga

SEQ ID NO: 52371 - DNA, 269 bp, Glycine max
  unsure (1)..(269): unsure at all n locations; Clone ID: 701141505H1
atgcggcntgnnctgantccanctggctggaagtgcannnaaaatggggngaatgttgctgagttaatagttggccgtggcttggaantgtcattagacatcgngnactttnnaganagatctaactattatgatggtcnacgggtggtgaatcangtgcaatttctggaaggaaaggcacccantctgccaaggatcctccagtgatgcatataactgatttgaccacggcatcggctaagaaagccagagacttcttgcctttnctg

SEQ ID NO: 52372 - DNA, 267 bp, Glycine max
  Clone ID: 701141506H1
gctctctgcatccaaacccgtcaacctttgctcattatgccataaataaatcaattataacagattagtttgtaggtttacgaggtggagatttttagtgatcaactatttggcttgctcagctaaagaatcattcaaggatccagctgagcaagtacgaggaagatgggatctttcataggtcatatattgccagggaccttgtttcttctagttgggacatggcatatatggggctctgtgatgagatatgtgtcaaaccctaag

SEQ ID NO: 52373 - DNA, 270 bp, Glycine max
  unsure (1)..(270): unsure at all n locations; Clone ID: 701141507H1
gcaggtttggactcttctttggttgcatccatcacttctcgttacttnggccaacacaaaggcccgctgagcagtggggatcaaagttacattcattctgtgtaggccttgagggctcaccagatttgaaggctgcaaaagaggttgctgactatctaggcactgtccaccatgagtttaccttgcactgttcaggatggaatagatgccattgaagatgtnatctaccatattgaaacatatgatgtgactacaattagagcaagcaca

SEQ ID NO: 52374 - DNA, 267 bp, Glycine max
  unsure (1)..(267): unsure at all n locations; Clone ID: 701141508H1
ggggtcccagtcccgaacccgtcggctgtcggtggactgctcgagctgcttccgcggcgagagcgggtcgtcgcgtgccggtcgggggacggattgggaacngncccttcggggcctcttccccgggcgtcgaacagtcaactcagaactggtacggacaaggggaatccgactgtttaattaaaacaaagcattgcgatggtccctgcggatgttgacgcaatgtgatttctccccagtgctctgaatgtcaaagtgaagaaattc

SEQ ID NO: 52375 - DNA, 270 bp, Glycine max
  Clone ID: 701141509H1
ttttggaagcagagaccgaaatacttcgagatggcccgtacaaagcaaactgctcgtaagtcaactggaggaaaagctcccaggaagcagcttgcaaccaaggctgcacgtaagtctgcaccaacaactggtggtgtgaagaagcctcatcgttatcgccctggaactcttgctcttcgtgagattaggaaataccagaagagcactgagctcccaatcaggaagcttcctttccagaggttggttcgtgaaattgcccaggatttcaag

SEQ ID NO: 52376 - DNA, 271 bp, Glycine max
  unsure (1)..(271): unsure at all n locations; Clone ID: 701141510H1
ttcgcttcttctcttcttctctcgcattaccantatgcattaagtnacngcatttctagggttagggttttcgcttgctgcggaaaattcgaaatggaagaagattttgggtanagaaggaaggccaagatagcactcgtcgcaatcatggtactcgcctccgtcgccgtgtttgcgctgctcgttgccttcgcctactactgccacatcctcaanaaggtctcgaatcgtcgcaaaagcctgcaaaaaagttgaagatgccaaccttaac

SEQ ID NO: 52377 - DNA, 230 bp, Glycine max
  Clone ID: 701141511H1
atctgtgacgagcatcatggcctgcgagagcagtgctattgttggctatgtgtgtgcttccggccatggttgtggccattcgcccaggcaaagaaccctttttggcgtgaagggtcgcgttctactgtgacccttggccgtgctggttttgagacctcagcaaccacctacattgccggtgctgagattatgttgcaatgcaagagcagggttagcaacgaggttgtgta

SEQ ID NO: 52378 - DNA, 266 bp, Glycine max
  Clone ID: 701141512H1
accgacacagatctgtcttccgaagcaggaactaaatatggctgacttgttggaatggtcaaagcaagataagaaacgaatgcttcatgtcgtctaccgtgttggtgaccttgatcgcaccatcaaattttacacagaatgtttaggaatgaagcttttgaggcaaagagatatcccagaggagaaatatgctaatgcttttcttggatttggccctgaagaatcccattttgttgttgaattaacatataattatggggttacct

SEQ ID NO: 52379 - DNA, 264 bp, Glycine max
  unsure (1)..(264): unsure at all n locations; Clone ID: 701141513H1
aaatatggctgacttgttggaatggtcaaagcaagataangaacgaatgcttcatgtcgtctaccgtgttggtgaccttgatcgcaccatcaaattttacacagaatgtttaggaatgaagcttttgaggcaaagagatatcccagaggagaaatatgctaatgcttttcttggatttggccctgaagaatcccattttgttgttgaattaacatataattatggggttacctcgtatgacattggcgatggctttggacattt

SEQ ID NO: 52380 - DNA, 266 bp, Glycine max
  unsure (1)..(266): unsure at all n locations; Clone ID: 701141514H1
gaggtttggactcttctttggttgcatccatcncttctcgttacttggccaacacaaaggctgntgncgcagtggggatcaaagttacattcattctgtgtaggccttgagggctcaccagatttgaaggctgcaaaagaggttgctgactatctaggcactgtccaccatgagtttaccttcactgttcaggatggaatagatgccattgaagatgtnatctaccatattgaaacatatgatgtgactacaattagagcaagcac

SEQ ID NO: 52381 - DNA, 207 bp, Glycine max
  unsure (1)..(207): unsure at all n locations; Clone ID: 701141515H1
atctgatctgctgaaacacgccacactcttcttaccangggcctcctcgatcacttgtgggatgacaccgtcgccggtcctcgcccggagaacggccttggcaagctccgaaagcaccacaccttcgctttccgatctgcctccggcaagggtacgcatgcgcatgcccttgctgaacttaatttcccaaattcattttagttattc

SEQ ID NO: 52382 - DNA, 269 bp, Glycine max
  Clone ID: 701141516H1
taaaatcgccatctgtgaaacgagtcatcttaacatcttctgtgggctgcagttgcatataataaaaggcctaaaagtcctgaagttgtagttgatgaaacctggtggtctgatccagattactgtagggaattaaagctgtggtatttactttcaaagactttggctgaagatgctgcctggaaatttgccaaagaaaacgaccttgacttggttgttgttaacccagcaatggttgtagggcctcttttgcaagcagagcttaacac

SEQ ID NO: 52383 - DNA, 268 bp, Glycine max
  Clone ID: 701141518H1
actcagtgtaccattgctcacgcacttgagaagaccaaataccccgaatccgacatttactggaaaaaattggaagagagataccacttctcttgccaattcacagctgatctatttgccatgaaccacacagatttcattaacaagcagtaccttccaggagattgctggaagcaaggacactgttggacagtacgaatctcacacagccttcacccttcctggactctaccgcgttgtgcatggtattgatgtctttgatccaaaa

SEQ ID NO: 52384 - DNA, 266 bp, Glycine max
  unsure (1)..(266): unsure at all n locations; Clone ID: 701141519H1
gnggtgatcatngtttttaccctattcttatgatgggtgactcagancatgacaaaattcggcttaaaagtcgggaagaatgggtttccaaggggactagatcctgcaatatccaagttttttgtgcagctccaaattgttgttaatncacagctgagtagattagcaaaacaggatggaatgagtttgatgagatccgtccaaagaaaaggggggtcttcagtgactctgaagctgaactgaatgagcaactgcaagcatggaga

SEQ ID NO: 52385 - DNA, 263 bp, Glycine max
  Clone ID: 701141520H1
ttctgatccctcaaatccatttcttagttctttgcttttgctcagtgagcttccagttgtattcatggacttaccggagaagcttttctttgcagcatttctcattctttcagtggccattgatggaacgcaggcagacaccatggtcactggcactgtcttctgtgaccaatgcaaagacggacagagatcccttttcgattatcctattaatggtgcaaaagtaactctgtcctgtgctgacagtaatggacaaattacaa

SEQ ID NO: 52386 - DNA, 99 bp, Glycine max
  unsure (1)..(99): unsure at all n locations; Clone ID: 701141521H1
ctttgattttttatgnagaaaganaattcgaagcattggaatgatcatcagcncgaagaaagnannncgaagtgtggaaganaanctaggnnaagaaga

SEQ ID NO: 52387 - DNA, 167 bp, Glycine max
  unsure (1)..(167): unsure at all n locations; Clone ID: 701141522H1
gaaaanccaaagtggcttctcncctctggtcttttncntctctcttggntatgcttttgggctgagncnggcagtggttgcaaagtgcaantgccaagaancggcagtgncaagctcacnatgtttcaanattcaacagaagcncntttcctccanttnagctctna

SEQ ID NO: 52388 - DNA, 265 bp, Glycine max
  unsure (1)..(265): unsure at all n locations; Clone ID: 701141523H1
aaggcagcgactgccagggnaagggaagcatctttagctccaaatccaatggcggatacctcaagccgatcaagagacctcgacaagctccttctccgccctggcaatctcgtcggtcctaggttcgaacctggccctgagttgcgagatgaccttcaggccttcgccaaagtgttggtggttggggctggtggcttgggttgcgaattgttgaaggatttagccctctctggtttccgaaaccttgaggtcattgacatggatc

SEQ ID NO: 52389 - DNA, 269 bp, Glycine max
  unsure (1)..(269): unsure at all n locations; Clone ID: 701141524H1
cagactgtgaaactgcgaatggctcattaaatcagttatagtttgtntgatggtatctactactgcggataaccgtagtaattctagagctaatacgtgcaacaaaccccgacttctggaagggatgcatttattagataaaaggtcaacacaggctctgcctgttgctttgatgattcatgataactcgtcggntcgcacggcctttgtgccggcnacgcatcattcaaatttctgccctatcaactttcgatggtaggatagtggcc

SEQ ID NO: 52390 - DNA, 267 bp, Glycine max
  unsure (1)..(267): unsure at all n locations; Clone ID: 701141526H1
cgttgttacattacaatacaaccttcagctcttgttcacgaaacacgcgctttttcacagccttcgaagtgcaaagattctggctgngcagtcctaagtaagtcattgtagaagtcatggttctngagtccattttgtcgtcttcgaagtcaccatctttcaggaggcagtttgcaaagcatgaactgggcagttggtcgacactcttgaagaggcaccgcttcctcttatttgctcttgctctactaactgtcctctgtaccattt

SEQ ID NO: 52391 - DNA, 263 bp, Glycine max
  unsure (1)..(263): unsure at all n locations; Clone ID: 701141527H1
gtttatngtgaggagaatatgaagttgtttgtnttctttgttgctgnagtagttntggtaanatggccatgncatggngcaggctancaaaggttccctctccgaatgaaaantggctatggtgagcgttcttcggaggtaaaatgcgnaagttttaggcttgctgtggaagnananaanataaaaaantanaaaaacatnnctgaagantgngttgaagnaanaaaggactanattaatggngaacaattagatnagactct

SEQ ID NO: 52392 - DNA, 265 bp, Glycine max
  unsure (1)..(265): unsure at all n locations; Clone ID: 701141528H1
cagatcctnccatggcctccaccaaggaacgtgaaagagatcgtctacgtcgccaagctcgccgaacaanccgaacgctatgnagaaatggtggaagcaatgaagaatgtggcgaagtaaacgtggaattgacggtagaggngcggaaccttctgtcggtngggtacaagaacgtggtgggtgctcgtagggcttcgtggaggattctttcctcgattgaacagaaagaagaagctaaagggaacgatgtgagcgtgaagaggat

SEQ ID NO: 52393 - DNA, 267 bp, Glycine max
  unsure (1)..(267): unsure at all n locations; Clone ID: 701141529H1
gttgcgagggnactttgagatacctcttggcaaatcttcatgattggnaaacagaatacactgttccataccatgaacttccncaggatcgatcaacatgcactttttcagcttgaaaatgttgtaaaagccattcaaggaaattatgaaaattaccagttttttaaaatatttcagattttgcagaggtttgttattgttgacctgtgcaaatttctattttgatgttgccaaggatcgactttatgttggtggatcaacaagtta

SEQ ID NO: 52394 - DNA, 82 bp, Glycine max
  unsure (1)..(82): unsure at all n locations; Clone ID: 701141530H1
aatctancatagncggttccattttctgaatttctnngagcgaacttgcgcccagttctagggttccccagctgccatgtat

SEQ ID NO: 52395 - DNA, 84 bp, Glycine max
  unsure (1)..(84): unsure at all n locations; Clone ID: 701141531H1
ggacaatatgagaatttcaccggattaccagncaccaaaaactagggagtgcatattttcancnccnctggtctgngacnacat

SEQ ID NO: 52396 - DNA, 270 bp, Glycine max
  unsure (1)..(270): unsure at all n locations; Clone ID: 701141532H1
cagcacctcttggcttcttcttgaaccctagcctcttcgttgttgttccattgaatctcttccanattgaagcaancgccngcctcttcgtcgagttccttccgacgagttcgaccttcccggctggaacttccgaatcaaggactgccagcagggctttcgctccaacgtcggnaanaaagacattggtctcacttcgaagaaaccagggaagacgcaggtcatcaatcagttcttggtgaacaacagctggtaccttgtttgacttgg

SEQ ID NO: 52397 - DNA, 267 bp, Glycine max
  unsure (1)..(267): unsure at all n locations; Clone ID: 701141533H1
ctctctctctctcaaccataatagtcatgggtttgaaggaggattntnagcagtatgctgagaaagcaaagactttgccaccgactcaatcaaacgaagacttgcttatcctttatggattgtacaaacaggccaccgttggacctgtcaacaccagccgtcctggaatgttcaacatgagggacagagctaaatgggatgcatggaaggctgttgaagggaaatccaaggacgaagcaatgggtgattacatcttaaggtgaaacc

SEQ ID NO: 52398 - DNA, 255 bp, Glycine max
  unsure (1)..(255): unsure at all n locations; Clone ID: 701141534H1
cgagacgcctcacgagggtcaccaacggcacgtgcctttngngggccgaggccccctantgntggtcggcaaacggacggcgggcgcacgcgtcgcttntagcccggattctgacttagaggcgttcactcataatccaacgcacggtagcttcgcgccactggcttttcaaccaagcgcgatgaccaattgtgcgaatcaacggttcctctcgtactaggttgaattactattgcgacactgtcatcagtaggg

SEQ ID NO: 52399 - DNA, 265 bp, Glycine max
  Clone ID: 701141535H1
ctgtctcctcctcaatcttcattgtcctgttctttcccttggtgacaaaccaagactaacacacacagaacatagcttgtgttggtgaggtgagaagataaagaaagaatggcatttgcaggaacaacacagaagtgtatggcctgtgacaaaaccgtttatctggttgataagttgaccgcggataaccgagttttccacaaagcttgcttcacatgccatcactgcaaaggaaccctcaagctgagcaactacaactcttttg

SEQ ID NO: 52400 - DNA, 265 bp, Glycine max
  unsure (1)..(265): unsure at all n locations; Clone ID: 701141539H1
ctccatacctcaacgaagaggttaaagagacggcaacactttgctgtccgccttgaccgagcagagcttgcgtcttggccctcgattttnccctaaagtactctcagtcacaacagacacnnnnnnnnnnnnnnnnnnnnnnaatggcaccgaagcagaccaaggctgagaagaagatcgcttacgatgcgaantgtgcgacctaatggaggagtacggccagatcctcgttgtgaactccgataacgtgggatcgaaccagctc

SEQ ID NO: 52401 - DNA, 265 bp, Glycine max
  Clone ID: 701141540H1
cttgaggaagaaaatcaagagttctttaaatgttattatgcaaaaatggcatggaagcagaaaatgatgctactcagcatattttcggaagaacaaggggaaataacgggcttaacttcaagtgcaccactccctacctttgatggttcacacaaccctggcagtttcatcccaagccaactgtaatgttggcttaactacaatcccatcatcattccctacctttgatgggttacatagccctgaagttttatcacaacctaac

SEQ ID NO: 52402 - DNA, 264 bp, Glycine max
  unsure (1)..(264): unsure at all n locations; Clone ID: 701141542H1
cggcaaaccaatttgtnaatctgcaattatagtgcagtacattgatgaggtctggnatgataaagctccaatgcttgccctctgacccttatgagagagctcaagccagattctgggtagattacattgacaaaaaggtgtatgacacttggaggaaaatgtggctttctaaaggagaggagcatgaggcagggaagaaggagtttatctctatctttaagcagctagaagagacactgagtgacaaagcttattatggaagtg

SEQ ID NO: 52403 - DNA, 261 bp, Glycine max
  unsure (1)..(261): unsure at all n locations; Clone ID: 701141543H1
aacaatgaaggtttccattgccaagttccactcccttcccctatnttttttccttctcttggccttcaacacaaaacccctcctagcagcagaaccagagccagtggttgataagcaagggaaccctttggagccaggagtagggtactacgtgtggccactttgggctgatgaaggaggcctcacactaggccaaacaaggaacaagacatgccctctttatgttatccgtgacccttcattcattggcaccccagtttc

SEQ ID NO: 52404 - DNA, 259 bp, Glycine max
  Clone ID: 701141544H1
aaatttgaaggctaaaccagggtcagtggtgtcagtagatattgaaacagccacgcagttggacattgttgccgagtttgagatagacaaggaaacccttgacaaaattcctcaatccaacgaggaatacacgtgcagcaccagtggtggatctaaacaacgtggtgccttaggaccttttggtcttttggttttggcagatgaggggctttctgagtatactcctcagtatttttatgtcataaagggagcaatggaa

SEQ ID NO: 52405 - DNA, 274 bp, Glycine max
  unsure (1)..(274): unsure at all n locations; Clone ID: 701141547H1
cacttcgttgcttggtgatgtccctttctgtnctcttcactcttggtcttgcgaganaaagccatgccaganacgaagatttttgggcatggctgtntggccaaagactnccnattcncaagtttcattgcgagatccttgctnaaggctggnccnncaagtncttgaaatcgatgatnagcctatgcaaatttgaagaaacacagtaanccgaaaaacttcttgctataaagnaganttgcatccaggcaaaacaatgaaagtacaattcagc

SEQ ID NO: 52406 - DNA, 268 bp, Glycine max
  Clone ID: 701141548H1
cggcaaagtttcgccatgggatgcatctgggaccgacatctttgagatttaccgaagatactgtgacataaaattcaggacatgtatatattggtggggaagaagggtacaggcaagacagtgaccttcaaaaggctaaggtttcaagggaaggcagctctccaaattggttgagtctcgtgttactacaggggtaacaatttttgatgaactttcaatgctcatgtcacggttgaatttgagggcggacttttcagaattctcgagg

SEQ ID NO: 52407 - DNA, 262 bp, Glycine max
  unsure (1)..(262): unsure at all n locations; Clone ID: 701141549H1
gattttnctttctctagaataactatggaattcggaggctgttctttgatcttttttntctctgcttgatatcaatgctatttcttgtcagcttgatattgatcctctgaatccacttacaccatctaannattacagaaatcaacatcaaggcactatctgattagaatggtgctttagtttgttgaatggangccatgaaggtgaactagatctcacatcggtgggaaanaagaaaaggcacaccagaaaagtgaacaca

SEQ ID NO: 52408 - DNA, 266 bp, Glycine max
  unsure (1)..(266): unsure at all n locations; Clone ID: 701141550H1
ctgagttccaaacacagcataaacaaagcaaaatatgagtgccantcctccctttttaaatggaaacaaagctgaagacaccacaagaagaaaccaatagataacaaactagagatagagtgagagtgagagtgagagtgagagacatgtataggttcagcaacacagtgatgcgggttcttgaacttgttgcacacttttagcatccataccaataattggaccaggtctatggatggcaaggagcagcacaacctgtgaaaatt

SEQ ID NO: 52409 - DNA, 262 bp, Glycine max
  unsure (1)..(262): unsure at all n locations; Clone ID: 701141552H1
gcttgtcttgtttgtngntacagtnttggtannatatgaatgncatggcncagactaccagaagttccctctccaaatgaaaactnggtttggtgggcaatacagcaatnaggtggcatntgccagttggagncttggcgtggaagcaaacaacgtagtgcaagtggcaaactgtncctgcagcntgnggagagtacatagnctgactacgttctagcagaccaatatagatcagattccaaaanagttaaccaacnagctt

SEQ ID NO: 52410 - DNA, 197 bp, Glycine max
  unsure (1)..(197): unsure at all n locations; Clone ID: 701141553H1
caccctgagcaaaaggacccaaacttcaacaacantttgatagctaggtgtcccaatgccgagtcccccaacaccgttaatttggncgtgagaacccccgtgaagctcgacaacatgtattacatcaacctnttgaaccgccaaggagtgttcacttctgaccaggacnttccngggnagccccaaaaccaaggaat

SEQ ID NO: 52411 - DNA, 262 bp, Glycine max
  Clone ID: 701141554H1
agcagcagagcttgtatacgtcgccgcttcagcgtagcaacatgatcattcccgagaagaaccgtaaagagatctgcaaatacctcttccaagagggagtttgctttgcgaagaaggacttcaatctggcgaacacccggagattgatgtgtcgaatctgcaggtgataaagctgatgcagagcttcaaatccagagagtacgtgagggaaacatttgcgtggatgcactattactggttcctcaccaacgatggaattgag

SEQ ID NO: 52412 - DNA, 262 bp, Glycine max
  unsure (1)..(262): unsure at all n locations; Clone ID: 701141555H1
cacatactaagangcaacaattcttctacaatggatctcctccttctggaaaanaccctcataggtctcttcctcgctgcggtggtcgccatcgccgtctccaccctccgcggccggnaattcaagctcccaccgggcccactccccgtcccaatcttcggcaactggctccaagtcggccacgacctcaaccaccgcaacctgcaccgatttggccaaaaaattcggtnncatcttcctcctccgcatggggcagcgcaac

SEQ ID NO: 52413 - DNA, 263 bp, Glycine max
  Clone ID: 701141556H1
ttgtcatgtagttaatggagtccctgcctcaggcaactttcaccccattcggatgaattctggaaatgatatgatgatggaccacagcgctcctgatatggttcctgttataccaccaaatggtacaatgtcatctgtctcagaaatgcctgtgagtccgacatcagtagcatccagtggtcattttcccttcactgcatcagaaataccaggaatgggcgcagatacatcagctcttgatacagcatttacatctgatgtgg

SEQ ID NO: 52414 - DNA, 260 bp, Glycine max
  Clone ID: 701141557H1
tgaaactgagacccctcaaccaatttcattgcatataaaatatgagaacacatattgatgatagtgcatctgggaagaatcaccatcttccaatgctttggttttttgattctctctgaggctttgtgctattcctctatctgtggcaaccatgtggatcactgtgactaacaaggaggacaacagcagctatggaatgctgaaatataacaacctctctgctctaaagtatatggttttagtcagtgccctccgtgctt

SEQ ID NO: 52415 - DNA, 258 bp, Glycine max
  Clone ID: 701141559H1
aggagctgatgttgcagagagtgttgcccaattcgcaaggaggcgtcaggtggggtttgtgtgctcagtgggagtggctcagtggccaatgttacacttagacagccttctgctcctggtgctgtggtggcacttcatggaaggtttgaaattttgtccctaaccgggactttcctacctggccctgctcctccaggatccacaggactcaccgtgtatctggctggaggacaaggccaggtagtgggagggagtgtg

SEQ ID NO: 52416 - DNA, 86 bp, Glycine max
  Clone ID: 701141560H1
ttttctcaaataatataaactcgaaagcaacggctgagattggctttgagggttgacacgtcccttttatcttccacacaacatac

SEQ ID NO: 52417 - DNA, 263 bp, Glycine max
  unsure (1)..(263): unsure at all n locations; Clone ID: 701141562H1
cttggatgnncaggggatgggaattcctgttggtaaattggcnttgtacacagcactaggaaancgttagaccatcngcatgtttgcctattacgattgatgtggggacaaacaatgagaaattacnnaatgatgagttttacattgggcttanacaaaagagggcaactgggcaggaatattctgaacttttgcacgagttcatgactgctgtcaagcaaaactnacggagaaaaagttcttgttcagtttgaagattttgc

SEQ ID NO: 52418 - DNA, 264 bp, Glycine max
  unsure (1)..(264): unsure at all n locations; Clone ID: 701141563H1
cttgacgccattggccattganttaagtaagccgcatcctgcagggngaaggatatggtcctgttagcgaagtctacgtgccttcgagcgagggagttgaagcttacatttggttactggcaaaggcttatgttgttgtgaatgattcgtgctaccatcaactcgtcagccactggctaaacactcatggcggttgttgagccattcgtcatagcaacaaacaggcatctgagcgtggttcaccctatttacaaacttttgttt

SEQ ID NO: 52419 - DNA, 267 bp, Glycine max
  unsure (1)..(267): unsure at all n locations; Clone ID: 701141564H1
acccgaaccctaaccctagaagaaaganaaaaacccacaacacacaatgcagtactaccaactagggtttttgtactggctagtttgcaaactagggttttcttgatggcccttctgtgcctgctggctcttggtgcaaccattattccaatggcacaaggggaactgtcatgtgnccaagttgtgagtaacctgaccccatgcatctcctatgtgctatatggtggagccacggttcctggcacagtgctgcaatgggatcaggaa

SEQ ID NO: 52420 - DNA, 262 bp, Glycine max
  unsure (1)..(262): unsure at all n locations; Clone ID: 701141565H1
agaaattagggttcatatctcatttcctctgatttcatctcagatttcgccttcgttcgtatcnnnnnnnnnnnnnnnnnnnnnnnnnattgtgccggtgaaatcagtgatctacgcgctctcccctttccagcagaagataatgccgggtctctggaaggacttgcccacaaagattcaccacaaggtctccgagaattcgatcagcgccactctcttgcttggtcccctcgtcggaacctacacgtatgttcagaactac

SEQ ID NO: 52421 - DNA, 259 bp, Glycine max
  unsure (1)..(259): unsure at all n locations; Clone ID: 701141566H1
atttctatatcctgatttagngtgggacttccgtttgccgttggtgnaaagcatcaatgttagtggtcacaagtatggtcttgtctaccctgntgttggttgggttgtatggaggagcaaagatgacttgccagatgaacttgtttttcacataaattatcttgncatctgatcagcccactttcacattgaatttctccaaaggatctagtcaaattattgctcaatattatcaattgattcggcttggctttgaggg

SEQ ID NO: 52422 - DNA, 260 bp, Glycine max
  unsure (1)..(260): unsure at all n locations; Clone ID: 701141567H1
cnagtnacttgactctctctctattcttttccgccattcctaaccctacaagcttngtctccgtaaagaaaattccaaagctcaacagagaaaatgaggacagtgctttcgcgcttgatccattccacgcnntncaaaanagnaaaaatnccacggtagtgtcaatccagcgggagaaatctcttctttaaagttgaagaagcagagactgtaaatgtggctccanatntcttctgtannntgaagaaaatgggcctcca

SEQ ID NO: 52423 - DNA, 69 bp, Glycine max
  unsure (1)..(69): unsure at all n locations; Clone ID: 701141569H1
gtggtctgcaactatgagcaaggattatctaancatacttnctctccttctttccacagancatacnat

SEQ ID NO: 52424 - DNA, 246 bp, Glycine max
  unsure (1)..(246): unsure at all n locations; Clone ID: 701141570H1
ttcgagcnggncngtgcatcaatttangcttccaanttcaaagannagtgttaccaaaatgccatgacgttgccccctaatggctctgtgctgtatctggtgcttcgcgtgtgtctgtgtcaagtttaaaggcaganngagaanaagcgcagaagtaatcttgaacnccctgttttgttatgataaggctattccagaagaaataattgagaaacctgttgggttatcttggaagagaaagctatt

SEQ ID NO: 52425 - DNA, 232 bp, Glycine max
  unsure (1)..(232): unsure at all n locations; Clone ID: 701141571H1
ttggaatggtcaaancaagataagaaacgagacgnttnatgaccgtctancgtgttggtgaccttgatcgcaccatccaaattttacacagaatgtttaggaatgaagcttttgaggcaaagagatatcccagaggagaaatatgctaatgcttttcttggatttggccctgaagaatcccattttgttgttgaattaacatataattatggggttacctcgtatgacattg

SEQ ID NO: 52426 - DNA, 250 bp, Glycine max
  unsure (1)..(250): unsure at all n locations; Clone ID: 701141573H1
ctctgcttttgctagtgattgtcttcatacaggaactngaacaatgaagaatgaaaagggcaagggagcagcaagggcctcaaaagaatcactgaagcccgttgatgaccgaaaggttggaaagcggaaggcttccggtaagcctggganangtagtgcaccaaagaaggagaagaaggccaagaaagaccccaacaagcctaaaagaccacccagtgctttctttgtgttcttgaggagttcaggaaga

SEQ ID NO: 52427 - DNA, 258 bp, Glycine max
  unsure (1)..(258): unsure at all n locations; Clone ID: 701141574H1
ttttcttcgttgctacaattttngtagcatggcaatgccatgcgtacgatatgttccctctccgaatgaacactggctatggtgcccgtactccggaggtgacatgcgcaagttggaggcttgctgtggaagcacacaacatctttggctttgagaccattcctgaagagtgcgttgaagcaacaaaggaatacatccatgggcgaacaatatagatcagactccaaaacagttaaccaacaagcttacttttatgcc

SEQ ID NO: 52428 - DNA, 98 bp, Glycine max
  unsure (1)..(98): unsure at all n locations; Clone ID: 701141575H1
cttcgattaggggtttcgatnccagnttacaaattggtcgncatgaacgcaanctcatantgctgntcttccttctacgttccncagnatatatncat

SEQ ID NO: 52429 - DNA, 257 bp, Glycine max
  unsure (1)..(257): unsure at all n locations; Clone ID: 701141576H1
tggccgctggcagcagancgccgtcgccgaagacgacggcggggaagctgctgaaccggttcgtggagagcaaggcgtcggcggtgtcgctgcaggtgggggaacacgtgcagttggctacacacacaccacaacgaatcaccgtgggcatcccagatcatttgctgttaaggatgagatattctgcttgtttgagggggctctagacaatttgggcagcctgagacaacagtatggactggccaagtcagccaatg

SEQ ID NO: 52430 - DNA, 261 bp, Glycine max
  unsure (1)..(261): unsure at all n locations; Clone ID: 701141579H1
aattttccccgnccancgggaaanggtgganccggtggancttcncggcgaggagcagctcctgcgttgntgncagattccagnaatggtgaccggnggtngnggttnaacttcgacgggtttcagntatcttcggagcanacgganaagcaagtgaaaccccctncgcggactccatgactgtnatggggntctggtcaagaaganaatatttcggagtacgatgcagcagcaggtagangtgttgagggcttnactnaa

SEQ ID NO: 52431 - DNA, 119 bp, Glycine max
  unsure (1)..(119): unsure at all n locations; Clone ID: 701141580H1
ancantctccccaatccttttgtgtatgcaaaatgagaccatgcaaatncaaatgnaatgttgtctctgctgtcattcttcttgtgcanattccttnntgcttccgtccactgtgaaga

SEQ ID NO: 52432 - DNA, 263 bp, Glycine max
  unsure (1)..(263): unsure at all n locations; Clone ID: 701141581H1
accaccccaatttccaaccacaacacgganncntcaaccatcgcaaaacggaaaaaatggaaggcgagtgaagacacagagagagacanagagagacagagaaacnnnnnnnnnnnnnnnnnnnnnnnnnnnnnnnnnnnnnnnnnnnngcatggctgggttactggtcatgggcggtaggaggtggcggaggaaaagaagcggaggacgacggcntcatgcccaatncctgttttctgcagatcagcaaaagtacgttcaac

SEQ ID NO: 52433 - DNA, 257 bp, Glycine max
  unsure (1)..(257): unsure at all n locations; Clone ID: 701141582H1
agaaagantcccaggcgaggagaaagatggaggggaaggagcaggatgtgtcgttgggagcgaacaagttccccgagagacagccgattgggacggcggcgcagagccaagacgacggcaaggactaccaggagccggcgccggcgccgctggttgacccgacggagtttacgtcatggtcgttttacagagcagggatagcagagtttgtggccacttttctgtttctctacatcaccgtcttaaccgttatggga

SEQ ID NO: 52434 - DNA, 258 bp, Glycine max
  unsure (1)..(258): unsure at all n locations; Clone ID: 701141584H1
ctcanttctccgacgacacgccctcacctgcttcttncgtngactncccatccccgcngcngantttcnacggcatcgtcatggtgtcgcagccggacacccaggacgttttccanacgccgcngganaagancatcgcttcantcctccgacaacggaggcgtcgaacgttgtgccgttaatctcgccgtcgacgtagatgccgtgagtnaggggttcgtcaatttctgcgatggatcgaagttcgttgattcgggg

SEQ ID NO: 52435 - DNA, 257 bp, Glycine max
  unsure (1)..(257): unsure at all n locations; Clone ID: 701141586H1
cgntactctctctctctctgcgacaccccaatttccaaaaacacaaananacnaancattctgaactctgaaactcaaccttctttcttctcttctctctcgtgtntaactgttcagggcatcctagtttctctcagntagccaaaatggtagctgcaaatgagagggtcgtcnctgtgatcatggttggaggacccactaaaggtactagattccgaccattgtcattcaacgtacccaagccactttttccatta

SEQ ID NO: 52436 - DNA, 264 bp, Glycine max
  Clone ID: 701141588H1
cttagaacccccttcgcccttcggattccgccaccgccataacgccatagctgccggcgaacgatttccgggtttgttactttcacctcaaagttcctatctttaccctcgacatggcgaaggtaacaagctcaaaactgaacattggcaataattcacccagatcttgggcataggtggagctgaaagattgattgtggatgctgctgttgagcttgcatcccaaggccataaagttcatgtttttactgcacatgcatgata

SEQ ID NO: 52437 - DNA, 259 bp, Glycine max
  unsure (1)..(259): unsure at all n locations; Clone ID: 701141589H1
cgaggaagaagtcaaganaacattgcccactgctgccnctgtccacggcgatactgatcaaataccacagcagcaaacactggatgatgatgattcagaagtgatggatattgcaaagaacatcgacacnccagaaattgaacttggtggaaggtccactgttgttgaggaacctgaacaatccgaaacaaaggacaatgttggtgtggtgaaagangaacaagtagaccaccagtccagaanaattgagcntttcaaa

SEQ ID NO: 52438 - DNA, 256 bp, Glycine max
  unsure (1)..(256): unsure at all n locations; Clone ID: 701141590H1
ctcgccctcaccgtcgagaactttctcgagcgccgcctccagacccntgttttcaagtccggcatggccaagtccatccaccatgctagggttcttatcaagcanagacatatcagggttggtaggcaagtggtgaacatcccatctttcttggtaagggttgactcacagaagcacattgacttttcacttacaagtccccttggtggtggtcgccctggaagagtgaagagaagaaaccaaagggctgctgcta

SEQ ID NO: 52439 - DNA, 257 bp, Glycine max
  unsure (1)..(257): unsure at all n locations; Clone ID: 701141592H1
cctaccttttcccgtgtacgaacgaatccaatccaccaaatcggcggcnacgcctgccgctctgtctcgaaaccanagatctgcngcggaaccgccgtctccgactatctccgattgatcttccggtaaagtggaccggagatgccggttncccgcttccgccatttacttcctcaacctccgcggcgacgttctcatcaaccgcctctatcgcgacgatgtcgggggaaatatggtggatgcttttaggacgcata

SEQ ID NO: 52440 - DNA, 258 bp, Glycine max
  Clone ID: 701141594H1
cgcttccgaagcgacaagcagcacccactctctcttctcggaccttccaaacatggaacgcatcgttggcggcaagtaccagctcgggcgcaagatcggaagtggatccttcggcgaaatctacctcgcgacgcatattgataccttcgagatcgtcgccgtcaagatcgagaatagtaaaacaaaacatccccaactgctttacgaggtggcattcctaacataaaatggtccggcatagatggggaggataatgtg

SEQ ID NO: 52441 - DNA, 262 bp, Glycine max
  unsure (1)..(262): unsure at all n locations; Clone ID: 701141595H1
ccaccctacacctctaacctcgacactctccttgtcgcctcctngcgacggttccgtcgcatgcctactccatgctcttcctgccgtcgtcgcctctaagctcaaaaatccattcggttttntcaatgccgatacagatgagttattggctgaaccaaattgcttcgttcaagcgcacgctggacctgcttacgatgtcaagttttatggtgacggcgaagatgctctgttgctgagctgtggtgatgatggtcagattcga

SEQ ID NO: 52442 - DNA, 261 bp, Glycine max
  Clone ID: 701141596H1
cttcttccattttccgaaatcgaagcattagggttagggttttttccgatctgagaaattcgcggcccaatggcggaggaaccggagagcaccgtcaccaccggcgccgccgacgaatcgctgctcgataagatcaccgagaagcttcacggccacgattcttcgtcctcttcatctcccgactccgactccgactccgaaaaaaccgttacttcctccgttaaggataaggtttttcgcctcttcggaagggagagaccc

SEQ ID NO: 52443 - DNA, 267 bp, Glycine max
  unsure (1)..(267): unsure at all n locations; Clone ID: 701141601H1
tgganatggcagcggcangntgtcanangcttctggaattgngcangaagatcgncgctgttggcanaaactacgctgntcatgccaaaganctaggcaacgccgttcccaaggagccggtgttgtntctganaccgacgtcgtcttacttgagtaacggcggaaccattcaaatcccacncaacgaaggcttntctgnatcacgaagttgagctcgctgtggtcatctccaagaaancccgtgacgtctccgaatccctgcnatgg

SEQ ID NO: 52444 - DNA, 257 bp, Glycine max
  unsure (1)..(257): unsure at all n locations; Clone ID: 701141602H1
ctatctctctctctggcaaccaaatggcaacttctaccaccgtacctaanggtancctcncctccggttnccgtcaacggacgcttagcctctgtntacagtgaggtccaaaanangcgcgtggaccangngctaccctctcccctctgtcctcaagcatcccttcaccattctccacggtcctncaagctccgccggccggaaatcccagacgagatcgcgaagtgtntccgcatttgttcggacaaccttcccgc

SEQ ID NO: 52445 - DNA, 265 bp, Glycine max
  unsure (1)..(265): unsure at all n locations; Clone ID: 701141603H1
caaaaatctcccttctaaccttattcttcttctcgtccttcaccatcattgcgnatgcaattgttccncaaaacgaaanattcgaaatttgagaantcaggtgaactnggaccctacatcgttgagtacggtgcagattacagaatgataagcatcttcaactctccattccaagttgggttctacaacancaccccaaatgccttcactnctagcttgcgtgtagggctccaacgctcggagcagctatttcgttgggtttggg

SEQ ID NO: 52446 - DNA, 196 bp, Glycine max
  Clone ID: 701141604H1
agcggttgaccgtgtaatatatagattttaaacatcttttttcgcgtgcatttgttaattattaggatttaaggggcaactatgtcgaatgttcagagttttaactgaatgagatcctcttttctcatcgtaatttgtcagacactaccttgtagatatttatatactcttgtattccacaaagtttttttaagct

SEQ ID NO: 52447 - DNA, 253 bp, Glycine max
  Clone ID: 701141605H1
gcttgttttgtttgttgctacagttttggtagcatatgaatgccatggctcagactaccagaagttccctctccaaatgaaaactgggtttggtgggcaatacagcaatgaggtggcatgtgccagttggaggcttggcgtggaagcaaacaacgtagtcaagtggcaaactgttcctgcagcttgcggagagtacatagctgactacgttctaggagaccaatatagatcagattccaaaacagttaaccaa

SEQ ID NO: 52448 - DNA, 260 bp, Glycine max
  unsure (1)..(260): unsure at all n locations; Clone ID: 701141606H1
gatatctgcgttctagattttgtatgctccanaatgtcagctaaaaaccgtggttttctggagcctctagaaaatgtggtggtgtattcccgtgcctgtgctacctttaatgtccctctggaggtagccagaaataccaaaggagctttggcacatcctcaggagtttatgcatcatgtangcctatatatggccaaagaacgtggagccaagatagcaaatgaagtattgtttggtgcagcaggaaggtttaataaacc

SEQ ID NO: 52449 - DNA, 260 bp, Glycine max
  Clone ID: 701141607H1
tgggtctctgaagatcagatcctcatcttctaccatttcagatccgatcctcttgagattgggatcaacgccgagtccatgagcacgccagcgctttcagggggcacgggcctcttctctgggttcactcggttatgcaagggccttgcggtggtgcttgtttgcggtcacattgcggttcagtttttcccttcagctgttaactaccttgctcttattcccgccaggttggacagattaaagaaaaatacatataagag

SEQ ID NO: 52450 - DNA, 260 bp, Glycine max
  unsure (1)..(260): unsure at all n locations; Clone ID: 701141608H1
ggaagatacggtgcagtttcgatcttcctcaagtttggcaacttttatggttattattttggcatccgtggttggatgctatgcttatgatgttgtttccactgatcctttntgaagtttcatgtgagaaatcttagagatttcaaatnaaactttgtgtagaggagagatagaaaattaaaggttatatgtaatattgtttaatccaagttttttggttgtgttgatacaagaatacaatgtaatatactaagtgttgg

SEQ ID NO: 52451 - DNA, 257 bp, Glycine max
  unsure (1)..(257): unsure at all n locations; Clone ID: 701141609H1
gtttccacactgcataccttangtcttccgaattcgaagttaatttgcaagatggctaaggaaaaggctcagatcaacattgtggtggttggtcatgtggaccctgaggaggcaaccaccattaacgagctgaagaagcctgttgtggagaaagaagctccagggcatgccatatgagggcatgcacgtacggcctcggaggggaaccagaaaattatgttaacaaaataatctggaaccctaatgtatcagtgtca

SEQ ID NO: 52452 - DNA, 257 bp, Glycine max
  unsure (1)..(257): unsure at all n locations; Clone ID: 701141610H1
tccaactatatatcaaaacactctatggcgaggtgtgaatccgtttccacgacaatgcccctgnatgcaaaaatattaatagcacttatattccttgcattcgcaatcacggctaccacttcaactcgaatcnttgatgaaatagaaacaccagaagaacccaacagtgctgccgaatcccctgttgtctctccacttccacttgttgcagaatccccagttgcggaagtcaaaggagttgaccaacaacatcacac

SEQ ID NO: 52453 - DNA, 257 bp, Glycine max
  unsure (1)..(257): unsure at all n locations; Clone ID: 701141612H1
ggtgctcttagcttcttggtgcttggtgactggggaagaagaggtgcttacaaccaatcactagttgctttccagatgggaaaggttggagagaagcttgatatcgactttgtagtttccactggagacaacttctcatgacaatggactgactagtgaccatgacaacgcgtttcaagaatcattcactanaatttacacagcaaaaagcttgcaaaatcagtggtacagcgtgttaggcaaccacgactataggg

SEQ ID NO: 52454 - DNA, 243 bp, Glycine max
  unsure (1)..(243): unsure at all n locations; Clone ID: 701141614H1
aagccatgcatgtgtaagtatgacgctaattcagactgtangaactggcgaatggctcattacaatcagttatagtttgtttgatggtatctactactcggataaccgtagtaattctagagctaatacgtgcaacaaaccccgacttctggaagggatgcatttattagataaaaggtcaacacaggctctgcctgctgctttgatgattcatgataactcgtcggatcgcacggcctntgt

SEQ ID NO: 52455 - DNA, 255 bp, Glycine max
  unsure (1)..(255): unsure at all n locations; Clone ID: 701141615H1
ctcagcgatatgatgggcananncaggcaagtttcatagcaagctggttaactnnttcttacctcttcatcttggtcaacctcgtcataggcaccatagccatcacttctcgcttcagttccacgccnaaaaaccattaagcccaccacccccaaccatcagntccttcaatacccatcatcaccaacnccaactgnactcagcnccaacttcttccaaataccctcatgttgcagcgagtcagtccttcaacct

SEQ ID NO: 52456 - DNA, 262 bp, Glycine max
  Clone ID: 701141616H1
gggaatagtgctgcaatggcttcaagtcaggaggaggtgacccttttgggagctactggaagcccatttgtgtgcagggttcatattgccctcaagttgaagggagttcaatacaaatatgtcgaagaaaatttgaggaacaagagtgaactgcttctcaaatccaacccagttcacaagaaggttccagtgtttattcacaatgagaagcccatagcagagtctcttgtgattgttgaatacattgatgagacatggaaga

SEQ ID NO: 52457 - DNA, 260 bp, Glycine max
  Clone ID: 701141618H1
ggaaagggaggtaagaacaggaagaggggaaagaacgaggcggacgacgagaagcgagagctggtgttcaaggaggacgggcaggagtacgcgcaggtgctccggatgctgggtaacgggcggtgcgaggcgatgtgcatcgacgggacgaagaggctctgccacatccgcgggaagatgcacaagaaggtgtggatcgccgccggagacatcatcctggttggactcagggactaccaggacgacaaggctgacgtcat

SEQ ID NO: 52458 - DNA, 258 bp, Glycine max
  unsure (1)..(258): unsure at all n locations; Clone ID: 701141620H1
cttattctagttccatatatattgctgcattatttcataaaagtagcagagacnatcatgcagtcaatctgtaattggagatgcgtgtctaagtttgtcctgtttggctccaagcctcaactttgacaaatttatgaaagatttttttattgggtttataattctctacaaaatgaattcttgaattttctaccagttatgtgtggtatgcatgtctctgctggccattttttgtaaccaagaagtgatacgcctgta

SEQ ID NO: 52459 - DNA, 83 bp, Glycine max
  unsure (1)..(83): unsure at all n locations; Clone ID: 701141622H1
attntcctagcttagattccttcctccaatgggctcttgccgtttccaccaccaacatcaacgaaacttcacannnntnncat

SEQ ID NO: 52460 - DNA, 259 bp, Glycine max
  Clone ID: 701141623H1
gttggaacacaagagaggtctgattaatactagttttctgtaaaatcgcaaagaaacacacagttagcaccgtcaacctctgcaaccaccgattccaaccatgcttcccctttcccttctcaagactgcccaaggccaccccatgctggtggaactgaaaaatggggagacttataacgggcacttggttaattgtgatacatggatgaacatccatctccgagaagtcatttgtacctctaaagatggagatagattt

SEQ ID NO: 52461 - DNA, 257 bp, Glycine max
  unsure (1)..(257): unsure at all n locations; Clone ID: 701141624H1
aaaaactgaaagaaatactaaaggaatagttgacttcatgagacaaaaattttaatttttctttctttctatttcctcttcaatttaatttnaattttnttntctatcaaatcaaataaaagaaacgacatcagacatcgtgatccatgtttttnttccatctagnattttctcntccaaacggaccanaaactcaagtacaagtccaatgattcaaggacncgcgagcctggatctgaagagctgttagcctctgc

SEQ ID NO: 52462 - DNA, 257 bp, Glycine max
  unsure (1)..(257): unsure at all n locations; Clone ID: 701141625H1
ctagttgtttaaagtaaganagaagaaagaagcaaatggcaaacnttccagttgttgacatggggaagcttaacaccgaagagagacctgcagccatggagattataaaagatgcctgtgagaactggggtttctttgagttggtgaaccatgggatatccattgagcttatggacacagtggagaagctcacaaaagagcattacaagaagactatggagcaaaggttcaaagaaatggtgaccagcaaaggtctt

SEQ ID NO: 52463 - DNA, 122 bp, Glycine max
  unsure (1)..(122): unsure at all n locations; Clone ID: 701141626H1
gttcctgtgtggctgaagaagaaaacttttcttcctctctctttctctctgttcattacttcacgcatatattccttncnaattcattcaactttctctcatccaatccacacaacatacga

SEQ ID NO: 52464 - DNA, 257 bp, Glycine max
  unsure (1)..(257): unsure at all n locations; Clone ID: 701141628H1
ggaagtcgacgagaacgacttgaaagcngccggtgctgagctcttcgtcgacggtggtnggcgcggcattcgcatcaatggctgggtgatcgagactcggaggcactccatactcaactcttccacacaacataagaaaggaanagaattcgatnacgtctcatttaccagaaatggtttttgggganaacactttgattctaaaacacttgagcagtggcaccaacattcatttaatggcatttgatgctctacgt

SEQ ID NO: 52465 - DNA, 218 bp, Glycine max
  unsure (1)..(218): unsure at all n locations; Clone ID: 701141629H1
gttcaccgttcaagagccagtacnttgccgcttcctgtctcancgctggcntcggtctttttcttccagcttttgtgaggcccatgttggattcatatcaggcaaccaagcaacctccccagcctgctttaagtgacgtggttgcaggaatgactggtaaaaagtaaaggtgatttacttgacagatgcaagggcaaatttgctaagtttcttgtttg

SEQ ID NO: 52466 - DNA, 259 bp, Glycine max
  unsure (1)..(259): unsure at all n locations; Clone ID: 701141630H1
cacttttcnagaatcgtaagctatgggaaagtcttacccaactgtgagtgctgattaccagaaggccgttgagaaggcgaagaagaagctcagaggcttcatcgctgagaagagatgcgctcctctaatgctccgtttggcatggcactctgctggaacctttgacaagggcacgaagaccggtggacccttcggaaccatcaagcaccctgccgaactggctcacagcgctaacaacggtcttgacatcgctgttagg

SEQ ID NO: 52467 - DNA, 259 bp, Glycine max
  unsure (1)..(259): unsure at all n locations; Clone ID: 701141632H1
gtatccttatagattggctgcaatattaccctttttcatttttgaagtatcgtttgaaattgaagtacaatggcactttccttcagggaagaaagagatacctttggagccattcaagttccctccgagaaattatggggagcacaaactcaaagatcgttgcagaacttcgatatcggtgggccccgcgaacgcatgcccgaacccatcattcgcgcctttggntcttgaagaaatgcgctgctaaggtgaacatgga

SEQ ID NO: 52468 - DNA, 140 bp, Glycine max
  unsure (1)..(140): unsure at all n locations; Clone ID: 701141633H1
gnaatttggtagtggcatggcacttgtgttgttgtacatatatcgaatggtcttggaagtgcgtgcactcatattcgcattcaagtttctacgagcttntgttatcaacgataattgaattttcaattttcaagtttatt

SEQ ID NO: 52469 - DNA, 260 bp, Glycine max
  unsure (1)..(260): unsure at all n locations; Clone ID: 701141634H1
ctagtcacagacaccgacacagatctgtcntccgaagcaggaactaaatatggctgacttgttggaatggtcaaagcaagataagaaacgaatgcttcatgtcgtctaccgtgttggtgaccttgatcgcaccatcaaattttacacagaatgtttaggaatgaagcttttgaggcaaagagatatcccagaggagaaatatgctaatgcttttcttggatttggccctgaagaatcccattttgttgttgaattaacat

SEQ ID NO: 52470 - DNA, 254 bp, Glycine max
  unsure (1)..(254): unsure at all n locations; Clone ID: 701141637H1
ggctaatcaaacacttttccatgacctttgctgctnttgattttgatcacaacaacacaacgccaacgcngntctctgcttttgaaaatcagatattatgaagtcaccttctcgagctttttctggtgctgatacaaagagtagaaaatcatgtctttatgccatcttcccagcagcttctttaatttgtgctgttttatttttcatgacctcgtcctccacacaacatactctnncaaagnnncnnnnncgng

SEQ ID NO: 52471 - DNA, 257 bp, Glycine max
  Clone ID: 701141638H1
gtttggccaattaggtccagaataagttctcttctctgttctaaggcacctttagttggttcatacatctatgactcatgtgggtgcttacgcttttctgctccaaccagctcctccataacaaggcattggccaaaaattatggattgggtacaaatggaccgttgccgtgcagcagcattgttaccttcgatcaaagagaaacaaccagaaagtcatagtaatcgtgtcagactcggtcaagaaatcaaaggtct

SEQ ID NO: 52472 - DNA, 257 bp, Glycine max
  unsure (1)..(257): unsure at all n locations; Clone ID: 701141639H1
ctgggtagctgcagggaagcagccagatcttgagaagaatgtggntgttggagggtatggttatccagctttagtggcccttaaccttaagaaagctgtttatgctcctctcaagagtgcttttgaacttgaccaaattatagaatttgtgaaagaagctgnacgtggaggcaaagggaatttgcccattgaaggaactccaacaattgtaaagacagaaccatgggatggaaaagatggagaaataattgaggagg

SEQ ID NO: 52473 - DNA, 256 bp, Glycine max
  Clone ID: 701141640H1
ctcgtccttacattacaagacaaattcacagtctaaacaagaaattcagaaaattaagctttgggtgaatggagaacctaatttctttggtgaacaaaatccagagggcttgcaccgctttgggtgaccacggcgaagaagtgccttacccactctctgggactctctccccgctatcgccgtcgtcggtggccagagctctggaaagtcctcagtattggaaagtattgttggcaaggatttcttacctcgtgga

SEQ ID NO: 52474 - DNA, 257 bp, Glycine max
  unsure (1)..(257): unsure at all n locations; Clone ID: 701141641H1
gcgcggcgctgaggcctccctcaatcacaggcgcaaacaccaaacagctcccgccgacggcgctaaaggcgttaaggtancaaacggagccatggggaagccgtcctcttccaagcactcctgcggcgcgtcgttcatgaaatggaccgtggctgacgctgtccacgtggtgacgcaccattggatgccgtgcttgttcgcattggggcttctcttcttcatggccgtggagtacacgcttctcatggtgccgccgt

SEQ ID NO: 52475 - DNA, 199 bp, Glycine max
  unsure (1)..(199): unsure at all n locations; Clone ID: 701141644H1
ccaattcccaattcgaaacccttattcctttcaaagaaccaaattgagtgatcgtnatggcaccaaaggcagagaagaagccagcggagaagaagcccgcggaggagaagaagtcgacggtgggagacaaggctccggcggagaagaagccaaaggccggaaagaagcttccgaaggagggaggcgccggcggagaagg

SEQ ID NO: 52476 - DNA, 255 bp, Glycine max
  unsure (1)..(255): unsure at all n locations; Clone ID: 701141645H1
atggcgcgtacaaagcaaactgctcgcaagtccaccggcggcaaggctccccggaagcagctggcgacgaaggccgctcggaagtctgctccggcgaccggcggagtgaagaagccgcacaggttcaggcctggaacagtggccctgagggagatcagaaagtaccagaagagcacggagcttctnatccgaaagcttccgtttcagcgtttggttcgtgaaatcgctcaggatttcaaaacggatctgaggttt

SEQ ID NO: 52477 - DNA, 260 bp, Glycine max
  unsure (1)..(260): unsure at all n locations; Clone ID: 701141646H1
gctccacgnttcttcactctaanacngtnncgactcgttcgatatcaaccgagttgactcagntctctaaggaagttgcatgagggcgagccctggtacagnggtaaagttgtgccttggtgacttgttggtcatgggttcgaatccggaaacagcctctttgcatatgcaaggtacctgtataatatgcgaagagacagaaagaagggcagtaagaatcctccaggggagtcttctaaatcctcaatcatcagaaaaag

SEQ ID NO: 52478 - DNA, 256 bp, Glycine max
  Clone ID: 701141647H1
aatgaccctctttactggtagttcaagagtggcagataaattggctgttgatttgaaaggtcgcgttaaattagaagatgctggatttgactggaaaatactgggccctgatgtccatcaggaagattacatagcgtgggtctgtgatcaggatgcatatgcatgcagtggtcagaaatgctcagcacaatcattgttatttatgcatgagaactggtctaaaacttcctgctatctaagttgaaagatcttgctg

SEQ ID NO: 52479 - DNA, 258 bp, Glycine max
  unsure (1)..(258): unsure at all n locations; Clone ID: 701141648H1
tacatggaagcaagaccattggaggaaggtcttgccgaggccattgacgatggcaagattggaccaagggatgaccccaagattcgctccaagatcttgtcagaacagtttggttgggacaaggatctcgccaagaaaatctggtgctttggccctgagacccttggacccaacatggtggttgatatgtgtaagggagtccagtatttgaatgaaatcaaggattctgtggttgctggattccagtgggcatnaaaa

SEQ ID NO: 52480 - DNA, 258 bp, Glycine max
  unsure (1)..(258): unsure at all n locations; Clone ID: 701141651H1
atttgtttgcgttttttgcanagaagaattaacangtatatagcaagcatggcagtcacactctacgaccttagctctgcntctgggttgaagaagcttgatgagtaccttctcccacgcagctacatnaaggggtaccaaggctacaaaggatgatcttactgtttatgcagctttgccaactggtccatcagatgaatatggaaatgtttccaggtggtacaagcacattgatgctttgttgagaatctcggtgtt

SEQ ID NO: 52481 - DNA, 255 bp, Glycine max
  unsure (1)..(255): unsure at all n locations; Clone ID: 701141653H1
ctccattatccattttattngttcctgctataattttttttgggtttcaaacgggattcttggcaaagaagcgacatttggtgttcagggacgatttttaaaaccctgaaactccactactttggaggcantctcaaatcgaaggttttgcttctgcactgcatcttgctnaaccaaggcgtgaagcttcaaaacattgagtaccaacctggttccactcttacaagttattagtttatgcaaatataactcaac

SEQ ID NO: 52482 - DNA, 257 bp, Glycine max
  unsure (1)..(257): unsure at all n locations; Clone ID: 701141654H1
cgaatacttgcactattattatgaattccatgccagttccttctncctttgttgataaagtcctttaaaacatttccatcgttcaaatgctgnagcaagagctcagatgagaagggaagtgaagatgtgaaggacacattatctggggtggtggacgagcaagttgaagagttcttgagtagaaaagagaacaaggttttgctggatggcttagagaaggcgtcgcagagggttgagatggctaagagagaacttgc

SEQ ID NO: 52483 - DNA, 255 bp, Glycine max
  unsure (1)..(255): unsure at all n locations; Clone ID: 701141655H1
aaaaaatgaccttaaattacaacattgccctcgccttctctgcggtgctcacnctgctcctctttcccctactgaccgtaggggagctcgtggaggagcagccactagtcctcaagtanccacaacggccagctcgnaagggccgcatcaccgtcaatctcatctggtacggcaccttcaccccgatccaacggtccataatcgaggacttcataaactcgttaagcagcgcgccaaacgcgcctntcccctcga

SEQ ID NO: 52484 - DNA, 257 bp, Glycine max
  unsure (1)..(257): unsure at all n locations; Clone ID: 701141656H1
cacacacacacaccacatcacgaggcagttcctccgctttgggcgacggaggctgcaacagtctncattctcaactacactacacgacgccgctttactttttccaaacctgtcaagctgtactattactatagtttcattncatggagacggaatcacatgaagatttacagcacccgtcggtttcttcgaatgacacgcacagtgatgatgcgtcgaaccacagagacgctgagcaaaagcaagatgtttcgagg

SEQ ID NO: 52485 - DNA, 252 bp, Glycine max
  Clone ID: 701141657H1
caagccccactcaaccaccacacctctcctcgttcacgctacccctttctgctcttcttctacctttcaagttttaaaagtataaagatggcagagacattcctatttacctcagagtcggtgaacgagggacaccctgacaagctctgcgaccaaatctccgatgctgtcctcgacgcttgcctcgagcaggacccagacagcaaagttgcctgcgaaacatgcaccaaaaccaacttggtcatggtcttc

SEQ ID NO: 52486 - DNA, 249 bp, Glycine max
  unsure (1)..(249): unsure at all n locations; Clone ID: 701141658H1
agagtttgcatcttttgccaccatggcttatctttcaaatcaccatgacccanctctacaagttntttccacaaancntngaacangagccgctcgagcngttttttttanacaataaacgaagtgtattattnagtattgagtttgttcctccatcggcgaaattagggttngctcacttgtattcaatttcccaaattgcaccctggcaccatccttgaatcctcccaattgacacgccttttggga

SEQ ID NO: 52487 - DNA, 249 bp, Glycine max
  Clone ID: 701141659H1
ccgtgctttccctttatgctagtggccgtacaactggtattgttctggactctggagatggtgtcagtcacacggtgcctatctatgaaggttatgccctcccacatgcaatcctgcgtttagaccttgcagggcgtgatctcactgatgccctgatgaaaatcttgactgagcgtggttactctttcaccacatctgcggaggggaaattgtgagggacatgaaggagaaactggcctacattgctct

SEQ ID NO: 52488 - DNA, 118 bp, Glycine max
  unsure (1)..(118): unsure at all n locations; Clone ID: 701141660H1
ggggccatngacttgagcatattcagtgcgtcgtaaagcaaaaagatactaatggctaaagtcatgtttggtttggtctgcagcttcctcgtattatgctgtttcacaatcaacacna

SEQ ID NO: 52489 - DNA, 255 bp, Glycine max
  Clone ID: 701141662H1
ggatgcttatgtgcaaccatcattggtaattgtgtattttggtggcaatgattctattgatcctcacccatctggccttggtcctcatgtaccccttgaagaatatgttgaaaacatgaggaaaattgctaatcatcttaagagcctctcggaccatattcgcattatatttctcacttctcctccgatcaatgaagaactaatccgcaaaaagctcagtgcaacgcaatcaggaagaaccaatgaatcctgtgg

SEQ ID NO: 52490 - DNA, 256 bp, Glycine max
  unsure (1)..(256): unsure at all n locations; Clone ID: 701141664H1
ctcaattgttgcgtgactcaaagaaacaaattgcgctcagccttactgaattgcagaaaaatcccctgaactacactcaggtgtctgtcttggcanatgacattctaaagaatgtggagtatgacgcattaaggattgttttcaacaaatttcattctgttgtacaatttttgccaacagttgcaactgtactgtctcctgaggttattgagagagaggcgaatcaggaggaaagctggggaattggattcatatg

SEQ ID NO: 52491 - DNA, 257 bp, Glycine max
  Clone ID: 701141665H1
ctagagcaagatcaggctgctgttgagtctcacaagcgagctgcagctgcaacagcagctggcaagttcaaagaagaaatcattccagtttctacaaagtttgtggaccctaaaactggagtggagaagaaaattattgtttctgtcgatgatggtatccggccaaacacaaatttagcagatttggcaaagctgaagcctgcattccagaaagatggaaccacgacagcagggaatgctagccaaattagtgatgg

SEQ ID NO: 52492 - DNA, 259 bp, Glycine max
  unsure (1)..(259): unsure at all n locations; Clone ID: 701141666H1
gcgacattnccacncttgagcaagagnttgcacgtctgtgggnaaagatgagacgtcacaagattgctaaagangacagancctaaggctagtgactgaagctttacgaaagatgaaggggaagattccagagattgtgggctctcacatctcatctcgggttcttcagacttgtntcaagcattgttcacaagctgaaagagatgcagtatttgaagagcttcggccacattttctaactctagcattcagcggctta

SEQ ID NO: 52493 - DNA, 254 bp, Glycine max
  unsure (1)..(254): unsure at all n locations; Clone ID: 701141667H1
aaatgantaggtgtgtatcttgtggtagcgggtctgcgctgattcacaataagaatttgttgatatcaccaattcataatgcattaaaggtgaggggcaacaatagaagttgtggcttgcgtgttcaggtttctatggtggactcttcctccgctgatttcaccagacgcatcgaacganccttggtcaatttctaagcaaccaaggccaatcgtgtgttcgtcttgcgactcaaaagggcatattgaatgtaa

SEQ ID NO: 52494 - DNA, 254 bp, Glycine max
  unsure (1)..(254): unsure at all n locations; Clone ID: 701141668H1
cgaacatagacatcgaagggatcttgaagcagcagcagccttatgatgggcgcgttccgaagacgaagatagtgtgtactttgggccctgcttctcgatccgtagaaatgaccgagaagcttctgagggcagggatgaacgttgctcgtttcaatttctctcatggcacccacgactatcaccaggaaaccctcaacaatctcaagactgccatgcacaacactggcatactctgtgccgtcatgcttgacana

SEQ ID NO: 52495 - DNA, 255 bp, Glycine max
  unsure (1)..(255): unsure at all n locations; Clone ID: 701141671H1
agtgaatgaaatgggggacaagcaccagcagcnccaggaagacagcaaccgatttcacctccgaggacgaaggcaccgaagattaccgccgcggcacctaccacgccgtccgaatcggcgacaccttcaacgccggtcgctacgncgttcagagtaaactcggttggggccatttctccactgtctggctcgcttgggacaccaaacattctagatacgtggctttgaaagttcagaagagtgctcagcactaca

SEQ ID NO: 52496 - DNA, 254 bp, Glycine max
  Clone ID: 701141672H1
caacagcaacatcaatggctactaccaccgccaacaaagacgaaaccattagcaccattgcatcttcttcttctccagtcttcatatccacagagaccttatgcaccatcctcacccatcacactctgatgaaccacttccaatctactctccccaaagcctcaaccattctccaaaccccaattcgccaacaccactctctctctccttcctcctccctcctcctcatgccctcttggtcctcttcctcttct

SEQ ID NO: 52497 - DNA, 251 bp, Glycine max
  unsure (1)..(251): unsure at all n locations; Clone ID: 701141673H1
cacatcctcatgngtctaattctaccttgcttgtatttgtagcgccattactccttgctgtgtaaatggcacatgttgatgttattcgattacagtttcagccctttcggttctcctcttcctctttcttcaccccctcacctttctctgctaagatcctattctctcctctcgcctattcttcttctaggccagcgccaccagctactcttgctttcccccccagaaagcatttgctttctttcaaggta

SEQ ID NO: 52498 - DNA, 250 bp, Glycine max
  Clone ID: 701141676H1
cgacaccaagtcaaacaggtgatttgttcactttgtgggactgaacaagaggttcagcaaaactgtataaattgtggtgtttgtatgggcaagtacttctgtggaacatgcaagctttttgatgatgatatatctaagcagcagtaccattgcagtggctgtggaatttgcagaactggaggaagcgaaaatttcttccattggctacaagtgtggttgttgctactcaactcttctgaaaaacagtcac

SEQ ID NO: 52499 - DNA, 116 bp, Glycine max
  unsure (1)..(116): unsure at all n locations; Clone ID: 701141677H1
aaacaaacnaactacccanngcatggcggnntctgttgtagtgnactacctctctgtctgtgtgtttcaactatggctatcatcgtcgtccatccatntccgcnncnctnttgtna

SEQ ID NO: 52500 - DNA, 253 bp, Glycine max
  unsure (1)..(253): unsure at all n locations; Clone ID: 701141678H1
ggaaccccttggtttggtaggcacaaattatggttgcatgaacatggcaggtttcgcggcaaacatcggcttcaacatctcgtcccactttccctgtcgcgttttttcaattcaccggagtatttggaagtttcagattgtctgcttgaagagaagagagtatagttcttctgttcctattaggtacatttccagcacatcctnncagggngnaaatacttganactgcactgccagtgaaaagccttggata

SEQ ID NO: 52501 - DNA, 252 bp, Glycine max
  unsure (1)..(252): unsure at all n locations; Clone ID: 701141679H1
tctcttcacactccacacacacncacatacgcanctctaccttgantttgagattgaggaatataagaaaatgaanntgggtaaagggatgatttttattgttgctctggtggtcatttgccttggtgggaaatgggtggaagcgcaggtgcaccatgtggtcggagcagaccgtggttgggatcaaacctcagacctcgtttcctgggctgcaggcagggtcttcagggttggagaccaaatttggcttac

SEQ ID NO: 52502 - DNA, 255 bp, Glycine max
  Clone ID: 701141680H1
ctactctactgcttcaccttctgctctagaaaattcagtggtgatacatggcttcggctactctctctgtagccaaaccagcccttcaggcaaatgggaaaggcttctctgaattctctggcctccgcagctcatcaggcttccttcccttttctagaaaatcttcagaggatttccattctgtcattgccttccagacctatgcagttggaagcagtggaggatacaagaagggtgtgacagaagcaaaactga

SEQ ID NO: 52503 - DNA, 252 bp, Glycine max
  unsure (1)..(252): unsure at all n locations; Clone ID: 701141681H1
ctagggtttatacaattntcgatggcttcttcagatgttgagtacngttgctttgtcggtgggctcgcttgggccactgacgaccaagctctcgagagagccttctctcagtacggcgaaatcgttgaaacgaagattatcaacgatcgtgagactggaagatccaggggttttggatttgtgaccttcgcctcggagcagtccatgaaagacgccatcgaagggatgaacggccaaaaccttgacggccgt

SEQ ID NO: 52504 - DNA, 252 bp, Glycine max
  unsure (1)..(252): unsure at all n locations; Clone ID: 701141682H1
agaagtagttccgattccgaagatgaagaccgaatcgcgttcgaaagaagaaacaaaaacgtatcaggnatggttcgatttggcagattcagatggagatggacgaatctctggaaacgatgccacaaatttcttcgctctctccaacttgtcgcgctctcaactgaagcaactctgggctctagccgatgtcaaacgacaagggtttttgggcttcacggagtttgttactgcaatgcagttggtttcgct

SEQ ID NO: 52505 - DNA, 253 bp, Glycine max
  unsure (1)..(253): unsure at all n locations; Clone ID: 701141683H1
cncatcctnatgtgtctaattctaccttgcttgtatttgtagcgctattactccttgctgtgtaaatggcacatgttgatgttattcgattacagtttcagccctttcggttctcctnttcctctttcttcaccccctcacctttctctgctaagatcctattctctcctctcgcctattcttcttctaggccagcgccaccagctactcttgctttcccccccagaaagcatttgctttctttcaaggtatc

SEQ ID NO: 52506 - DNA, 252 bp, Glycine max
  unsure (1)..(252): unsure at all n locations; Clone ID: 701141684H1
agaacacgcaaacaccgatcaattaattttctttatgctagatggngagtgcatcagagttcgacccagcgcttgcgtttcccacaaattccctgatactacgtactccttataccgaaagggatgcagcactttatgccctaagcgtaggggtgtgtttgtcggacgctgttgacgctgatgagcttaaatatgtttaccatgaaaatggtcaggagtctatcaaggtcttgcctacgttttctactctac

SEQ ID NO: 52507 - DNA, 252 bp, Glycine max
  unsure (1)..(252): unsure at all n locations; Clone ID: 701141685H1
aatactgntgggatagagcctgaagatgttgcaaagcgtcttatggactatggcttccatagtccgacaatgtcatttcctgtgcccggcacactcatgattgaaccaactgaaagtgancagcaagtccgagttagacaggttttgtgatgctcttatttccattcgacangaaattncctgagattgagaaaggaaaggctgacattaacaacaatgttctaaagtgtgctcctcatccaccaccagtgc

SEQ ID NO: 52508 - DNA, 254 bp, Glycine max
  unsure (1)..(254): unsure at all n locations; Clone ID: 701141686H1
atgcacttcaatttcagaaccaaaaacttcagactgagatattggcactgaaaagcagagaaccaactgaatccatcaacctcaacaaagaaactgagggatccagcagcaatagaagtgagaacagctcagagattaagttggatatctcaagaacaccagctattgatagtcctctatccactcagcagaacaacgnccaacagaacactctttccatcttctgctagaccaacaggagtggctcagctttt

SEQ ID NO: 52509 - DNA, 250 bp, Glycine max
  unsure (1)..(250): unsure at all n locations; Clone ID: 701141688H1
aggcctgctcttgctttgcttcctcttctatttgctttctngttagctgccactacggaatcaagaaaagatccaggggaatattngaaaatgatcatgaaagatcaggaaatgccagaaggacttcaaggtcttgtttcatttcaatctgaaaataaccctaagactcnagagcagcttggtaaaggttccaaaaaccattgtgaagagtctctagttacaaatacacaagttaacagtgacttcgaac

SEQ ID NO: 52510 - DNA, 246 bp, Glycine max
  unsure (1)..(246): unsure at all n locations; Clone ID: 701141689H1
cgctatagaaaatgttcaaaaaattttcaggtgaagatgtatctgcacagaaccaagtgaaggcatctgttcaacgaaaaatacggcaaagtattgctnaagagtatccgggtcttgaacctgtgttggatgatatacttcccaagaagtcccctctaatagttgctaaatgtcagaaccatctcaatctggttcttgtgaacaacgtgccactgtttttcagtgtccgtgatggaccatacatgc

SEQ ID NO: 52511 - DNA, 245 bp, Glycine max
  unsure (1)..(245): unsure at all n locations; Clone ID: 701141690H1
ccaatattacaggaatggtttgaccgcgttgactcggagaaaagtggaagcataacagcggtgcagctaaagacagctcttgctgtggncaacctggaatttccgctctcagtggttcagcaaatgatcaggatgtacgatttcgaccggaatggtactatgagctttcaagaatttgtttcactcaacaacttccttcttaaggttcaacatgcatttctgatctagagaggggtcgtggtttt

SEQ ID NO: 52512 - DNA, 247 bp, Glycine max
  unsure (1)..(247): unsure at all n locations; Clone ID: 701141693H1
ttgcttttcgggtgtgtttttattttttattttctcttcctttctctcttggtggggtttccattgagctgtgataanacttgtgtgttcctccttctgctacctcagtctatccaacgttttgcagtggccaaaaccttaaaacccttttatttttaaggtttcctctgtaggtccttcttgctgttcgctcagactctcgcacttgttgcaaggaagcccttgtttctcacaactacaagntncg

SEQ ID NO: 52513 - DNA, 241 bp, Glycine max
  unsure (1)..(241): unsure at all n locations; Clone ID: 701141694H1
ctttcagaagatgttgaacaagttgtggacataagtggcaaccccattttcccangtggcacatattacattatgccatcaacttggggcgctgccggtggtggattgaaactaggccggacaggaaactcaaactgcccagttactgttttgcaagattactcagaaatcttccgtggcacaccagtcaaattcagcatacctgggataagccctggaatcatctttacaggtactccac

SEQ ID NO: 52514 - DNA, 246 bp, Glycine max
  unsure (1)..(246): unsure at all n locations; Clone ID: 701141696H1
ggtagccatagcatagcagagatcgacataacatagccagcaacatncaatatcaccgacagatcaacaatttcgggaatccgctggctatgactgcagttgtggtcgtcccattgggccttctcttcttcgcttccggcctcatcgttaacctcattcaggcaatatgctacgtggttgtgcggccggtgtcaaagnatttgtaccggcggatgaacagggtggtggctgaactgctgtggctgg

SEQ ID NO: 52515 - DNA, 243 bp, Glycine max
  unsure (1)..(243): unsure at all n locations; Clone ID: 701141701H1
ttcattgaccgccattgaagctttgcttcttctatctctcactcataacaaaattccccacacacattcttcattttctcattctctccaatttcaacactgttacggttcataattcttccaattaaacaaaatttgaggtgtgtacggttcaattggaccttctacgctgcgttttgttcgctcaatggaccaagctccgggaggattgcgcggatcgtgcatgacggcgcaanctcgatc

SEQ ID NO: 52516 - DNA, 242 bp, Glycine max
  unsure (1)..(242): unsure at all n locations; Clone ID: 701141702H1
tgttatatggcggtagcaaggaggcagctgcttctgttagcaaggatgcagaagttatgttgaaacttgggancactgaagacaaacgtgagcaatatcgattgatgagagatgcaatggagaaacgattcattcgagttacacggggctcaatagttggangggtacgtcttggaatgttcactgctgcattttatggcatacgaaatctgctcgctgagaagagaggtgttcatgatgtt

SEQ ID NO: 52517 - DNA, 240 bp, Glycine max
  unsure (1)..(240): unsure at all n locations; Clone ID: 701141704H1
ctcagactaccagaagttccctctccaaatgaaaactgggtttggtgggcaatacagcaatgaggtggcatgtgccagttggaggcttggcgtggaagcaaacaacgtagttcaagtggcaaactttcctgcagcngcggagagtacatagctgactacgttctaggagaccaatatagatnagattccaaaacagttaaccaacaagcttatttctatgctaaatccctcaaactcaca

SEQ ID NO: 52518 - DNA, 241 bp, Glycine max
  unsure (1)..(241): unsure at all n locations; Clone ID: 701141705H1
atcttgttgtttggagcgatccgagaaaaactctgtaaacatgttggttncaccagngacctccttacaggtgatgagcttctctctgactccttccgttacaaggaaattgagaatggaatgctggggaagttgaggggaagtgggttgttaaaggagcagttgatgtagacattggtgcaaacccttctgctgagggtggaggagaagatgagggagttgatgatgcagctgttaaggt

SEQ ID NO: 52519 - DNA, 235 bp, Glycine max
  unsure (1)..(235): unsure at all n locations; Clone ID: 701141706H1
ggttgagttggttcttgcccagttcagaagagctaaagggagggttcatgaaccagatgtcaggtcgcatgaggatatgttgtctgtttacaacaacagcagtgatgcagctaccagatccatctntctaagtcaattagctgaaaagttgaaattgatgggantagctgatcttactcaagaatcactgcttgcatgagatggtggcatcaagtggtggggtccaggggcacgc

SEQ ID NO: 52520 - DNA, 241 bp, Glycine max
  Clone ID: 701141707H1
ttcaaatttggcactagcacattgcttcctgcagcatcccctcttgacatgggaactttcaaatcctataactgccaaataccaaggttctcttctggtcatggaactattgggatgttcactggaccggtggaccgattggcatttagtttcaagagttcaggaagtgaaagatgactaaacaatgctggacagatttgtaaagaatcaccaccgccgccactatgaccaccatcaccat

SEQ ID NO: 52521 - DNA, 243 bp, Glycine max
  unsure (1)..(243): unsure at all n locations; Clone ID: 701141708H1
ggaattaaatcatcccccttgatgaaggaactgcttgagaaatccaagttgnnnnnnnnnnnnnnnnnnnnnnnnnnnnnnnnnnnnnatttgcatagtccaaaaccataggatactgccatggattaaganggttaatgataatcaaggttttaaaaaaatggtccgcgactgcaattttgactggntctatctatgattctatatgaccacttgtgactacatttgagggcatatgagttg

SEQ ID NO: 52522 - DNA, 241 bp, Glycine max
  unsure (1)..(241): unsure at all n locations; Clone ID: 701141709H1
tgaaatgttgatgccaatgcaggcttttagagatttcttatttgtttctttgtagattaatatggttgatagtgtatgattgcattcaaattattgtgaaaattcttttaattatatcttcttgtntgtttgcctaaaattttcaatatttgacataaaaaagcataataatatgcatatacatattatgcataannnnaaaaannaacanaacaaaannanaaaaacananaaacacacc

SEQ ID NO: 52523 - DNA, 241 bp, Glycine max
  unsure (1)..(241): unsure at all n locations; Clone ID: 701141710H1
aggaattaggaatattcgacaggtagagtttcttcaatggctcctaaagttgataagaagaatgatccaaaggcccaggccttgaagactgctaaggcagttaagtcaggtgctacctttaagaaaaggtaaagaagatccgaacttctgtcactttccacaggccgaagaccttgaagaaggacggaaccccaagtaccctcgcattagcgccccgccgaggaacaagcntgatcattat

SEQ ID NO: 52524 - DNA, 246 bp, Glycine max
  unsure (1)..(246): unsure at all n locations; Clone ID: 701141711H1
ggcaccgcaaacagtgagccatggccgtcggaaagaacaagcgcatctccaaggggancaagggtggcaagaagaaggcagctgattccctttgccaagaaggattggtatgaccttaaggctccttcttttttcaagtgaaaaatgttggcaaaaccctcgtctctcgtanctcagggtaccaagattgcttctgaaggactcaagcatagagtgtttgaggtctccttggctgatcttcaaggg

SEQ ID NO: 52525 - DNA, 247 bp, Glycine max
  unsure (1)..(247): unsure at all n locations; Clone ID: 701141713H1
gaaaacccaaagtgcttctctcctctgtctttttctctctcttgctatccttttggctagtngcactgctgcaagtgcaacttccaagaagcgcagtgccaagccaccatgtttcaancattcaacagagccctttttccttccacttttctctttgganttggttcttctgcttaccaggcagaaggagcagcaagtgtagatgggagaggaccaagcatatgggacacctacactagacagcata

SEQ ID NO: 52526 - DNA, 242 bp, Glycine max
  unsure (1)..(242): unsure at all n locations; Clone ID: 701141718H1
gcaaaaccgtacctgtaagtnttgccgtaatcctcagagaggcaantcttgctgctcataggcatctgttcaatggtgaactggtcgtattccgaaagtgagtgaagcacggacttgatagtagtctaggaggcacataaatgtactcattcaacatcgaaaaagaacatccacttggccatgaacttgtatctatgaagacaatcattgaccaccatgaatggttatgatagtatccatcc

SEQ ID NO: 52527 - DNA, 238 bp, Glycine max
  unsure (1)..(238): unsure at all n locations; Clone ID: 701141719H1
gggcatctcaaggtttgtgtccttcgataaaaaatattcttcttttggactctgaagggaagcgtgtngcagtcaagtattactcagatgactggccaacaaacaatgcaaagttagcttttgagagtttgtatttactaagactgttaagacaaatgctcgtacggaagctgaggtaacactacttgagaacaatatcattatttacaaatttgtacaagacctgcattcttgtcac

SEQ ID NO: 52528 - DNA, 240 bp, Glycine max
  unsure (1)..(240): unsure at all n locations; Clone ID: 701141720H1
gggnaaatttctggcgatctctgcgttttcccctattttttctgaatcccacagaatngcatccaacaggggtcaaggtggaattcagcagttgttggctgctgaacaagaggcacaacggattgtaatgctgcaaaanatgaaaaattggctaggttgaaacaggccaaggaagaggctgaaaaggagatngctgaataccgagctcaactagaggctgagtttcaaaagaaatgtcac

SEQ ID NO: 52529 - DNA, 240 bp, Glycine max
  unsure (1)..(240): unsure at all n locations; Clone ID: 701141721H1
ggnaggttaaagagacggcaacgttgtgctgtccgccttgaccgagccagagcttcgtcttggcccgcgattttgccctgtaaaactaatcccagtcacaacagaaataatcaanggcaccgaaaagaccaaggctgagaagaagatcgcttacgatgcgaagtgtgcgacctaatggaggagtacggccaaatcctcgttgtaaactccgacaacgtgggatcgaaccagctccagaac

SEQ ID NO: 52530 - DNA, 239 bp, Glycine max
  Clone ID: 701141722H1
tctatgctgactctctttaaattgttttgctatgacaaacgcgcatcctctacccatttttagcttctaaaagagatggtgaaacagaaacattcagagtgcataacaactttgaggtgcaggtatgctgaagcgtgtggttcactccttagacctggtagagcaaaaagagaaggattccagaaggaagaaccgtctgagaggaagagaggctccgccaacgaaggactttgttgtga

SEQ ID NO: 52531 - DNA, 242 bp, Glycine max
  unsure (1)..(242): unsure at all n locations; Clone ID: 701141723H1
cggaggagaggtcgcaaacgcaaaaatggtgaagtttctganaccaaacaaggccgtcattgtccttcagggacgctacgccggcaagaaagccgtgatcgttcgaaccttcgacgaaggaactcggagcgcccctacggccactgtttggtggcggggataaagaagtaccctgcgaaggtgatcaagaaggactcggcgaagaagacggcgaagaagttcgcgcgtgaaggcgttcgtga

SEQ ID NO: 52532 - DNA, 245 bp, Glycine max
  unsure (1)..(245): unsure at all n locations; Clone ID: 701141724H1
gggcacttcgttgcttggtgatgtccctttctgttctcttcantncttgngctgcgagagaaagccatgccagagacgaagatttttggcatgctgtttggccaaacacttcccattccaagttcattncgagatcttctaaagcctggccctgcaagtgttgaaatcgatgatcaccctatgcaaattgaagaaacacagtacccgaaaacctncttctataaagagtagnnnnatccaggcaa

SEQ ID NO: 52533 - DNA, 245 bp, Glycine max
  unsure (1)..(245): unsure at all n locations; Clone ID: 701141725H1
ggcaccccaccgcgctctttgcctaaccgactcactcccatggaatccgatctaaacgacgccgtttttcccgnnnnnnnnnnnnnnnnnnnnnnnnnnnnnnnnnnnnnnnnnnnnnnnnnnnnnnnnacgacgtcttagatgacgatgaaaccgaaccccctcccttccgtcatcgccgtcgcgccgcccgcttcccaaacgctcgacaccgcgttaattccgatctcctccgtcgcggattc

SEQ ID NO: 52534 - DNA, 240 bp, Glycine max
  unsure (1)..(240): unsure at all n locations; Clone ID: 701141726H1
gntcnatctctctctgtgcatggagtttcgcntttccntcatttggngncttctncattattgtctnttctcttatctccttcaaatcaagggtgangcttctggttcgtcttattngtngatagttcagtaatcaattnattngngncagatcctccaantatgagnaannttcantgttgctagaagaagntggtgatgttgtgtcagtcttgttggttttgtttattnnaaattnna

SEQ ID NO: 52535 - DNA, 241 bp, Glycine max
  unsure (1)..(241): unsure at all n locations; Clone ID: 701141727H1
gggaatagtgctgcaatggcttcaagtcaggaggaggtgacccttttgggagctactggaagcccatttgtgtgcagggttcatattgccctcaagttgaagggagttcaatacaaatatgtcgaaaaaatttgaggaacaagagtgaactgctctcaaatccaacccagttcacaagaaggttccagtgtttattcacaatgagaagcccatagcagagtctcnngggttcnttganttc

SEQ ID NO: 52536 - DNA, 244 bp, Glycine max
  unsure (1)..(244): unsure at all n locations; Clone ID: 701141729H1
tggcactgtggcaaagtggattttgaagaacagtgcagagtctgaaaacatgaactggatacttgctaacttcaaagccatgtcccaagtgtaagcgaccaattgaaaaanatcatgggtgcatgcaatgacatgcactccaccctgtaaatttgaattttgctggctatgcgttggtgcatggtcagaccatggtgaaagaactggtggtttttatgcttgcaatcgttatgaagcagctaaa

SEQ ID NO: 52537 - DNA, 215 bp, Glycine max
  unsure (1)..(215): unsure at all n locations; Clone ID: 701141733H1
gcaaaatcatggagancngagcgcatcgttgaantccctcacacatacatggncccgacccccgagaaagagagcgcgtttgggctgggacatcgctaggtccccaaggctcaggtaggattgttttgtggacaagaggttgagaatatttcaagctttgctccttcagaacatccccctagttctctgtttaagggagttgctcgaaatggttc

SEQ ID NO: 52538 - DNA, 240 bp, Glycine max
  unsure (1)..(240): unsure at all n locations; Clone ID: 701141734H1
tactactacaagggaagaaaaacttagctactaaggaaggatcaaagagaatggctcaagcaatggcatcaatggctggcttgcgtggttcctctcaggctgtgttggaaggtagccttcaggtagtggctccacacgcttgaatgtggggantggaancagggtggcctcagtcacacgtgcagggttcacagttagagcacaacaacaacaagtgagtggtgaggtacanagcagccc

SEQ ID NO: 52539 - DNA, 236 bp, Glycine max
  Clone ID: 701141739H1
gaagtcgaagaagtgaaggtgttgagtgttttcttcttgtttggatctgagagagaagagcgagcgatgacggtctttcatttcttcaactgcgccattctcaccttcggcccccacgccgtcactattctgccacgcccttatctgagtatgatacactcggaacctctatcaaagccgctgttgtttatctgcaacggcatagtgaagctatttgtctagctacttttctcaag

SEQ ID NO: 52540 - DNA, 241 bp, Glycine max
  unsure (1)..(241): unsure at all n locations; Clone ID: 701141740H1
ggtgaaaaatgaacatgcttcacaccatttaattgtaggttcccaagncgaggtcctctctcaagacagtgggatgagangatgctggtctagagcttctgtcantaagaagcacaaagatnaagtaaggngcaatatcaagacattctggatncggtcgatgaaaccaagaagcttnaggnangggntttagcttccagaatagcagtggctgactgcctgggtcntcgaatgcgcggga

SEQ ID NO: 52541 - DNA, 241 bp, Glycine max
  unsure (1)..(241): unsure at all n locations; Clone ID: 701141741H1
gccgttccctcctatcttcactccctgaccatcaccgcaacccacaccatntcncctttcgcctgcgtcatttccgnctctgtggcatcttcatattncnaaanttntncgaaatntctctcctcntatcttgntcttacattctgggtaatgtntganacttgggggtagcnaagcngtttgacaaaaatggctattgcacaagttacagcatggcagcctgggattgtgtgaaaaatat

SEQ ID NO: 52542 - DNA, 242 bp, Glycine max
  unsure (1)..(242): unsure at all n locations; Clone ID: 701141742H1
atacactgntcatgggagtncatttaagacaagtggtggcgggtgtcctcaccctcacaatgttcgtacatgcttatacacatgatcanaaganancattttgatgctgttgatgataaacttctggaacggaggatgtncagctttgaaagtacaaactttgntantactcatgttagaaagaacatcgggatttggaagggagatggtgatgagttaaaaccatgttggcttaagccatc

SEQ ID NO: 52543 - DNA, 245 bp, Glycine max
  unsure (1)..(245): unsure at all n locations; Clone ID: 701141743H1
aanaaactcccttgtatattgttgnagctctagctagggtttcgcaagtgcgatgggaagaagaanaacgacgatggcgatggctgcagctntgcgtccgcgaaggaaggngtttgannccaaccaataacgcnctccantacttntctcaattnctcnctnatctctcanganccaagcncctcatggcgcgcgntacnatttcnatnaagntntgataaaangcngaagagtntgagganatc

SEQ ID NO: 52544 - DNA, 231 bp, Glycine max
  unsure (1)..(231): unsure at all n locations; Clone ID: 701141749H1
cgactatgtttctgtctctgagactgaactgaataacattaacacagcgatgnncgttgaaaacattagcaacctctcctctttcggggatcactcttttggtccttctcatcgcctccttctcagattttacatcaaattcgaaactgctgagagattgttcagtgctgaagagctatcattgttcaatggaactgatgaagggttgccaatcctctaggaatcttggga

SEQ ID NO: 52545 - DNA, 240 bp, Glycine max
  unsure (1)..(240): unsure at all n locations; Clone ID: 701141752H1
gcggaancnatcgcgccggccagggagccttcggaaacatgtgtcgnngagnttgcatgtatgccccgaccaagatctngtcccgatggcacaggaaaatcaatgtgaaccanangcgctacgncgttgtctncgncatcgnnnnctccgncatccccacnctcgtcctnncncgcggccaacgcatagagtccgtcccggagctcncactcgtcgttagcgactccgccgagagcgtcg

SEQ ID NO: 52546 - DNA, 233 bp, Glycine max
  unsure (1)..(233): unsure at all n locations; Clone ID: 701141754H1
atttcctcctctgggtaacatttatttatatgaacaattctaaaagttcgaattctttggaagacattanancaaatgaaaacttcaaccttncccttcctttcccganacatccgattacaactcccgnatnattcgcaaacaaatttantancaacagtcnatctnnactaccccgtgcaaattcnccgcaatanaattgcantgtgtgtgtgtgntntgtgttcanctcc

SEQ ID NO: 52547 - DNA, 240 bp, Glycine max
  Clone ID: 701141757H1
gaggtgattacaaggcaattgtacagaaccgcaatccattaatccctcctatatttggcacagatgaatttggctggtgttgtgagtggaatccagctatgatgaagttaactggatggaagcgaaggaggtgatggataaaatgcttttgggagagatttttggcacccagatggctgcttgtcgcctaaagaatcaagaagcttttgttaatttgggcgtcgtacttaataaagccag

SEQ ID NO: 52548 - DNA, 238 bp, Glycine max
  unsure (1)..(238): unsure at all n locations; Clone ID: 701141760H1
gaagaagcgccgcagctatggtgnngtattccagagaacccgacaatcccataagtctgcaaggccagaggngctgaccttagagttcattttaagaacactagggaganagnntttgccatnggaanttgccccttgttaaagctaaacgatacttagaggatgttttggcccacaaacaggctattcctttccgacgcttttgtggtggtgttnggaggaggcccaggctaagaac

SEQ ID NO: 52549 - DNA, 242 bp, Glycine max
  unsure (1)..(242): unsure at all n locations; Clone ID: 701141762H1
attcaccactctccatcttatcttcttctccttcacctcgttgccatctctctgttccatcttcttctttgaggattaaacctnnnnnnnnnnnnnnnnnnnnnnnnnntgtgtcttgttctctcaggagaatcaggagacccaacgcagcntattcatggactttccgttcgtttcatctgcccagaagaacctcatggttgatctcgtttcaacacttgagaatcgcttcatctcagctt

SEQ ID NO: 52550 - DNA, 244 bp, Glycine max
  unsure (1)..(244): unsure at all n locations; Clone ID: 701141763H1
gatctaaccaatgaaatcaaaatcgggattcgattgcagttgcaggtctctctatttggtgcttattacttattattaaggtttctttcttctgttgaaatggtctttagtaattatagttctgccatgaatctcattgtttaattctgattanacctttcccgaaatncaatagcgtcaaatggtgacaaggaagaatgttcagaattcgaacccatcttgaatcatcaccatcttcattgcc

SEQ ID NO: 52551 - DNA, 237 bp, Glycine max
  unsure (1)..(237): unsure at all n locations; Clone ID: 701141765H1
ggggttttgcgntcgtgcgttacaagtatgctgatgaggctcagaaggccgttnanaggctcgacgggagactggttgcnggncgccnaataacggtccagtttgccaaatatgggcctaatctgacnggnttcacaaaggaaggattattnacacatccccaagatcaaggcgntcaagganccgtagctcaagggcaaacgcatctgatgattacagagacaganattatnggag

SEQ ID NO: 52552 - DNA, 126 bp, Glycine max
  unsure (1)..(126): unsure at all n locations; Clone ID: 701141767H1
gcgggccgcccttntntntntttttttacaaaaataaatngtggcactccangtncctttnttntgaaaaaaaccttngcatnanacaattcttctngcccnaatttccctttttttncccatcaa

SEQ ID NO: 52553 - DNA, 223 bp, Glycine max
  unsure (1)..(223): unsure at all n locations; Clone ID: 701141768H1
ataccactntatgtcaattantggnncanggtatctgctaantggnggttngnatggganatcngttatggtgatccctggtggttagtccctcaagaggacncaattgnaagtagattaactgtatntcgcactcagaaatattncngaaagtaaggatgttanncacntaatgagcagnntcaacctgagttccaggncagcnanacagngatttcanaac

SEQ ID NO: 52554 - DNA, 223 bp, Glycine max
  unsure (1)..(223): unsure at all n locations; Clone ID: 701141770H1
tgcgttgcttcgtggttaatttttcgtgttcttgtgatctttctgttggagtanttacnacactcctttgtaagtttaactaaagaggctaattaattttcaattggaccaagcagatggctgaggagggtcacagggttactctaaatgtttatgacttgagccaaggtctgcacggcagctttcaatgtcnttttgggganagctatganggcatatggca

SEQ ID NO: 52555 - DNA, 242 bp, Glycine max
  unsure (1)..(242): unsure at all n locations; Clone ID: 701141775H1
gcttgcnactgagntttccacactgcataccttangtcttccgaattcgaagttcaatttgcaagatggctaaggaaaaggntcagatcaacattgtggtggttggtccatgtggaccctgaggagnaacnacnattaacgagatgaagangcntgttgtggaganannagctccagggcatgccatatganggcatgaagtacggcctcggagtggaatcagannnnnnnnttaacaaaat

SEQ ID NO: 52556 - DNA, 236 bp, Glycine max
  unsure (1)..(236): unsure at all n locations; Clone ID: 701141789H1
aggtgattacaaggcaattgtacagaaccgcaatccatnaatccctcctatatttggcacagatgaatttggctggtgttgtgagtggaatccagctatgatgaagttaactggatggaagcgaaggnggtgatggataaaatgctttgggaganatttttggcacccagatggctgcttntcgcctaaagaatcaagaagntttgttaattgggcgtcgtactaataaagccatg

SEQ ID NO: 52557 - DNA, 150 bp, Glycine max
  unsure (1)..(150): unsure at all n locations; Clone ID: 701141795H1
ggtntaagcaatgagcatgcngaatcgggattcgattgcagttgcaggtctctctatttggtgcttattnnttatnntnaagggttntgactnctgnngnnatggttcnaagtacataatnatctcgatcangagtattattgnngaact

SEQ ID NO: 52558 - DNA, 266 bp, Glycine max
  unsure (1)..(266): unsure at all n locations; Clone ID: 701141801H1
gngaacagctgttagacttgagttgagtcacagtcatcgtctgttncaggatcatatnnnnnnnnnnnnnnnnnnnnnnnnnnnnnnnnnnnnnnnnnnnnnnnnnnnttctatctctctcttcaattccaaaaccctacccccatccaattccaattcacccncaatcatgggttctgaaggnnncactgtcgtcgttctaggaantcagattattggaagagnntgagagaggtgagaagggaattggagaggaacgttagcta

SEQ ID NO: 52559 - DNA, 245 bp, Glycine max
  unsure (1)..(245): unsure at all n locations; Clone ID: 701141802H1
aatgagagttcccatgttggggcttttgatgtaagtaggcttcagaagcttaaaggaaaaaaggggaatgggaagaagaaagatgcccttgttgttgctgctgctgccatncncagagccgaagaaggttgataagcgatcacgtnnnattgcaggaaaggccaatttggagaagtcagacttggaaccggctctgaaagctctgaaggacaggctctgaccaagatgtggccgaggaatagctg

SEQ ID NO: 52560 - DNA, 259 bp, Glycine max
  unsure (1)..(259): unsure at all n locations; Clone ID: 701141803H1
gagaatgatgatgaagtctgctatgtgtgcagtggtggttgtagcacttcttcttctggcggnggtggggcccatggctgaggctgtgacatgcaccccaacagagttgagtccgtgtcttccagcaatcacttccggtgctaaaccttccaatgcttgttgcacgaagctgaagcagcaaaaaccatgcttatgtggctacctcaaaaacgctagcttgaagcagtatgttaantctcctaatgcccgaaaaaccgtt

SEQ ID NO: 52561 - DNA, 262 bp, Glycine max
  unsure (1)..(262): unsure at all n locations; Clone ID: 701141804H1
gtaagaagagaaagttcgtagctgatggagtgttcttcgctgaactgaacgaggttctgacaaganagttggncgangacggntatgccggccgtggaagttagngttangncgangcgtactcgagatggnacaanagggtaaaagctcgtttgnttgtgatttccagtacgnananganccntnanaccgtncccntngggaccctntanncccttgcggantttgaagctagaggtgtcagaaatccacaaggataagg

SEQ ID NO: 52562 - DNA, 252 bp, Glycine max
  unsure (1)..(252): unsure at all n locations; Clone ID: 701141805H1
cagtgcttgancctggtcgagtgtacnagnatnacagatgatggtttgaagcggattcttgaagantatcccaagttaaccaagttgagtgttccaggatgtacaagactcagtattgagggtattgtgactatttcaaaagcttacaactctatggatacccaaggggtgaagcatttacacataggtggtcttatggtgttacacaaaagcattttgaagagctgaggttctgttgggggctgatagtcg

SEQ ID NO: 52563 - DNA, 253 bp, Glycine max
  unsure (1)..(253): unsure at all n locations; Clone ID: 701141806H1
ttggaggttaccttctatcaaagataaaatgcatganatgtggagggaagtctgagcgtcaggnaaggatgatggatctgactgttgagatagaaggcgagataacaaccctggtggaggcccttcgacgatttacaagcactgagactttagatggggaaaacaagtaccactgtgtcagatgtaaatcatatgagaaggccnagaagaagcgacagtttcagaggcaccgaatgttctacagttgcattaa

SEQ ID NO: 52564 - DNA, 252 bp, Glycine max
  unsure (1)..(252): unsure at all n locations; Clone ID: 701141807H1
atcctccatggcctccaccaaggaacgtgaaaacttcgtctacgtcgccaagctcgccgaacaagccgaacgctatgaagaaatggtggaagcaatgaagaatgtggcgaantaaacgtggaattgacggtagaggagcggaaccttctgtcggttgggtacaagaacgtggtgggtgctcgtagggcttcgtggaggattctttcctcgattgaacagaaagaagaagctaaagggaacgatgtgagcgtg

SEQ ID NO: 52565 - DNA, 257 bp, Glycine max
  Clone ID: 701141808H1
ttgacacaacaaaggaaagatgattattatccaaatagccgatgacatcacaaagactgatatataaaaacaaataacaagcgggtttctaaagacaaaaattctcaattcagggtagtttcccaatatcatagtttttaaaacttgcaattcctcccgttgccatgatctccaagtcccacaattgtagtttatattttattgaaggccacaatgtcacaactctggacatattcattgatgggctcaactgtgag

SEQ ID NO: 52566 - DNA, 254 bp, Glycine max
  unsure (1)..(254): unsure at all n locations; Clone ID: 701141809H1
ttcccaccaaagagcacacntgatcccacactctatggtgatcaaaccagtaccataacaaaagaacaattggagattaacatgggaggggtcacagtagaagaggcacttagtactcagagattattcatattagattaccaagatgcttcatcccatatttgacgaggataaacagcctacctactgcaaaagcttatgccacaaggacaatcctgttcttgaaagatgatggtanttgaagccattgctat

SEQ ID NO: 52567 - DNA, 252 bp, Glycine max
  unsure (1)..(252): unsure at all n locations; Clone ID: 701141810H1
ggaaggggaaggatatgagcgtccaaatgagggggccattgttaaagtgaaactaattggtaagctacaagatggtaccgcttttttgaaaaagggccatgatgaagaagagaagctntttgaattcaaaacagatgaggaacaagttgttgatggactgatagagctgtattgactatgaagaagggtgaggttgcgttgttgaccattgcacctgattatgcttcggtacatcagagtcccaacaggagt

SEQ ID NO: 52568 - DNA, 254 bp, Glycine max
  unsure (1)..(254): unsure at all n locations; Clone ID: 701141811H1
tnaacctttcactttcgtttctcagttttattcgaatccctctctcaatctcctttccaaatggccagcgttgaggttgcacagcaaacaccaacaacagttccagaaaatgaaacaaccgaggtaagcaagacccaggaaacaaccccagtcactgaggctcctgcaacagaacaaccagcagctgaggttcctgcaacagaacaaccagccgctgaggctcctgccccagaatcaaccaccgaagcaccaaa

SEQ ID NO: 52569 - DNA, 254 bp, Glycine max
  unsure (1)..(254): unsure at all n locations; Clone ID: 701141814H1
taccgagtgnctcccacgcccggtcgtactcataaccgcatcaggtctnccaaggtgaacagcctctggtcgatggaacaatgtaggcaagatggagctgccagagtggactgatattgtgaaaactgcaagatttaaggagttggctccttatgatcctgactggtactatgtcagagctgcttccatggcaagaaagatctacttgagaggaggacttggtgttggtgccttcagaggattatggtgggagc

SEQ ID NO: 52570 - DNA, 253 bp, Glycine max
  unsure (1)..(253): unsure at all n locations; Clone ID: 701141815H1
caaggttcaaggagatggtaactgccagtttcgttctttatcagatcaactctatncgttctccggaccaccacaaatttgtgcgggagcaaattattcaacagctcaaatattacccagatctgtatgctggttatgtncccttggcgtatagtgactattngagacatatgagcaaaagtggcnatggggtgatnaggccaatngcnggnggcncgatggtagggggccaaaattnnggtaaaccgncntc

SEQ ID NO: 52571 - DNA, 254 bp, Glycine max
  unsure (1)..(254): unsure at all n locations; Clone ID: 701141816H1
gggtttggtctctccacggtctcattggtgcccaaccgtgattgcccatcgaatgctcagttcctagatacatatgttcacgctgctgatggtactccgttactcatcaagaacgcaatctgtgtctttgaacaatatggcagcatcatgtggcgtcacaccgaaacaggnttcccaangaatcgttcgaaaanngagagggactcnnnggggnanattnntgnggggnngggggcaaaaacatnatngggggg

SEQ ID NO: 52572 - DNA, 252 bp, Glycine max
  unsure (1)..(252): unsure at all n locations; Clone ID: 701141817H1
ctgctctttgccttctctgacacatttggtgccttgtagagcgtgttttggcaggaaggtggtatggcgaaggacgttgaggttgctgagcgtggctcctttctctgggaaggactaccaggaccctccaccagcaccacttcattgatgctgaggagctcacaaagtggtcctttacagggctctcantgctgaattcatgccactttgctcttcctctacatacngtgctcacgtcatgggtacaagcac

SEQ ID NO: 52573 - DNA, 257 bp, Glycine max
  unsure (1)..(257): unsure at all n locations; Clone ID: 701141819H1
ttctttcttcaccatgtccacttgctgggaaaatcaccactgaaatcggggttcatgcaaccgctacaaagtggttcaacctcttcgcaacacaactccatcatgttcaaaacctaactgatagagtgcatggaaccaagctgcatcaaggtgaagactggcatcacaacgagacagtcaagcactggacttataccatagatggtaaggttacaacatgtctgganagtattgaatccttgatgacagagcaaaca

SEQ ID NO: 52574 - DNA, 256 bp, Glycine max
  unsure (1)..(256): unsure at all n locations; Clone ID: 701141820H1
agaaaatgggagtggagaagcagttgttgaggcnnggcaccggtcccaagccaattcccggtcagaacgtcaccgttcactgcactggtttcgggaagaacggtgacctttctcagaaattctggagcaccaagcctcctggccaggaccctttcactttcaaaatcggccaaggttctgttatcaaaggatgggatgaaggtgtgcttggcatgcaaattggtgaagttgctcgtctccggtgctctccggatta

SEQ ID NO: 52575 - DNA, 252 bp, Glycine max
  unsure (1)..(252): unsure at all n locations; Clone ID: 701141821H1
gtgggaggagannggcanaggtgcaatcantagagtggaagngccnaacggtcctccccggntttccattttttctcttctgntaaaattttagttcatcccagttgcgcataatcactacagattgagattgaatttaaagttaaattcggaaaaacgaacttgngccactgtacatttacagntctgcggcttcgggctagcctgtgtagatctagtgtccgtaaagcggttaccattcaccacncanca

SEQ ID NO: 52576 - DNA, 255 bp, Glycine max
  Clone ID: 701141823H1
ggatctgagttaaaaaaaattcagaaggagcaacctttgcagcaccctccaaagcctccacagaaaagaaaatggcggggtagcactgtggccccttttgctggtaacaacatgttagtcttgtatagttgtcctgctccagacaaatctaccagcaagcacttcgtgcaagtgttacacaatgaacaccctgttccattgccaggttgtgatggctctgatttctgtccattgaagtattcaaggaaaaaatag

SEQ ID NO: 52577 - DNA, 252 bp, Glycine max
  Clone ID: 701141825H1
gaagcttgttgtgggggatgttttccgtgccccatcaaatcctgccttgttgtgtataatggttggtgatggagttcaaattctggggatggctgttgtgacaattttgtttgctgcacttggattcatgtcaccggcctcacggggaacacttatcataggtatgctgtttttctacatgatactggtgttgctgctggttatgttgcagttcggctatggaggacaatcggctgcggtgatcagaaggga

SEQ ID NO: 52578 - DNA, 196 bp, Glycine max
  unsure (1)..(196): unsure at all n locations; Clone ID: 701141826H1
cttgtgtgtgtttgtgtccgccgtngncagcctaaacgaaacaacgaagaagaagaaagaagaagcatggtttcaatgagacgcancagtgncatctttctncaacagtaacaaaaggnnntcttctctcttattccgaaganaagactcctgtcctnccactaagcgncaaaaggtcgacaatggtgctgcnacg

SEQ ID NO: 52579 - DNA, 250 bp, Glycine max
  unsure (1)..(250): unsure at all n locations; Clone ID: 701141827H1
gnggaagaagaagcagctcttttggccctatgtcctcaaccgtcccttgttttctcctccttttgttctgtctctcaggatctgctgaggcctacaagaattatncagttggagactctttaggatggtttgacaatactgagaagtccaatgtcaattaccagaagtgggctgacagtaaagaattcagcttggnagatttcctcatttcaatcgnncactaaccntcatggttcagacatacattcnc

SEQ ID NO: 52580 - DNA, 253 bp, Glycine max
  unsure (1)..(253): unsure at all n locations; Clone ID: 701141828H1
ctgggcgttntagccgttcacagcctagcctctgctctagaatatggctcctcncagaggtggtgggttcagnnggtggtaggggtgacagaggtagaggaaggggcggtggtggaggaagaggaggagacaggggcacgccgttcaaagctagaggcggtggccgtggaggaggcagaggcggcggtggcctggaggaggcaggggcggcggccgaggtggaatgaagggaggtagcaagttgtggtgcagc

SEQ ID NO: 52581 - DNA, 251 bp, Glycine max
  unsure (1)..(251): unsure at all n locations; Clone ID: 701141831H1
caaaactgaactatgccgattcagtggtgccaagatctaccccggaaagggcatcagatttgttcgtggtgattctcaggttttcctgtttgccaactcaaaatgtaagcggtatttccacaaccgcctgaagccctcaaagctcacctggactgctatgtacagaaagcaacacaaaaaggacattgctcaagaanctgtgaagangaggagacgcgctgccaaaangccttactctaggtccttgttgg

SEQ ID NO: 52582 - DNA, 245 bp, Glycine max
  unsure (1)..(245): unsure at all n locations; Clone ID: 701141832H1
cacagagagaggggtttgggattnngagggattgacgctgacgtctcttcctcttctctncccgatccatccctcattcctaatcctccaatccaaccacctcagcctcacactcacntatacacatatctgaacgcgtatcgtccctcctatggcttcaaagcgcatcctcaaggagctcaaggacttgcagaaaganccaccaacttcttgcagcgtggtccagtagctgaggacatgttcca

SEQ ID NO: 52583 - DNA, 263 bp, Glycine max
  Clone ID: 701141833H1
aaggaaaacaatgggttccgataatcaccagaacttggagttcttgaaggagatcggtttgggctcttccaacattggctcttacattaatggccagtggaaagccactggttcttctgtcacttctgttaatccttctaacaatcagagtatagctcaagtgaccgaagcaactttgcaagattttgaggaggggttgcgagcttgcagtgaagcagctaagacatggatgactataccggcaccgaagagaggtgatttgt

SEQ ID NO: 52584 - DNA, 215 bp, Glycine max
  unsure (1)..(215): unsure at all n locations; Clone ID: 701141835H1
ttgatttccctgttcaatcagaaggtaaaaacaaaaccaaatgtgaaagctgattggaggaagaagcaaatgaaataaaaaagagagagaaattgttcttctgtctctattggctttcaactttccccngangttactttcncnctttctttcnctatgacgaattaagtgtcaaattgaatgaatcacacagacccanatgttaattttgcntt

SEQ ID NO: 52585 - DNA, 256 bp, Glycine max
  unsure (1)..(256): unsure at all n locations; Clone ID: 701141836H1
gtgccctttggtggtggctaagtcatggcaggcctcatcctccttctcaacctctcgccaaggttgtgctctcccttnnntcctctccancctgaagaagacgtnccctctgcagtccagtttacaatggagatggctggctncgaagtctgtgaatatgccaaaaacttattcattgaatatgtttaaagacttgttcctatgtgtgtctctccgagactagccaaggtggcaaggttgcaatggaagggaaagt

SEQ ID NO: 52586 - DNA, 253 bp, Glycine max
  Clone ID: 701141838H1
agtctgttcgtgggtgcattgtcagcccagacctctctgttttgaacttggtaattgtgaagaaaggtgagaatgatttaccaggattgactgatgttgagaagccaaggatgagaggcccaaagagagcatccaaaatcccgtaaactgttcaacctgtctaaggaggatgatgttaggaagtatgtcaacacctaccgtcgtacatttacgacaaaagctgggaaaaaggtgagcaaagctcccaagatac

SEQ ID NO: 52587 - DNA, 80 bp, Glycine max
  unsure (1)..(80): unsure at all n locations; Clone ID: 701141839H1
taaaaatcnacttcttcttctagtggttctaatcccanaccacnacgataaggcaanntnatantgannctgtgtactct

SEQ ID NO: 52588 - DNA, 207 bp, Glycine max
  Clone ID: 701141840H1
caccactccaaacccaccacaccaccattattcatatctcattctctaacctttcactctgccttactcactctctactttgctcatcatcgtagatgaaccaacacttctagtctctcttactttataaccatgtaaaaatgagtcacctaatgaaaaattagtagcttcttgttgtgctttttattttgtttgtgttgagataaa

SEQ ID NO: 52589 - DNA, 233 bp, Glycine max
  unsure (1)..(233): unsure at all n locations; Clone ID: 701141842H1
ggtaagggnacggggagtttcggncaagaggaggaacaagaccncacaccctctgtgtgaggtgtggccgccgcagcttccacctccagaagagtttctgctctgcgtgcgcttaccccgcctgcgcgcaccaggaaatataactggagcgtgaaggccattaggagaaagaccaccggaactggaaggatgaggtactgcgtaactgcctcgcagattcaagagcggcttca

SEQ ID NO: 52590 - DNA, 250 bp, Glycine max
  Clone ID: 701141844H1
gcacacctatgtttctcatgtctcggaagattaaatcacttggtgtcaaatgggttatctcaggagaaggatctgatgagatctttggagggtatttgtacttccacaaggcacccaacaaggaggagttccacagagaaacatgccgcaagatcaaagcacttcaccaatatgattgcttgcgagccaataaatcaacatttgctggggtctagaagcccgtgtaccattttggacaaggcgtttatca

SEQ ID NO: 52591 - DNA, 249 bp, Glycine max
  unsure (1)..(249): unsure at all n locations; Clone ID: 701141847H1
cagactgagagctctttcttgattctatgggtggtggtgcatggccgttcttagttggtggagcgatttgtctggttaattccgttaacgaacgagacctcagcctgctaaatagctatgtggaggtaaccctccacggccagcttcttagagggactatggccgcttaggccacggaatttaagnnaaaaacaggtccgtnangcccttagangtcnggccgnangncgcaacacgattntcacngac

SEQ ID NO: 52592 - DNA, 228 bp, Glycine max
  unsure (1)..(228): unsure at all n locations; Clone ID: 701141848H1
gggtttggtctctccacggtctcattggtgcccaaccgtgattgcccatcgaatgctcagttcctagatacatatgttncacgctgctgatggtactccgttactcatcaagaccggcaatttgaatcttngaanaataggnnagnagcggnanngcgtcaaacngaaaacgggnatccnnaaggaanggatnanaaanaanaacancaannnaanacanaggancag

SEQ ID NO: 52593 - DNA, 232 bp, Glycine max
  unsure (1)..(232): unsure at all n locations; Clone ID: 701141849H1
gctccatcacctaataccttccccacntcccangtaantcacgtttagttcgcacaagganttaaaaaatggctgatgctgaggacattcaacctcttgttgttgataatggaactggaatggtcaangcgggttttgcaggtgatgacgctcctagggccgtgttccccagtattattgggcgaccacgccataccggtgtaatggttgggagggtcagaaggatgcntac

SEQ ID NO: 52594 - DNA, 256 bp, Glycine max
  unsure (1)..(256): unsure at all n locations; Clone ID: 701141850H1
ctgggattcagggatttaccacagcttgtggccttacctcaatggcttcaagaaactgccaactccttgcagtccttacgtatttcaggttgcgacaatcttgaaatacttccggagtggctgtcaactatgactaatctgaaagtacttcttatatcagattgtccaaagctatatctctcccggataacattgatcacctagccgcacttgaatggttgagaattgtcggttgtncnggacnangtaggaaagc

SEQ ID NO: 52595 - DNA, 254 bp, Glycine max
  Clone ID: 701141851H1
cacgcttcttcttttgctcgaatcatggagggtggttatgctcgtcgactcttgcaggtacggtataagatcaataaacaaagaagggcgtgaacaagccaaaaagttcggggtagagcagtttgaaatgcgacatttttcgaaagatcgtccatttttggaaaacctgaatctaggagaaggtgctaaaggagtatacatttcaatcgatgtggattgtctgatccagggtatgctgtaggagtgtcccatat

SEQ ID NO: 52596 - DNA, 254 bp, Glycine max
  unsure (1)..(254): unsure at all n locations; Clone ID: 701141852H1
gttcaaactctgtcttccctgggttctatttngaaatcaacgacgatgagttccacagaggcagcagccacagagaagaaaggtggaagagggaaaccgaagacttcaaagtccgtttcccgttcctccaaaggcggccttcagtttcccgtcggccgtgtcgctcgctacctcaaggccggtcgctacgcccagcgcgttggctccggttcccctgtttatctctccgcggttctcgaatacctcgctgccga

SEQ ID NO: 52597 - DNA, 251 bp, Glycine max
  unsure (1)..(251): unsure at all n locations; Clone ID: 701141853H1
ggcgaagaggggaaaagcaaaggcggagctaaaggtaacaacgccgtcggaaaaacctaatgattttccgtcttgtattcggagcgtgcctccttcctccgtcgctataaccatccacgccaaacctggttccaaatccgcatccgtaactgatataagcgatgaagcggtnggagtgcaaattgacgcacctgcgagggatggcgaanaaatgcggctcttctcgattacatcagttctttgcggtggtg

SEQ ID NO: 52598 - DNA, 251 bp, Glycine max
  unsure (1)..(251): unsure at all n locations; Clone ID: 701141854H1
tcgcgtttcatcgcgctcaccgtcaccggcaaggtgactanacacngggactccagttaaatgccatacacgatgaccctagaacattgaaaatcttccactctctcgngtccccngatacgatacggcgaggaatcttgatacgtcaaaacatggtagaagcaggggaagaggaggttattgaattcaagtggggcacaaggaaagggttgggtggcaaaaagaaggatgtgcagttttacgaatcgttc

SEQ ID NO: 52599 - DNA, 252 bp, Glycine max
  Clone ID: 701141855H1
gggccattgacttgagcatattcagtgcgtcgtaaagcaaaaagatactaatggctaaagtcatgtttggtttggtctgcagcttcctcgtattatgctgtttcacaatcaacactagcgccttctcaccttctggatggaccaatgcccatgccactttttatggaggtagcgatgcctcggggaccatgggaggagctgtgggtatgggaatctgtattcgacagggtacggaactgatacagcggcata

SEQ ID NO: 52600 - DNA, 235 bp, Glycine max
  unsure (1)..(235): unsure at all n locations; Clone ID: 701141856H1
tcggagaacgaaaaggaatcccaatangctctggggctcttanngatgctcctcttcttcatngcttcttcctcttcctctcacctcgttcgtnccttccgatgacnccgacgacgcgatcttctacgagtcattcgacgaggattttgacggacggtggattnngtccgacaaggaggattacaacggtgtctggaagcatgctaagagtgatgggcatgatgntatggacttc

SEQ ID NO: 52601 - DNA, 241 bp, Glycine max
  unsure (1)..(241): unsure at all n locations; Clone ID: 701141857H1
tgttaatccagggctcaatgggcacatgcccataaatgtatggaaaaaatgtntgcaaaacatgcttgttcattcttgatattctagtgcagcatccaaacatagtggttgatgattcggtggaaccagatgagaatgagactcagaaaggggttgactataatgggccgattcgggtttggggtaactggttgcttctagaaagaattgatgttgaatttttcaagagctgcagtgcata

SEQ ID NO: 52602 - DNA, 56 bp, Glycine max
  unsure (1)..(56): unsure at all n locations; Clone ID: 701141858H1
gnnggagantggcaaagtgtcataagaanaacgtcggatccatngntctcgaccac

SEQ ID NO: 52603 - DNA, 249 bp, Glycine max
  unsure (1)..(249): unsure at all n locations; Clone ID: 701141859H1
atagtgcaaganaagcgtaatctccaagttctcatcttttttgttcccttttgttttcagagacatacataggccccagaagaacaaattgctacaacctattttgatttgagatctgtctgtctctttggtttcacttcagggctcaaagtgaggaatgcgaagaaaatggggaggaaaggaaatagttggttttctactgtgaagaaagctctaagccctgagccaaaggagaagaacgatcagant

SEQ ID NO: 52604 - DNA, 254 bp, Glycine max
  unsure (1)..(254): unsure at all n locations; Clone ID: 701141862H1
gtgagtagtaatggtcatggatgttgcaaatcagggccaggctatgcttccccactggaagccattncctggtcccagagagtctctcatttatgtaacctctgtctacacagggaccggaanagagaagccagactatttggcgacagtggatgtggatccaaactctccaacttattccaaagtcatccataggcttcctgttccttatttaggtgacgaattgcatcacacaggctggaattcagnagcnc

SEQ ID NO: 52605 - DNA, 257 bp, Glycine max
  unsure (1)..(257): unsure at all n locations; Clone ID: 701141863H1
aaccacttacaaagtagtactacttggtttcaatcaaaacaaaaactcacactttggtggccacagcaacaataacaatggcagcctcactacaagctgcagctaccttcatgcaacccaccaaggtgggcatggccactcgcaacctcaaatctacacaatgcatttctnaggcttttggcttggaacccgctgcagctaaactcatttgctcccttaagcncgtctcaaagattttgctcaaaatgtgtcgacgc

SEQ ID NO: 52606 - DNA, 257 bp, Glycine max
  unsure (1)..(257): unsure at all n locations; Clone ID: 701141865H1
ggctnattctgntttattanctgtgttaaatgtgaanaataaantaactgantttccgagaagtgggagaatggaagtcatggcaaggcttctcgctgctgagactttctctcacactgtagtagccagtgcaaagaaaaacccagattcttcttcaccgagtccctggagagaccttctagataatcccatgcagtaacgtgatttccgtgaaagcaaacggcaatggattagtaaaaccaaagcaccctgatttc

SEQ ID NO: 52607 - DNA, 249 bp, Glycine max
  unsure (1)..(249): unsure at all n locations; Clone ID: 701141867H1
atggtttccatggcattcggngtcngcactgcgacttttccgaatctaaacaggtgtccgtggagtggcatatgcaagtttgagcaacaaagcaagtactacatctttgggagtgcgagttacagagggagaggggaatttgccgaagcttgttctcacttccccggccggtagtgaggctgagatatacctgtttggnggttgcattacttcttggnaagttcccagtggtaaggacctcctctttgt

SEQ ID NO: 52608 - DNA, 244 bp, Glycine max
  unsure (1)..(244): unsure at all n locations; Clone ID: 701141869H1
cacttccatagttccattcnagntcttaacaattacatgagacagagaaagggttgacggacagagaacccaccttttgttgtattgcagatccatccgctctgccaccaggtgaatggaaggatctggcggtggcggtgcttcaccgtctgcaccggtgaagcagtatttgcacgatttctcgaagctgtttcagtactatctggataaatccactccacattccacgtacagatggattggg

SEQ ID NO: 52609 - DNA, 246 bp, Glycine max
  unsure (1)..(246): unsure at all n locations; Clone ID: 701141870H1
caacgaggttgtgtacacgaagaaggggtacaccgactnaaccggagcatacacaatgtacgtggatgaggatcacgcagatcagatctgcagtgccaagcttgtaagcagccctcaccctcaatgcaaggaagtcaccccaggccgcgacgaagccgtcgtgattctcacccgctacaacggcattgcctccgacgataggttcgccaatgccatgggcttcatgtctcaggaggttgcttctgg

SEQ ID NO: 52610 - DNA, 246 bp, Glycine max
  unsure (1)..(246): unsure at all n locations; Clone ID: 701141871H1
ctcacacacagtgcttgtttngactagtgatcttccatggctgtgaaggatagaatcctggtcttgggacccacaggagccattggaaggcacatagtttgggcaagtttaaaggcagggaatcccacttttatattggttagggacacccctgcctctgttaacaagccaaggctgtccactgctgctaatcctgaaaccagggaagaactcattcagagcttccaaaattctggagttactcta

SEQ ID NO: 52611 - DNA, 244 bp, Glycine max
  unsure (1)..(244): unsure at all n locations; Clone ID: 701141873H1
tcggtttcttcttctgggtgtgttgcttaaatctgtggaaagtttcattttttttttccgattttcatgtgaccagggtgcttttggggctaataaggtttgtgganagagaagatgatcgttgtgctgagcatgattattgatgggtagcagaagtagaacggtaaacgttaacactaaggacactaacaaggttcgaacgggatgccaagctacgctcctccattgcctctctaattccata

SEQ ID NO: 52612 - DNA, 248 bp, Glycine max
  unsure (1)..(248): unsure at all n locations; Clone ID: 701141874H1
agnncnagcnnaaggagaagagcattatagagnnaaaaaagantgaaanaaaagtangggtgangnntnncggtagagagcgcaaacgcagacgcaaacgctggttgttttgntgcngcttatnatncgactgtccgagagagagagtcagagataagaccttcangttgagttgaaatttttcntgcaatcngnntttgtcagtcnaatcaaatattnttatatacttangagccnnctagagagac

SEQ ID NO: 52613 - DNA, 242 bp, Glycine max
  Clone ID: 701141875H1
agaacacgcaaacaccgatcaattaattttctttatgctagatggggagtgcatcagagttcgacccagcgcttgcgtttcccacaaattccctgatactacgtactcttataccgaaagggatgcagcactttatgccctaagcgtaggggtgtgtttgtcggacgctgttgacgctgatgagcttaaatatgtttaccatgaaaatggtcaggagtctatcaaggtctgcctacgttttc

SEQ ID NO: 52614 - DNA, 158 bp, Glycine max
  Clone ID: 701141876H1
tcaatgtacgctgcatcaaccatgaaatccatgtacaagcctccattgcccagatctccaattcgccttcgaccctctcatgctgttcattcatcaaactctatcgctcttcaaaccccaccaggttcttgaccaaatctcagaaactgttatctctc

SEQ ID NO: 52615 - DNA, 250 bp, Glycine max
  unsure (1)..(250): unsure at all n locations; Clone ID: 701141877H1
gcaaagtgtgtgatgtggttggacattcagtcccaatcacatggcttcttccttctccttctcctccatcttatctcacacaccttcctcttcatccctctcaccaaggtgagagtgagaagcgcgtggaggacgatgaatcgcgcgttccgattcacatcgtgatccgcggcgacgcaacttcccgtcgaatttctggaaccctcgcctcaatccaagctcgtccatcggctttgactgcgaggggtng

SEQ ID NO: 52616 - DNA, 232 bp, Glycine max
  unsure (1)..(232): unsure at all n locations; Clone ID: 701141878H1
actccgtcgctcctcacccttccggcagtgcttggtantggccgtcacggttacanactttcaaaagttataattggtncagcttgatcaggaaggagggtcatctgcagttcaaaaggtgtgaaagcaaagaagatgcagctagaaattgacttnggaaggcttcggnaatnatggctngnatnaccccaacctaaggtagttgatcnaggancaacnggttgcnaagggg

SEQ ID NO: 52617 - DNA, 248 bp, Glycine max
  unsure (1)..(248): unsure at all n locations; Clone ID: 701141879H1
ggcncttgcacatgggttagtccgatcctaaggnacgggggaagcccgtctgatagcgctctgtgcgcgtactccgaaagggaatcgggttaaaattcctgaaccgggacgtggcggctgacggcaacgttagggagtcnggagacgtccggcnggggccccggaaagagttatctttcagnnaaanacntgcccaccctggaaanggctcagccggnngtaggctcccaccgctnaagacnacgccc

SEQ ID NO: 52618 - DNA, 247 bp, Glycine max
  unsure (1)..(247): unsure at all n locations; Clone ID: 701141880H1
cagcaacccactaacataaaaactacctcagaaacatataagggtatttcacaacaagacaaacatccactcccatcccagcagtgtagcatgcaggggaagagcgatcacttaaatgatcctgttgcttccattgatgcgaaactgctgcaggcacaatnctcaatttggtgctgtngatgtgcngcagaactnttgctgccngggcnnggggggcctcnnagggggnncnnaggggggggnttna

SEQ ID NO: 52619 - DNA, 252 bp, Glycine max
  Clone ID: 701141881H1
tgttcaagctggtcaatgtggaaaccaaattggaggcaagttttgggaggtgatgtgtgatgaacatgggattgatgccactggaaattacgtaggtaactttcatcttcaacttgagagggttaacgtgtactacaatgaagcaagtgggggacggtatgttcctcgagctgtgcttatggaccttgaaccagggaccatggatagcttgcgttctggtcctttggaaaaatattcagacccgataacttc

SEQ ID NO: 52620 - DNA, 73 bp, Glycine max
  unsure (1)..(73): unsure at all n locations; Clone ID: 701141882H1
tcctacaccaacaaaaatggcaccttctccacaagatatccancntncgatcnnnaatnnccgatattcccat

SEQ ID NO: 52621 - DNA, 247 bp, Glycine max
  Clone ID: 701141883H1
gccggtcgatccgggcggaagacattgtcaggtggggagtttggctggggcggcacatctgttaaaagataacgcaggtgtcctaagatgagctcaacgagaacagaaatctcgtgtggaacaaaagggtaaaagctcgtttgattctgatttccagtacgaatacgaaccgtgaaagcgtggcctatcgatccttagtccttcggaatttgaagctagaggtgtcagaaaatccacaaggataagg

SEQ ID NO: 52622 - DNA, 244 bp, Glycine max
  unsure (1)..(244): unsure at all n locations; Clone ID: 701141885H1
gcgcangtaagggagcaggctcggtcttcaagtcccacacgcaccaccgcaagggccctgcacgcttccggagcctggacttcggggagcgcaacggctacctcaagggcgtggtcaccgacgtcatccatgaccctggccgcggcgcgccgctcgccaaggtcgccttccgccaccctttcagatacaagaagcagaacgagctcttcattgccgccgangcctctacaccggtcagttcatc

SEQ ID NO: 52623 - DNA, 243 bp, Glycine max
  unsure (1)..(243): unsure at all n locations; Clone ID: 701141886H1
tcataatcataccctttttgtcagttacactagtttgattgatgtgtttgtaaactaacagcaaggttacaattatagtgtttttaaaaaattaaaagtctaattgaactttttaataattaagggacctaattgaacttttaattctaattaaaggnnnnnnnnnnnnnnnnnnnnnnnnnnntacccncgtggcgttcttgattgttatgactattgaattgactgagagttggcaatcgc

SEQ ID NO: 52624 - DNA, 245 bp, Glycine max
  unsure (1)..(245): unsure at all n locations; Clone ID: 701141887H1
cngcagcantggtgtacgtcaaggctcagaaatcaaaagcctacttcaagagatatcaagtcaagttcaagagaagaagagagggaaaaaccgattaccgtgccaggnttcggttgattaatcaggacaagaacaaatataacactccgaaataccgatttgttgttcgcttagcaacaaggacattgttgcacaaataatatctgctagcatgctggcgatattgttctgctgcagcatatgca

SEQ ID NO: 52625 - DNA, 249 bp, Glycine max
  Clone ID: 701141888H1
gtgatcatcatcatcacaaggatgaggacacaagtgtccctgttgagaaagttgaggttgttgaaacagcacatgctgaggaaaagaaggggttcctcgacaagattaaggagaagctaccagggcacaagaagacagaggaggccacagctactactcctcctccaccaccacctgttgcatcattggagcatggtgaaggtgctcatcatgaaggagaggccaaggagaagaaaggtatattagaaa

SEQ ID NO: 52626 - DNA, 244 bp, Glycine max
  Clone ID: 701141889H1
gtccagttggcagctacacaagctttggaaaggctgtccgttagcaatattgtttgccgggttattgaagctgagggggttttaggtcctttagttagtattttgaaatgctcagagatagctggaactattgtggaaaagtcttgaacatacttgctcggatattggaccccagtaaagagatgcaattaaagtcttatgatggaccagctaatgaatctgaaaaggcatttggtggagcaaa

SEQ ID NO: 52627 - DNA, 244 bp, Glycine max
  unsure (1)..(244): unsure at all n locations; Clone ID: 701141890H1
ttgccaagctagtttctctgtccaaagaagacccactcattcatggaatactcgccatctctctaccagcagtnagctagcaaattttgatcccttgggtattaactcagatttatcttctggtctgaattctacctggaaaaatctggtgtgctcaattacacaaacatttgagagtacttcaagtgcagaaaagggaaaacctaactcttctcaaggggtagcagctgcaatagaggatagt

SEQ ID NO: 52628 - DNA, 244 bp, Glycine max
  unsure (1)..(244): unsure at all n locations; Clone ID: 701141891H1
anagcatgtaagtgctcttgatgatacattggctgaatttgaggaagagagggcttccattctagaacagctcaaagcattagaggaaaagattatttcacttgcagataatgaggaatttctgatgacatcaaattgattgagcattcatcaatgtatggtgacaaagactgaatgaaaactgcaactttagcagtgttgaagaggagaatggatattctaatgggttttcagatgataaaca

SEQ ID NO: 52629 - DNA, 223 bp, Glycine max
  unsure (1)..(223): unsure at all n locations; Clone ID: 701141892H1
gtgtacttgtgttaattgtgttgtacttgtaggaaatttaantgaagagagaatgatgatnaagtctgctatgtgtgcattggtgcttgtggcactggttgtggttgaagtggggcccatggctgaggctgcggtgacttgcaacccaacacagttgactccttgtctccggcaattaattcaggttctgcaccttcgagtgcttgttgccagaagctgaaga

SEQ ID NO: 52630 - DNA, 245 bp, Glycine max
  Clone ID: 701141894H1
tccggatttaccttcaaagcctttcacaatctctggggcttcgttcgtctctctcttgcctctactgtcatgctctgccttgaagtgtggtattttatggccctggtcctcttcgctggatatttaaagaatgcagaagtttcggtcgatgccttatctatctgcatgaacatattgggatggaccatcatggtatccttggaatgaacgcagccgtaatgtgagggtgtcaaatgaataggagc

SEQ ID NO: 52631 - DNA, 247 bp, Glycine max
  unsure (1)..(247): unsure at all n locations; Clone ID: 701141895H1
ctgcggttctggaaatgttgaattctgaactgagataagatgagtaggattgaattatcgagcggcgaagtcatcgccggttccattggggactctgattggccgtgagcttcgaaatggaaaagttgaaaaaccttttgtgaagtatggacaatctggattggccaagaaaggagaagttnctttctaancaagacacntcccnggggntccgggganncnncncggcnttnccggnnnggannnc

SEQ ID NO: 52632 - DNA, 256 bp, Glycine max
  unsure (1)..(256): unsure at all n locations; Clone ID: 701141896H1
ggctcccaagggtttaacctttctggctgtgttaatatgcgtttnagcactgtcactgagtccttctgttgcanggggaagggcaaaataatggccttgttatgaacttctacaaggaatcatgcctccaggctgaagacatcatcacagaacaagtcaagcttctctacaagcgccacaagaacactgctttctcctggctcaggaacatcttccatgactgtgctgttcagagttgtgatgcttcatgttgcng

SEQ ID NO: 52633 - DNA, 292 bp, Glycine max
  unsure (1)..(292): unsure at all n locations; Clone ID: 701141901H1
gggaaccccttggtttggtaggcacaaattatggttgcatgaacatggcaggtttcgcgggcaaacatcggcttcaacatctcgttcccactttccctgtcgcgttttttcaattcaccggagtatttggaagtttcagattgtctgcttgaagagaagagagtatagttcttctgttcctattaggtacatttccagcacatcctgncagggtgnnaatacttgaaatgccatgccatgaaaagccnggatatngtngcnntcccgatgtaaantgcccaganaaaggggg

SEQ ID NO: 52634 - DNA, 282 bp, Glycine max
  unsure (1)..(282): unsure at all n locations; Clone ID: 701141905H1
cttgcttcttgcttctattacttgcttctttcttcaccatgtcaccttgctgggaaaatcaccactgaaattggggttcatgcaaccgctgcaaagtggttcaacctctttgcaacacaacttcatcatgttcaaaaccttactgatagagtacatggaaccaagctggcatcaaggtgaagactggcatcacaacgagacagtcaaacactggacttataccatagatggtaaggctacaacatgncccggnggtttggntcccttgtgancgnaanaaac

SEQ ID NO: 52635 - DNA, 285 bp, Glycine max
  unsure (1)..(285): unsure at all n locations; Clone ID: 701141906H1
aactccatcacacatgagccagcaagtgttgcggcntctaagacagtggncatggttnnnnnnnnnnnnnnnnntcagttggcgtcaccctttcccttncaccaccttctcanccctccaccaanaacntctcaccgtttttgctttgccacggtcgctgcttcgtctcgtcccaaggttcgaantnccgaagtctcccgtaccaccaccacccatggccgattccgatctggaggagnagaagagccgaaaccattgaagcgagnaagccaggcnactgtnaag

SEQ ID NO: 52636 - DNA, 227 bp, Glycine max
  unsure (1)..(227): unsure at all n locations; Clone ID: 701141907H1
cnccgactcanttgttgtcagcgagtnagtgagtcgtttctctgcagcaacaaggtttagccactcccaaacagacgagaaatgggtcgtggggtcagngctggtggtggtcagagttccttaggttatctctttggcagtggggtgcctgccagcagtgcaaacagtgcagcctgcaaatggtgctcgcacttcaaaatgctagtgctcttcaccaccngtcgata

SEQ ID NO: 52637 - DNA, 288 bp, Glycine max
  unsure (1)..(288): unsure at all n locations; Clone ID: 701141908H1
atgcagtataaacgaaggcaatgagttccaaagagagttgcagangtgaacttcgcattgcgatccgccaacttcagtgatcgatgtctctactgtgcttctaaatgggcggcagagcagttggtgggtattgagcaagaccctggcgaagttgcacttccctcgaacacgagattttcagcgtgggagttcgagcattncgcaggaaatacaagactcatgagatccgcggggaaccccaagngccggtgtttcnatgttgccacaccatnatngggcaagtnannt

SEQ ID NO: 52638 - DNA, 279 bp, Glycine max
  unsure (1)..(279): unsure at all n locations; Clone ID: 701141910H1
gtgttgttgttgtaggaaatttaagtgaagagagaatgatgatgaagtctgctatgtgtgcattggtgcttgtggcactggttgtggttgaagtggggcccatggctgaggctgcggtgactgcaacccaacacagttgactccttgtctccggcaattaattcaggttctgcaccttcgagtgctncgttgccagaagctgaaggagcaaaagccatggctctgtggctactcaaaaaccctagcttgaagcagtatgttaactctccntaatgccaa

SEQ ID NO: 52639 - DNA, 281 bp, Glycine max
  unsure (1)..(281): unsure at all n locations; Clone ID: 701141911H1
ggatacagaattgttggaatcattggagaccaatggagcgatctgcttggagaccacagaggcgaaagcaggacctttaagcttcctaatcccatgtactacattgagtagtaccttcacctctctcaacaatctagctagagtttgctcctatctatatgtaatanggtatgctgatatgcactattncaaataggagcattagctatgtttgttaatgtcactttatgttatgtgggtaagtcacctaagacactccacgtacctacttgttgtctnta

SEQ ID NO: 52640 - DNA, 284 bp, Glycine max
  unsure (1)..(284): unsure at all n locations; Clone ID: 701141913H1
attcgtngcattcatccatttaacttccacaaattcctacaantatctaaccaaacccttcactactccaaatcccacaacttctctcttttttttccctccttcttttccctttttctgttgtccgatcttctgcctcctagatcttggtatttgggattgatcacctggagttggaaatggttaaaagttatggagtgttctgatttgcgaaagatatcatgttgcagtgcttagaaggacttaagccttatttgcgtccatntgcgatgttgtgacctgga

SEQ ID NO: 52641 - DNA, 269 bp, Glycine max
  unsure (1)..(269): unsure at all n locations; Clone ID: 701141914H1
gcgagcagggatgtgtcgttgggaccnaacaagttcccncgacgagacagccgattgggacangcggcgcagagccaagacgacggcaaggactaccaggagccggcgccggcgccctggttgacccgacggagtttacgtcatggtcgttttacagagcagggatagcagagtttgtggccacttttctgtttctctacatcaccgtcttaaccgttnngggagttcgccggggctaagtctaatgtataccgttggggattcaagga

SEQ ID NO: 52642 - DNA, 288 bp, Glycine max
  unsure (1)..(288): unsure at all n locations; Clone ID: 701141915H1
tttgcacttgggtggtacctttctctctactacttgtgttgtgttgtgtgtntgggggttcagttcagcctttgattccgatggattctcacggaaacccccacaattctgggatgaagaaangnaagccggagcaggatactttgatcagtgatcatggaaattctgtgagtgtgggagagtcatctgggagtggtgatctctgcaagagttcctacctcaggatcatgantccaaacaatcaaaatggttccaattctgatatttcatgtcnngnatgatgaggna

SEQ ID NO: 52643 - DNA, 276 bp, Glycine max
  unsure (1)..(276): unsure at all n locations; Clone ID: 701141916H1
aacgctgtcgttgcgcccaatcgcangngttgttgttggtgantgctacttcgnggcgagtgacgtggtggaggctcaggagaacttcggacgtgaagacgctggtgaagcacatggcacgggaagaagtactgcgacaaaggatgggaatgtaagggctggtcaatttactgttgtaacctccatattactgattatttccagacctaccagttcgagaatctctctccaagcggaactcgccggtggcgcacgcctncggattttgggactacc

SEQ ID NO: 52644 - DNA, 152 bp, Glycine max
  unsure (1)..(152): unsure at all n locations; Clone ID: 701141917H1
ggcgaattcgtttccggcttcantggaagtgccggcttggcacttctnacnaagnatgangcactggtgtggacggatggacgatatttttngcaggctgagcaagaacttagtgcncagtggaagcttatgcgtattggtgacngatccnc

SEQ ID NO: 52645 - DNA, 277 bp, Glycine max
  unsure (1)..(277): unsure at all n locations; Clone ID: 701141919H1
gataaattgaacctccttttgtgagtgtagtgagtgtctctctcattcattctnaggtcccaaccgcattaagcgtctttgatcccatcttnttntgtccccgaaaggacgtacccaaaccaaatcgccacatntcaactgctangctangcgccnttttctcagtgaccggttcntncagttaatctctcngatccattcaattgaagggcctcaacnannccgntcncccaccaggcaatggcaaactanttcncgntgngancctccaccgcca

SEQ ID NO: 52646 - DNA, 280 bp, Glycine max
  unsure (1)..(280): unsure at all n locations; Clone ID: 701141921H1
cttcactagcgtctagttgtattgatttaatagnatgtatganttattgtaaatcttccaatatntgattctncaccaatacaaaaaagtcatgacttcttcagttaagagttcagaagagtacaaagaagtttctcatgattttganttggaggaggaagaggaattgtttgagattgatcttgaggcagtgaattgcattnccaccaccccatttctggcnagttgttactacnactnccccggnaaatnngccccttnggccaantncntcctnccc

SEQ ID NO: 52647 - DNA, 273 bp, Glycine max
  unsure (1)..(273): unsure at all n locations; Clone ID: 701141922H1
aagcaatacatcagaatggtactgttcatcaagactctgcatctcaaagaacgtaaccatagcaaagctagcttaaactacacactgatgatgacactgaagaatgatcgggacgaggtgttaacttgcattaagtttaattttaaaattgtttttggatcttttgtgtctgatatgtaaagtgtctttgcatgccgatctgggggaacttttttgctttgttntgagtgtnttnatgtattcntacngganatcacttccatccgggccgcc

SEQ ID NO: 52648 - DNA, 235 bp, Glycine max
  unsure (1)..(235): unsure at all n locations; Clone ID: 701141923H1
tcaaccaagtcttatagtatcctacaaactcagtagtacacttganttttactgctacactatctcagatttacttgggcgagaaactgcactttgtaatacactatgggcactgaaagatgctgctcagaaaacattttttgatattttaaaaggtcgagggganaagcttttgcggtatcccccacttgttgcngttgatctttccccgccacnagcagtgngggaggggtac

SEQ ID NO: 52649 - DNA, 280 bp, Glycine max
  unsure (1)..(280): unsure at all n locations; Clone ID: 701141924H1
ggattttggtgatcttgtgaattgatctgcgatgtcggacgaggtagttctgttggatacatgggctagcatgtatggtatgagggctaggattgcattggctgaaaagggtgttaggtatgaatacaaggaagagaatctcatgaacaggagtccttgcttttgcagatgaacccaattgcacaagaagattcctgttttgatccataatggcaaacccatttgtgaatctggcaataatagtgcagtacttgatgaggtcnggnatgacaagtcctcc

SEQ ID NO: 52650 - DNA, 268 bp, Glycine max
  Clone ID: 701141925H1
ttaagtgccacagtcatgatggagaggaaggttatcctggggatatcactgttactgccacttacacacttcacctcaagcacaactctgaggcttgacatggaaggagtgccaaagggcaagcccaccatagttaacttagctcagcatacctactggaacttagctggccacaactcagggaatatacttgaccattcaattcagttatgggctaatcatatcacacctgtgaacgagaataccgtgccaaccggtgaatctgcca

SEQ ID NO: 52651 - DNA, 278 bp, Glycine max
  unsure (1)..(278): unsure at all n locations; Clone ID: 701141926H1
tacgtttctggggatcagttcacaaaggangacatcaaagtgtatggtgctgttttggagaagccaggtgactcttttcccaatgctgccaagtggtacgaggttgtctcatctcagcttgctgcaagcttccccggcaatgctcaaggggtgagattcagtggcaaagcttctgctccagcggaggctgctcctgcgaaaccggatgcttctgctgctgaagatgacnatgaccntgatcnctttggcgatgagactgaggaagacaaaaaggcagc

SEQ ID NO: 52652 - DNA, 275 bp, Glycine max
  unsure (1)..(275): unsure at all n locations; Clone ID: 701141927H1
taagtctntccttcctctgccttatanttcttgtganccttttngtaggtagcattgaaagtgcaccagcaaacgtgaagccaagccattatgctgcacccttcaataggagtgtttttccttctggttttctatntggnntaggctctgcagcttaccagatagaaggngcagcagctatagatggcagangaccaagtatntgggacaccgatactnaacagnaacagggncnattgggatcatngtgatggagncnagncaattgattntnt

SEQ ID NO: 52653 - DNA, 280 bp, Glycine max
  unsure (1)..(280): unsure at all n locations; Clone ID: 701141928H1
ctgaagcatctgcaagtgatcctgacttggctctggcacttcaattgtcaataacagatagtgcaaaggatcaatcaagcnagtcagacatgagcaaattgttagctgatcaancctttgtatcttctatccttgcatcgcttcctggggttgaccccaaatgacccttctgtcaaggatttgctggcgtccatgcaaaatcagtctgagcctcaacagaagaatgacgacaagccatcaaacgaggaggagaagaagtaatctttaagagccattttcc

SEQ ID NO: 52654 - DNA, 183 bp, Glycine max
  unsure (1)..(183): unsure at all n locations; Clone ID: 701141930H1
tgntgtcaccaacaagcaaaggggaaactgaggggaagaaggcacgactttgttatttatcttttggtttcttccaaccgttgtgtgttaaactaaattgattaacgttgttggatgtgagtcaccatagaatttgttatctatgttcttgtaatgcatttattgtcacactgcatgattttg

SEQ ID NO: 52655 - DNA, 287 bp, Glycine max
  unsure (1)..(287): unsure at all n locations; Clone ID: 701141931H1
ctttctttcttcaccatgtcacttgctgggaaaatcaccactganatcggggttcatgcaaccgctacaaagtggttcaacctcttcgcaacacaactccatcatgttcaaaacctaactgatagagtgcatggaaccaagctgcatcaaggtgaagactggcatcacaacgagacagtcaagcactggacttataccatagatggtaaggttacaacatgtctggagagnattgaatccattgatgaacagagcaaaacaatcacctacaagctcttcagtggtga

SEQ ID NO: 52656 - DNA, 287 bp, Glycine max
  unsure (1)..(287): unsure at all n locations; Clone ID: 701141932H1
gtttgtctctgctctttgattgcagcgtccggcatgtgattgatgtgtgaattttgaggtgctgtgttccgtttgatgaaaatgagtgttatccgagttgctccatgtcttcctggggtttatgctcccccaatcacgtcgtctcagttgcgtcgccgcgattttaactncaacgccaccttcattgccgacggcgtttgaccctatctctgtcacttccctgagcctaaaagccgaaccctcgcctcgcttacatggctgcatgggctcaaatctcgccaactctg

SEQ ID NO: 52657 - DNA, 289 bp, Glycine max
  unsure (1)..(289): unsure at all n locations; Clone ID: 701141933H1
cgtgaacaagcctcaggtaagccaaagccatggttaagcataacaatgttatccccaacggacacttccgtaagcactggcagaactatgtgaagacctggttcaatcagccagcacggaagacaagaagacggttggcttcgtcagaagaaagctgtgaagattttccccagacctacagctggaccttcttagacccattgtacatggtcaantttgaaatancacctgaagtganacctnnaaggggnttccccttggaggaactcanggcagcggggntccccaa

SEQ ID NO: 52658 - DNA, 279 bp, Glycine max
  unsure (1)..(279): unsure at all n locations; Clone ID: 701141937H1
gcgatccgaganaaactctgtaaacatgttggtttaccaggacctccttacaggtgatgagcttctctctgactccttccgttacaaggaaattgngaatggaatgctgtgggnagttgangggaagtgggttgttaaaggagccagttgatgtagaccattggtgncaaacccttnctgnctgagggtggagganaagatgagggagttgatgatgcagctgttaangttgttgacattgttgacaccttccgcntncnggcgnnaccngttnnnata

SEQ ID NO: 52659 - DNA, 279 bp, Glycine max
  unsure (1)..(279): unsure at all n locations; Clone ID: 701141938H1
atcggtgttcacttgatctcatcataatcgtcagcgtcaattgaagaagatgccgatcagaaacatgcgncgtcggaaggcctgaagaggcgactcaccccgacacgttgaaggcggctttggctgagttcatctcaaccttcatcttcgtgttcgccggcttcaggcttccggcatcgcctacaacaagcttcaccgacaacggcgctgccaccctggccggcctcatntcngcntncatcgnncntgcatncncctttnngnccccntcccgggggc

SEQ ID NO: 52660 - DNA, 231 bp, Glycine max
  unsure (1)..(231): unsure at all n locations; Clone ID: 701141939H1
anttcacccattcataagtgtngttgttactgctgctcttttctcttttcttttctctttagttctctcttcccctttctttttctttttcttcttnttcttagcttgtttaagcttttcttccattaacatattatcanaatgtgtggnattcntgcngttcntggntgtnctgatgatntcgagccaaaagggtccgcgtgctgagtccccgaagtngacncnccgngc

SEQ ID NO: 52661 - DNA, 277 bp, Glycine max
  Clone ID: 701141940H1
gtttatcgtgaggagaatatgaagttgtttgttttctttgttgctgcagtagttttggtagctggccatgccatggcgcaggctaccaaaggttccctctccgaatgaaaactggctatggtgagcgttcttcggaggtaaaatgcgcaagttttaggcttgctgtggaagcacacaacatccgagcctttaaaaccattcctgaagagtgcgttgaaccaacaaaggactacattaatggcgaacaatttagatcagactcctaaaacagttaccc

SEQ ID NO: 52662 - DNA, 274 bp, Glycine max
  unsure (1)..(274): unsure at all n locations; Clone ID: 701141941H1
gtgaatccaccagagtctgatgtcatcatccatccaggctgctattagagggttattggctcagagagaactactacagcttaagaaagtagtgaaattgcaagctgctgttcgtgggcacttggtccggagacatgctgtaggaaccctgcgttgtattcaagccatcatcaaaatgcagatccttgtgcgagctcgtcgtgctggcagtcacgtctggaaaatcatttaaatcataaggatggcaaaagggattcctcagaagnttgggaaa

SEQ ID NO: 52663 - DNA, 276 bp, Glycine max
  unsure (1)..(276): unsure at all n locations; Clone ID: 701141943H1
ctttttgccaaaatctcaaagtgctgcagattacaaggcagcaantagagctctggacttcttctttggttggtattctgatccggttttctatggtgactatccggagagtatgaaatcttcagtaggttctaggctcccaaaattcacaaaagctgaatctgaaggtctaaaaaattccatagattttcttggtgtgaattactacaccacttattatgcggaacatgctgaactgtccagtgccaaccgaacttctacacagacatanngnac

SEQ ID NO: 52664 - DNA, 277 bp, Glycine max
  unsure (1)..(277): unsure at all n locations; Clone ID: 701141945H1
aatctctggngcttggatcatttactgacttgaatatgcaaaacatgaggnaatctatcttgactcgtgtgaatttgaggaggtcaaccgaaagatggtttttgaccagggatgaggttgtgcatatgcaattgagatgttggtgctctcaacagccgtcagctctgattcaaatactggaccgagtgattgcactggccaagaaatatgataaaatggatggctcnaaggttactgaaacagctgattttcaaaaagattgaacctggacagtttg

SEQ ID NO: 52665 - DNA, 191 bp, Glycine max
  unsure (1)..(191): unsure at all n locations; Clone ID: 701141949H1
gaccttacgacgcgtcgttcactcggttatggctatgttaatttcagtaaccctcaggatgcggcgagggcattggatgtgctgaatttcactccactcaacaacagaccnnttaggatcatgtattctcatcgggatctagtcttaggaagagtggtactgcgaatatttttatcanngaatttggatag

SEQ ID NO: 52666 - DNA, 250 bp, Glycine max
  unsure (1)..(250): unsure at all n locations; Clone ID: 701141951H1
ctttgattcatcaatggcaaccgacgaggaccgtgaaggangtttcgcctcacgatttcncgaaggcttacgcctcccatctcaagcgttccggcaagatggagcttcctgagtggactgatattgtaaaaacagcaaaatttaaggaattggctccatatgatcctgactggtattatgttagggctgcctcaatggcaagaaagtttattgagaggcggtcttggtgttggggntnccagaggatcta

SEQ ID NO: 52667 - DNA, 239 bp, Glycine max
  unsure (1)..(239): unsure at all n locations; Clone ID: 701141953H1
ttacacctgacactcagccattgttcttgnatgaactgncaaaatataatcttggagangactgccctgtatttgacaacttatttgaattttgtcagatttatgctggtggaactatagatgctgcacgtcgattaaacnatcaactgtgtganattgctatcaactgggccggtggactacatcatgccaaganngcgaggcatnngatttgttacncantgattggttttcggcnc

SEQ ID NO: 52668 - DNA, 277 bp, Glycine max
  unsure (1)..(277): unsure at all n locations; Clone ID: 701141955H1
agcagagaaagaggacaaaaaatgaggtccttgagaagacagtttgtaattgcatattatagttgtgagaaaattttgtttgatgttctgcacccttagctttatggagatcatgagttttaaaacaccgctattgcaattgtttttttgaattgaagtctgttaattttattccgcactcnggntcgtnttggattatntctctgattttgccctnnatttgtttgncncaaaaannannaannnggggnccccncgaccaagncatcncnccccc

SEQ ID NO: 52669 - DNA, 275 bp, Glycine max
  unsure (1)..(275): unsure at all n locations; Clone ID: 701141957H1
aacatagtatactctgaaacaatcatgtagtactcttcgtcttcgttttaaganaaagaacattttggaggaaaagcgcatacgacgtttgcgagcgaaattgcgatttatttattaccaaagagaagaaaaaaagagaaaagaagaggcgaatggcagatcagagcgagcattcgaaaacggcgtcgcatccggaggaccaggaccgtcccgttcgagtgtacgcggatggcatctacgatctcttccactttggccacgntcnnatcctcgag

SEQ ID NO: 52670 - DNA, 278 bp, Glycine max
  unsure (1)..(278): unsure at all n locations; Clone ID: 701141959H1
ggactaccttctgatggaggaggagttcgtggcgaatcaggagcnactcaagccgcaggaggagaaggccgaggaagacagatccaaggnccgatgatctccgaggctctcccatgagcgtcggaaacctcgaagagctgcatcgacgagaatcacgctattgtctcctcctccgttgggccngagtactatgtncggaatccngtcttcgttgataaggatncagtttntntnntngttgtgctattttgatgcataataaggttctttctgttgtt

SEQ ID NO: 52671 - DNA, 141 bp, Glycine max
  unsure (1)..(141): unsure at all n locations; Clone ID: 701141960H1
cttacttctacgacggtgatgtcggtagtgtatactttggggcgnanatccaatgaagccccaccggctttgcatgactcatcatcttgttctctcatacgatcttcataagaagatggagatttaccgtccacacaacat

SEQ ID NO: 52672 - DNA, 277 bp, Glycine max
  unsure (1)..(277): unsure at all n locations; Clone ID: 701141961H1
gtcatatgcttgtctcanagattaanccatgcatgtgtaagtatgaactaattccagactgtganactgcgaatggctcattaaatcagttatagtttgtttgatggtatctactactcggataaccgtagtaattctagagctaatacgtgcaacaaaccccgacttctggaagggatgcatttattagataaaaggtcaacacaggctctgccngttgctttgatgatcatgataactcgtcggattcgcacggccttgtgccggcgacgcatca

SEQ ID NO: 52673 - DNA, 276 bp, Glycine max
  unsure (1)..(276): unsure at all n locations; Clone ID: 701141962H1
cggcaaggcaacttcactttggaccaaattaccctccatctcccttcaaatnncaccgaacccttgcccttccctttttccactncagattctctccncccactccacagtcaactccatgtgcgcttgaatggatttggtggaaggcgtcggagagagttcctcgccgccgcgcgccttcagcggctacagcaactacgacgttccgcaacgatgtctacaaccgccttcttncaaaccggccacgaccaagccgtttccaaccccgacttccgc

SEQ ID NO: 52674 - DNA, 236 bp, Glycine max
  unsure (1)..(236): unsure at all n locations; Clone ID: 701141965H1
gggacattngcttgtgtnccnganatttggngctgctgcnactgctattactactactccttcttcattgagttctttatcttcttctaggtggccaaanacgnagttcatgctttgataagactgaggacaagtcttgaaaccaagtaccaaganaatggaccaaaggctccattgtgggaggatatatcagcaggaatgcgangctcgggtacaanaggatcccaaaagatgca

SEQ ID NO: 52675 - DNA, 268 bp, Glycine max
  unsure (1)..(268): unsure at all n locations; Clone ID: 701141967H1
gtctgatctaanttgttcgccattaatgtagtcctttgttggttncaacgcactcttcaggaatggcgaacaatttagatcagactctaaaacagttaaccaacaagctttcttttatgctagtgaacgcgaagtcccatcacaacgacatntttatatncggcatagataacaccgtactctctaatatcccatactatgaaaaacatggatatggggtggaggaatttatgaaacttatagatgangggttaacagggcgcccccc

SEQ ID NO: 52676 - DNA, 109 bp, Glycine max
  unsure (1)..(109): unsure at all n locations; Clone ID: 701141968H1
cggcaagcaggggttggtttccttctttcttctcttgggcgggcacatncacttccctctacaagtncaagaatattcattcctctcttcctctttccaccacctattt

SEQ ID NO: 52677 - DNA, 273 bp, Glycine max
  unsure (1)..(273): unsure at all n locations; Clone ID: 701141969H1
ccctagttcatttttcttctccgttctcttctctctctgttcttccactccactctcattcattcaccatgacgaaacaacatgccaattggtctccttacgataacaacggaggatcatgtgttgcgattgctggagcagattactgcgttatcgccgcagatacgagaatgtccaccggttacaacatcctgcactncgcgattactccaaaatctcccaactggctgagnagnntgtnatggctcaccggnttaaaggaggatgtcaanc

SEQ ID NO: 52678 - DNA, 272 bp, Glycine max
  unsure (1)..(272): unsure at all n locations; Clone ID: 701141970H1
ggcggcaacagggagagaagatgaagttcaatccacgtgtgtcgagcagccgccgcaaganccgaaaggtcatttcacggcgccgtcgagcgtgcggcgggtgcttatgagcgcccctctgtcggcggactgcggtccaagtacaacgtgaggtcgatcccagtacggaaggaggacgaggtgcaggtggtgcgaggaacatncaagggttcgccaggggaaggtgactcaggtctnccgtccnaaatnggtgattccanattngncccnac

SEQ ID NO: 52679 - DNA, 235 bp, Glycine max
  unsure (1)..(235): unsure at all n locations; Clone ID: 701141971H1
ggatgcatgcacaccaaagagtgtggttttgatggtgaccaactacaaaagggttccacctgatcaaacacaccctcttgcaatttatttttttgttttctcaaagtgtatgaggttccaacttggtagtttgagtgggaaattggagctgttgttgggaccattgttaaggtctctcctatgctgttgtccaggtcctantacaacatnttactaaccaagttggaacacccac

SEQ ID NO: 52680 - DNA, 271 bp, Glycine max
  Clone ID: 701141972H1
gaatttcgatgctcagtcatctcttttaccattctcttctctcttgctcttgcaggagagagccatgtccatgcatcgctacctgaggaagattattgggaagctgtttggccaaacactcccattcccactgcactgcgagagcttctaaagcctctccctgcaggtgttgaaatcgatgaactccctaagcaaattgatgatacacagtacccaaaaacattcttctataaagaagacttcatccaggcaaaacaatgaaagtacattc

SEQ ID NO: 52681 - DNA, 249 bp, Glycine max
  unsure (1)..(249): unsure at all n locations; Clone ID: 701141973H1
gccatggttctctccaaaaccacctccgaatccgacgtctctgtccactcaaccttcgcttnntcgatatgtcagaacttcgcttcccaggtttaagatgccggaggagtcgataccaaaggaggcagcgtatccaaataataaacgatgagttgatgttggatgggaacccaaggttgaacttggcatcattgtgacaacctggatggagccagagtgtgataaatcatcaggctgccattaataaga

SEQ ID NO: 52682 - DNA, 268 bp, Glycine max
  unsure (1)..(268): unsure at all n locations; Clone ID: 701141975H1
cnagatgnngtcatnancangacaaagttcancattcttcttctgngcaaaattttggggcancaactaactaaatcctcaaaacagtgcaatntagtgaagattgttgggtcagttatggcagcgttgatttccaaaangatcctangttgttcttctgggtccttgcattcactaggacgatgttantttgattcaccgggtttgcctctatttatcaaaccacgtgatgtatgccggcggtttatcggggagagangttttccgc

SEQ ID NO: 52683 - DNA, 271 bp, Glycine max
  unsure (1)..(271): unsure at all n locations; Clone ID: 701141977H1
ctaagcattaatgactagttctaacaaaaggcttgangttcaaacagaagatcaaactccacataaatggtgtgtttcactgggggaagaggctttcaagagatttttcagccagattaatccaacagtgcataaggtttttggtgatggatcacttttcagtccactgttgtttgggaagttcttgatcctctgatgcctccctctatgggagtttgagtcagatgtgttgttatctcattaaggagttccagccaaaacactgtggatt

SEQ ID NO: 52684 - DNA, 236 bp, Glycine max
  unsure (1)..(236): unsure at all n locations; Clone ID: 701141978H1
ggaacagctgaagccaagtgctgctaactcttcccctctgcactcccctgcggcttcttggacagagcagccaccgtccacggcgacgtcccttnncgttgtntataacaacaccacctttcacgtggtcccagacgcgccgccgatgcctccagctggcctccgccctctcctcccttggtatccgccgcggcaggtgcgtctccgtcgtggncccccaacatccacacaacata

SEQ ID NO: 52685 - DNA, 276 bp, Glycine max
  Clone ID: 701141979H1
ttcaatttgttgactggtgccccactggtttcaagtgtggaatcaattaccagcctccaactgttgttcctggcggtgatcttgccaaggttcagagggctgtgtgcatgatctccaattccaccagtgttgttgaggtcttctctcgcatcgaccacaaatttgacctcatgtatgccaagagggcttttgttcattggtatgttggtgagggtatggaagagggagagttctctgaggctcgtgaagatctgctgccctggagaaagattatga

SEQ ID NO: 52686 - DNA, 281 bp, Glycine max
  unsure (1)..(281): unsure at all n locations; Clone ID: 701141980H1
attttggggagtttagttcanggtcanggccangggccaaatcaaaatttggaagcaccgaagaangctggcatttgtgccactaatatggaattactcaaattcaatggtgcaactccccatggtactattgattcatctctcacgtcagaatctcatcaatctgatgaatggaacttcggatttaatttcaattctagttatgtgggtgaagacaatcatagttcagattcatatttcaaaaccanaaacaaccaggatgataacaacagaaacaatgc

SEQ ID NO: 52687 - DNA, 267 bp, Glycine max
  unsure (1)..(267): unsure at all n locations; Clone ID: 701141983H1
caaaccttgcccagactacanacgtnttacangagggttttaagnttgncatataaggngatggcanaganttattccatgttttggacatgcagccacaatgccnnacattgtgtggtggaaaacctgtgtgcgagattcttttgtcagggctggatatgantacgatgnagagncatttgaganaatctcagacgtatatatgcgtcctttgnnntcatctgctccatatnctgtatttccngnntncntacgantnaccanacg

SEQ ID NO: 52688 - DNA, 266 bp, Glycine max
  unsure (1)..(266): unsure at all n locations; Clone ID: 701141984H1
ctcagattcagcaattttctattttcttctctcatggcttcagattccaaaancngatttccctgctgatgacaaagctggaacagcagagaataaagcatccaaagatgaaacgtcatctaaagattctccagcagcacaaagagctactacagctacttctggacctgcaactggttttccaggcaaccctttgatttctctggcaatgtctggcctgctcaatgatccagtatccaggattggctgaacntnggcaangnncc

SEQ ID NO: 52689 - DNA, 266 bp, Glycine max
  unsure (1)..(266): unsure at all n locations; Clone ID: 701141985H1
ccggatcatacaagtaaatgcatttggtgatccaaatcgcgctgcagatattactaaagatgttggtgttgatgttaagttcacttattctgttatctggaatgccactaaagtacgttttgagaacaggatggacagatacttgagagcttcgttgatgcctgtccaccagcaagttcattncgttctcgtttgttaactcaattgtcatcaatttgcttttgaanggntcgcntccccnngtaaaaancggctctgnggngtcc

SEQ ID NO: 52690 - DNA, 267 bp, Glycine max
  unsure (1)..(267): unsure at all n locations; Clone ID: 701141986H1
gtcgatgtcagcactaaggtgaagaacaagaacatcacaactgatgtcaaagtggacactaactcaaatctgcgtacaatcattactgtggatgaacctgcccctggactcaagacaatttttagctttaattttccagatcagaaatctggcaaggtagaactccagtaccagcatgagtatgctggaatcagcaccagcattggattgacagcaaatctgtngttaacttctcggngtggtnggaaataantgggtncccntngg

SEQ ID NO: 52691 - DNA, 267 bp, Glycine max
  unsure (1)..(267): unsure at all n locations; Clone ID: 701141987H1
gctgtctgcgaggacattgatcaggtatntatggtttacatctaagtcatgtgaagttttattttgttaaattggtagatnaaaggtgttctgcttcattcaatttgaatgtttcttaggctagttgtcttctcanggtagctgngtttattgatagccaagntagtaaaatacactgccagttttaatgttggtngtttttaccaaaagnngnaccttggcngtctgaggtntgactttacaagctctccttttttgcgcncctnc

SEQ ID NO: 52692 - DNA, 269 bp, Glycine max
  unsure (1)..(269): unsure at all n locations; Clone ID: 701141988H1
gttccagcggcggtggtggcggttttagtggtggtggaggtggtagcgggagtggaacgaagaagaggtttaggacgaagttcacgcaggagcagaaggataagatgcttgcatttgncggaggagctagggtggagaattcagaancatgncgaattgctgtggaacaattctgcgctgaaacttgcgtcaagagacntgtgctcaaggtttggatgncncaatancaaccacancttgctattctgagcaacgttcnagcgggancc

SEQ ID NO: 52693 - DNA, 262 bp, Glycine max
  unsure (1)..(262): unsure at all n locations; Clone ID: 701141989H1
gccttgctttcttcttcacttcaaacttgcnaatctcgaagatggcaataganttggcatctcccaattgggttccaaccgcagccgcatgtttggcagcnttggccgccctcntcctcttcctcctccgcggtctccgncgccgtaaatacaatctccccccaggccccaagccctggcccatcataggcaacctaaacttaatcggntcccttcccacaccagtncgattctcacgctgagtaaaacatacgggcccatc

SEQ ID NO: 52694 - DNA, 269 bp, Glycine max
  unsure (1)..(269): unsure at all n locations; Clone ID: 701141990H1
atgagattatagcaaatggcttaaagccatttgtccacgctgtttcattgggacctcccacaagctcttgaagatgaatatgggggatttctcaaacctgaaatantngaggacttccgtaactatgctgacttttgcttcaagacatttggtgatcgggtgaagcactgggtaaccctaaatgaaccatatggctacagcgtgaatggctacagtggtggaaattttgcaccaggtagatgttctaactacgttggaaaatgccctgc

SEQ ID NO: 52695 - DNA, 268 bp, Glycine max
  Clone ID: 701141991H1
atccaatctccgaatcctttaatcgcattgcaaccatgtcgaggagaaaggtcagagagccaaaggaggaaaacgtgactcttggcccagctgttagagatggcgaacatgtctttggcgtcgctcgcatatttgcctcctttaatgataccttcattcatgtcactgatctgtctgggagggaaacgcttgtccgcattcactggtggaatgaaggttaaggctgacagagatgaatcatctcctatgctgctatgcttgcagctca

SEQ ID NO: 52696 - DNA, 272 bp, Glycine max
  unsure (1)..(272): unsure at all n locations; Clone ID: 701141992H1
gggacaccccctaccattgccaaccctgattacaagggcccatggaaggnaaagaaaatcaagaaccccaactataaaggaaaatggaaggcaccattgattgataacccagatttcaaggatgaccccgacctatatgttttccccaacttgaagtacgtgggcattgaattgtggcaggtgaaatctggtactttgtttgacaatgtcttaattactgatgatcctgaatatggccaagcaatggctgaagaaacatggggcaagcacaa

SEQ ID NO: 52697 - DNA, 272 bp, Glycine max
  unsure (1)..(272): unsure at all n locations; Clone ID: 701141993H1
gtgcaaagccatcgtctttcttcttcagacaagtagtttggtaaaanatggctgatgctgaggatattcaaccccttgtctgtgacaatggaactggaatggtgaaggcaggatttgctggtgatgatgctcctagggctgtgtttcccagtattgttggccgacctcntcatactggtgttatggttgggatgggtcaaaaggatgcctatgtaggtgatgaagcccagttcaaaaagaggtatctactttgaagtacncattgagcnggt

SEQ ID NO: 52698 - DNA, 274 bp, Glycine max
  unsure (1)..(274): unsure at all n locations; Clone ID: 701141994H1
ggggtattgagattgagattcaagtaatggggaagagcnaggttcttgtggtggggggaactgggtacatagggaggaggatagtgagggcaagcctggcactgggccatgagacctatgtggttcagaggccagagttgagcctccagatagagaagctgcagaggctcctctccttcaagaagcaaggtgctcatctcattgaggcctctttcaatgattcacaagagccntgttgatgctgtgaagcaggttgatgttgtcatcagtgcca

SEQ ID NO: 52699 - DNA, 275 bp, Glycine max
  unsure (1)..(275): unsure at all n locations; Clone ID: 701141995H1
ggcaataagcaaataacaatgttcaacgcttgacattgtggtgttagtaacttaaccaccgttctggaacttgggattattctgatacagcacctccaccgttactactatgggccgtcactcttccagcaaccantctccncctcctcacgccgccaccggagccaccgcagcagntctctccgcctctacgagacaagcacgagcattccggctgcagtacggccaaaccggttcggtaggttcgccggattcttccattcgctcgnctctcc

SEQ ID NO: 52700 - DNA, 82 bp, Glycine max
  unsure (1)..(82): unsure at all n locations; Clone ID: 701141996H1
gttccttcctcaacccacaggctgntactagactgtaanttcagaagtcagttgaagagatgggtcgtggagttagcagtgg

SEQ ID NO: 52701 - DNA, 292 bp, Glycine max
  unsure (1)..(292): unsure at all n locations; Clone ID: 701142001H1
ctggattagggtttngctgaaagatccgagttgaaatgggtntcnttggtaccattttgncggtttttgggattggggttgggatttcgattggtctcgtgtctgggtactttctcttcatctacttccaacccancaatgttgncggatcctgaaatcaagccattgtcggagcaagagcaagagactctgcaacgaatgtttccagagattcctctctggataaaaatnccggatttgatcggctgatggctgaacaagtttgtagaatatagtggcgtatctgataagg

SEQ ID NO: 52702 - DNA, 293 bp, Glycine max
  unsure (1)..(293): unsure at all n locations; Clone ID: 701142002H1
cnacaagctcgtgaactcaaagccggtcttccccccctcaagcacaagtttgtcttctggtacacgcgccgaacacctggagttcgaaatcaaacatcatacgaggacaacataaagaaaattgttgaatttagtacggttgaaggattttgggtctgctactgccatcttgctcgtcccgcttctttacctagtccaacagatttgcaccttttcaaggaaggaatccgtcctctatgggaggactctgctaatgcaaggtggtaaatggattatacgattcaaaaaggttg

SEQ ID NO: 52703 - DNA, 282 bp, Glycine max
  unsure (1)..(282): unsure at all n locations; Clone ID: 701142003H1
gcggcggcgtgtgcngcggtggcgctggtggtgcgccaccgcatgntgagctccggaaagtggggtcgcgtggtggctattgtgaaagagtttgaggagcagtgtaggaccccaantgggaagctgagacaggttgctgacgccatggacgttgagatgcacgcgggtcttgcttctgaaggtggcagcaagctcaagatgttgatcattatgttgataatctccctctggggatgagaaaggancttttatgcatagacttggtggcaaantncgaacctc

SEQ ID NO: 52704 - DNA, 291 bp, Glycine max
  unsure (1)..(291): unsure at all n locations; Clone ID: 701142004H1
cncaatatacttagccatatctttacttcccaaaacttgctctacaatgagtttccttcgttcttttgcaagaaacaaggatatatcaaaagtaggacgcagaggtatccattgcatgcagaaactatgtgcagaaaaaatatctcctgattcactagagaaggcccaaaatcgtgtgatagatgctgcactcacacttgttccgagaaaatacaaggcttaagaaagaatcgtgcatagtttgggaggtgctgtggcaattcaactcttcttggagttcctttgggtcat

SEQ ID NO: 52705 - DNA, 292 bp, Glycine max
  unsure (1)..(292): unsure at all n locations; Clone ID: 701142005H1
ggctgaccgaaaccatttatagtttctacggagcacaatgttgttccatgaaacttctgcaatacaatcttcttcgaaaattgcaacaaaaatacatacaacggaactcatccaatttcaatggttgcgagagctaacggaattgagtgtgtttgaagtgattatgggtcctatgaggatgctgaataacagaaagaaaggacagcagaagaagttttgttaacctataccgtatttattatatctatatttaccatttttttctngccattccatacgatagagcgngacc

SEQ ID NO: 52706 - DNA, 287 bp, Glycine max
  unsure (1)..(287): unsure at all n locations; Clone ID: 701142007H1
gggtcctgtacgaggttttggggaaaagcttagctccattattgatgcctgcctttcacaatatgatgaggaggcaatcttctttgatgaagctgtgagaaatgcaaaacgaaagcaattggaatcaaaggctttggatcttgtgtaccctgcttatacaacattgttagggcatatacgctctaaagctctagatgattttaagactaagctggaacaatcactaaacatggagaagggtttgcttcanccgttcgcacttggncccagtctattatgcttcagtc

SEQ ID NO: 52707 - DNA, 248 bp, Glycine max
  unsure (1)..(248): unsure at all n locations; Clone ID: 701142008H1
atgggaacaatggagagcttgaagttcttggtgtcttcaaagtacatcagagatcttgccactttagtggttgcttatggaatcagcatcaatcttgttgaggttacatggaagtctaagctcaaagctcagtttcctagtcccaatgagtactctcttttatgggtgacttctctactgcaactggattgccacattcacaatgatgcttgtcagccatttatntttgacagtatggatggggatcc

SEQ ID NO: 52708 - DNA, 290 bp, Glycine max
  unsure (1)..(290): unsure at all n locations; Clone ID: 701142009H1
cttgactattacacnttccccattttgatttgatgntgattgnnttggcctcttgccagcaaaacagaatgtgnaagctcaagttcgccgaaggagggaatccatggcttcggacattgaacaatcacgttggaagacaggtgtgggagttcgatcctaagcttggatcgccgcaagatcctcctcgagattgagaaagctcgccagaattttcacgataaccgtttacccanaaacacagcgntacatctacttatgccggatgcagttcgcaagngaggaacccaacc

SEQ ID NO: 52709 - DNA, 282 bp, Glycine max
  Clone ID: 701142010H1
ctctcacacacacactctgcaataatctctcttctcttcttcagtctctcaactactgcctaaccaaaccttccatttccgcaggcagtttcttaaatttggagtctgatgtctccgccactgctggttactgaagaagacgaaggacagagcaatgcctcgatggtagcatctgcatcttcaccctcctcggagtgtttcaccctaaatgaggctagattgaaagaacgcaattacctgggatgtcagattgctcttcggtggacagttctattgtcccga

SEQ ID NO: 52710 - DNA, 281 bp, Glycine max
  unsure (1)..(281): unsure at all n locations; Clone ID: 701142011H1
gttggttcctcaatcactgtggtggggacaccccattatgctcacaaggngtatgctcccatgcttncaaggtcaangaaaggtgatggattggcattggtttcggtttcacagtttgtggttgaattacaagggctaaagtcagtggaaggggaagatcctcctaagattcttcacttgaatcctaggttaagaggggattggagcaaacggccagttattgagcataatacctgttatcggatgcactggggaacagctcaaanatgtgatggtttgcc

SEQ ID NO: 52711 - DNA, 279 bp, Glycine max
  Clone ID: 701142012H1
cagtttcaccgcacgaatatcttgttgtttggagcgatccgagaaaaactctgtaaacatgttggtttaccaggacctccttacaggtgatgagcttctctctgactccttccgttacaaggaaattgagaatggaatgctgtgggaagttgaggggaagtgggttgttaaaggagcagttgatgtagacattggtgccaaacccttctgctgagggtggaggagaagatgagggagttgatgatgcagctgttaaggttgttgacattgttgacacat

SEQ ID NO: 52712 - DNA, 284 bp, Glycine max
  unsure (1)..(284): unsure at all n locations; Clone ID: 701142015H1
gaaagatngaggggaaggagcaggatgtgtcgttgggagcgaacaagttccccgaganacagccgattgggacggcggcgcagagccaanacgacggcaaggactaccangagncggcgccgncgccgctggttgacncgacggagtttacgtcatggtcgttttacagagcagggatagcagagtttgtggccacttttctgtntctctacatcaccgtcttaaccgttatgggagtcgccggggctaatctaagtgtagtaccgttgggatcaaggaatcgc

SEQ ID NO: 52713 - DNA, 290 bp, Glycine max
  unsure (1)..(290): unsure at all n locations; Clone ID: 701142016H1
cacctttccataaacacaaccttctntcactttgctttactccttcattcattttcctctcatactcaaaacnctgcatcaaaatgctcatcattgttcacaccacccattcttgaaaggtacttcttttctcgtttttccaaccaccccatttctaaaaaagacattttcccttcaagtttcttcatcatttcttgtagtttcgagtctttgattattggggtggttaatattgcacttgcactatggaaacttgcacggctctatgtttttaacggcgatcacagcat

SEQ ID NO: 52714 - DNA, 298 bp, Glycine max
  unsure (1)..(298): unsure at all n locations; Clone ID: 701142017H1
ttcttaagcttgctactgagtttccacactgcataccttaggtcttccgaattcgaagttantttgcaagatggctaaggaaaaggctcagatcaacattgtggtggttggtcatgtggaccctgaggaggcaaccaccattaacgagctgaagaagcctgttgtggagaaagaagctccagggcatgccatatgagggcatgcacgtaacggcctccggaggggaaccagaaaattatgttaacaaaataatctggaaccctatgtatcagtgtcatcatcagtgtgtagtttnagc

SEQ ID NO: 52715 - DNA, 293 bp, Glycine max
  unsure (1)..(293): unsure at all n locations; Clone ID: 701142020H1
cgcaaaatcccgtgacggagtgcttccactgcactgtcatacgatggcttcctccaacanctcccaancccnnnaaataagaagagtaccaaaaaatccgaaatctccaaagccgnaaagaagaaaaccaaaaacgctgaaatccccaaaaccgatggcaaaacgaagaagaacaaagaaatctcacaagaggagaacaagaagaagattaagaaggccaagctcagcaacggcattcaaaacagcgagacgagggatccaaaaagggagtagcagcagaaggaaacggagaa

SEQ ID NO: 52716 - DNA, 289 bp, Glycine max
  unsure (1)..(289): unsure at all n locations; Clone ID: 701142022H1
aattctttgagttgaacacaggggccaagattccttctcttgggttagggacttggcaagctgaacctggtgttgtagctgaagctctcaccacagccattcaggttggatacaggcatattgactgtgctagtgcgtataagaatcaagcagagattggttctgctcctaagaagctttttgatgatggtgtggtgaagcgtgaggacttatggatcacttccaaactctggtgttcagatcatgcaccagaagatgtgccaaaagcatggataanacattacaggna

SEQ ID NO: 52717 - DNA, 287 bp, Glycine max
  unsure (1)..(287): unsure at all n locations; Clone ID: 701142024H1
atttttcatcttttctcttgaaccttccttcgcncatcttctccacnactccacacaacnttanacttanancnaaaccaaacgnnnnnnnnnnnnnnnnnnnnnncaagagantgattccgagaagttggtgtgatctgatgcgagtgttaagaagataatctgaggagaaaaaagaaagaaataaaagtttcattttttttttcaatggagtcagttcttcagcagcancctcccatgtttttggatcatcaccagcagcagatgattcagggttgacagttacc

SEQ ID NO: 52718 - DNA, 282 bp, Glycine max
  Clone ID: 701142025H1
gagcttcagaattacttgttgtaattgaagggagcatcctagctggattcatttcttctgccaacattgtctacctcaaaactcttaagaagggggatgttatggcattccctcaaggctgcttcatttccaaatcaatgcaggcaaatcttcagccctggcaattgtaagcttcagtagctccaatcctggtctacaaattctggacttcgctttgttcaaaagtagtttccccacaccattgatagtacaaaccactttcctgatgctgctctggtgaag

SEQ ID NO: 52719 - DNA, 280 bp, Glycine max
  unsure (1)..(280): unsure at all n locations; Clone ID: 701142027H1
gcaagattatgtcaagaccctttcttgcctcctctcattaggataactggctttgccaaatttgcaattttntttttgggttcagttacntggggtgctctttttaccttctctaatttgttttccttgtaaaaagccttgaaatttgatggagtatattattgattgcnattactctatgcaattcatcaaaatagttttggattgtgagatgatttctatgcatatgatccacctcataggagaatagttaaatttttgtgccattttttcacttaac

SEQ ID NO: 52720 - DNA, 284 bp, Glycine max
  unsure (1)..(284): unsure at all n locations; Clone ID: 701142029H1
aaaaaagttaagatgggtaaagtttattttaatttatattaaaaatttgtgncgatacctagcttcttcattattttacttttatctctttctgatgatttgttaaagaaaatcaaatttgtggtacatcaacttggtagtgtcaaattgttaataacttgtgttggtttatgactgagcagagnntgatggggccaacaatggtggcagaagcaagaacttgtgagtctcagagccaccgtttcaaggggccatgtttgagtgacaccaactgtggctctgtc

SEQ ID NO: 52721 - DNA, 289 bp, Glycine max
  unsure (1)..(289): unsure at all n locations; Clone ID: 701142031H1
ctttgaaaaggattgtaaagctgaatgaggggtttgatcgttttnttgagagggagcttgaaattcttggtagcatcaaacaccgttatctagtgaatttacgaggatattgcaattcacctacgtcaaagttgttaatatatgattacctaccaggtggtagtcttgacgaagcacttcatgaaagagctgatcaactagactgggattcgcgcttgaatataatcatgggagctgcaaaagggcttgcctacttgcaccatgattgttcccccaggatccatacacc

SEQ ID NO: 52722 - DNA, 288 bp, Glycine max
  Clone ID: 701142032H1
tgaatctcgtgctataatgaggtattatgcagaaaaatacagatctcaaggggttgagttgctgggaaaaacaatagaagagaggggtctagtggagcaatggctagaagttgaagcacacaactttcatccacaagcctacaacttgtgtcttcatggtttgtttggttcactatttggtgtgactccagatcccaaggtgattgaggagagtgaagcaaagctggtacaagtgttgaacatctatgaggagaggctctcaaagactaagtatttggctggggattc

SEQ ID NO: 52723 - DNA, 292 bp, Glycine max
  Clone ID: 701142033H1
ctaaacatgttcgacatttaatcacagtctctaagcacacattaataccatcggagaaggaccttccatctaccaacaacacgtagtattatttcattgatttctccctcttcgctctctctcagtgaccagagacagatgatgatggagatggcgaaggaaacgctgtcgttgcggcactcgcggcgttggtgctactcgcggcgagtgtggcggtggatgctcaggagaactcggacgtgaagacgctggtgaagtacaagcacgggagaagtatgcgacaaaggatggg

SEQ ID NO: 52724 - DNA, 84 bp, Glycine max
  unsure (1)..(84): unsure at all n locations; Clone ID: 701142034H1
caaaacggncgccatgcctaccgtcagtgtggggcgggatccgcctgtttgcggcttctaggaaagacttncaacagcaacata

SEQ ID NO: 52725 - DNA, 290 bp, Glycine max
  unsure (1)..(290): unsure at all n locations; Clone ID: 701142035H1
gtggagatctgtttgcgggatgccaagatggataagagtaccgtccatgatgttgttcttgttggtggttctactaggattcccanggttcaacagttgttgcaggacttcttcaacggaaaggaactttgcaagagtattaacccagaagttcgatgagaaggaaaacattgtgttcatcacagtggtgtgttgcagcccagagaagataagagtcaagctttgctacnaaggtggnggctcaatcnaaagcattgngatacggnaccgccccagcccaagcccgccgg

SEQ ID NO: 52726 - DNA, 257 bp, Glycine max
  unsure (1)..(257): unsure at all n locations; Clone ID: 701142036H1
ctcgtcactccttgctcttagccctcctcctcttcgccgccgtngccaccgccgcgatggcggtggccgcgtccgacgccgacgacatcctgatccgtcaggtggtgccagatgttggcgaaccgaagaggaggacaacctgctgaacgccgagcaccattcgcgancttcaaggccaagttcgccaagacctacgccaccaaggaggagcacgatcatcgttcggcgtntcaagtccaactccgaagagccaggtg

SEQ ID NO: 52727 - DNA, 292 bp, Glycine max
  unsure (1)..(292): unsure at all n locations; Clone ID: 701142037H1
tgtgtatgtagcgtgcacccttccacattctttctcgtttancgatctcnnctcgatttttcccttcccttttctccataaacgaggtgcttcagatttgctcataataggagggaatcgaatcgaatcgaatcgaaaggaaagtgcagaatggatgacatgccgttgccggcgctctttgagcaagcccgcaagatccacgccgcagccaccgattccggcgccgaccaggaggttgtgaagaaggggtgcgaggctctgcatagatgcgaggacatggtcaataatctag

SEQ ID NO: 52728 - DNA, 291 bp, Glycine max
  unsure (1)..(291): unsure at all n locations; Clone ID: 701142039H1
ggttgtntttgttgttatgngtgccacctctatggtccgaggaggagnccacgaggtttctaccccgaaggacatatttggggtgcgagaaattacaacttggagatgtggagtttgaatttctcgatgatggtgagatcatgtcgttcgccaaaagtgaaggttctggcgatgcagtttcatccaatccaatgaaatggnattngncatgatgaagatgatggtnaganggttgatngtggccagcgttgagganaatagaacttttncngntantcaacaccagctttt

SEQ ID NO: 52729 - DNA, 285 bp, Glycine max
  unsure (1)..(285): unsure at all n locations; Clone ID: 701142040H1
ctctactctgacatcggcaagagagctcgcgatcttctgttcaaggattatcagaatgaccacaagttccaccatcaccacttacactnccactggagtggaaatcacttcaactggagtcaggaaaggtgaaatatatttggccgatgtcagcactaaggtgaagaacaagaacatcacaactgatgtcaaagtggacactaactcaaatctgcgtacaaccattactgtggatgaacctgcacctggactcaagacatttttagctttaattttccagatcag

SEQ ID NO: 52730 - DNA, 282 bp, Glycine max
  Clone ID: 701142041H1
cagaaatcaaaagcctacttcaagagatatcaagtcaagttcaagagaagaagagagggaaaaaccgattaccgtgccaggattcggttgattaatcaggacaagaacaaatataacactccgaaataccgatttgtggttcgctttagcaacaaggacattgttgcacaaataatatctgctagcattgccggcgatttagttcttgctacagcatattcacatgagctgccacgatatggtcttgaagtaggacttacaaattatgcagcagcttattgc

SEQ ID NO: 52731 - DNA, 277 bp, Glycine max
  unsure (1)..(277): unsure at all n locations; Clone ID: 701142042H1
ggttanatgggtncgcttcagtcttggnnaagtgcntanggtgccntcaaggataccaccaaagtnggtcttgcccatgtcaatagcgattacgcggatttggacgttgccatagtcaaagccacgaaccacgtcgagtgtccccccaaagagaggcacctcagaaagattctgtttgccacgtctgctgtgagacctagggctgatgtcgttactgtatccatgcgctttcgcggcggttgacaaagacgcggattggacggtggcatnaaaacac

SEQ ID NO: 52732 - DNA, 277 bp, Glycine max
  Clone ID: 701142044H1
caccgaacaacttcccctgtaaatcgcgtttccgtttgtgcaaggttttaaaagatggctgatgctgaggacattcaacctcttgttgttgataatggaactggaatggtcaaggctggttttgcaggtgatgatgctcctagggccgtgttccccagcattattgggagaccacgccatactggtgtaatggttgggatgggtcagaaggatgcttacgtgggtgatgaagcccaatcaaaaaggggtatactcaccttgaatatcctatagagca

SEQ ID NO: 52733 - DNA, 278 bp, Glycine max
  unsure (1)..(278): unsure at all n locations; Clone ID: 701142045H1
tttgcttcaagcgtttgtctgatgccacaatcttnttagtanntgtatggtcttacaagcatgtattntgctggggttatggttcggttgattcttgnggctacccctgctgtgtgnctcattagtgctanancggtttctgccactgtgaagantttgggctcgggtagtgagggncaaaagcccagctgttcaaagtggatctactanaggactaaagctgnaaanagtcttccaagggtgtagttgncaactcccagccttccaaaagaatggtg

SEQ ID NO: 52734 - DNA, 285 bp, Glycine max
  Clone ID: 701142047H1
cactcgtgcgctttctttactatttgtccacggcaatattgttttggtgctgtgccaacattgtgcacgctattgaattaccaaactacacagtgatactgcctgaagaatcagattttcagctcagactctacaatgaatcatcatggatctcagcccgagtttcaggaacttccttcgagcagtcctacaagcttggattttccaggttgtatcaatatattcacggtgccaattctaactcttcaaaaatcgcattcactgctccagtcctaacgagtgtcc

SEQ ID NO: 52735 - DNA, 284 bp, Glycine max
  unsure (1)..(284): unsure at all n locations; Clone ID: 701142048H1
atgggtactaacagatctttaatggccacgatcctcatcgtgttcttcacggtgttggcagtgtcatcggcgttggacatgtcgataatctcgtatgacagaagccacgcggacaagtcagggtggaanagtgacgaggaggtaatgagtatatacgaggagtggctgtgaagcatgggaaggtgtataacgccgtcgaagagaaggagaagaggtttcagatcttcaaagacaacctcaactttatcgaagaacacatgctgtgaaccggacatacaaggttg

SEQ ID NO: 52736 - DNA, 290 bp, Glycine max
  unsure (1)..(290): unsure at all n locations; Clone ID: 701142050H1
cacagctattgaatttcacttcacttcacttgcatgccaaatgaaaacaacctcttcccagaatcttgtcggtatttaactccctcgatttcacaacaccaataacaatgagagtttcaacagagacagagccggagactaaaaagataaaacgcattcgcngcggcggggactcgagcaagcaccctttgtaccgcggcgtgcggatgcggaactgggggaagtgggtgtcggaaatccgcgagccgaggaagaaatcgcggatatggtaggcacattccccacgccgg

SEQ ID NO: 52737 - DNA, 290 bp, Glycine max
  Clone ID: 701142051H1
ggcttgctactgagtttccacactgcataccttatcgtcttccgaattcgaagttaatttgcaagatggctaaggaaaaggctcagatcaacattgtggtggttggtcatgtggaccctgaggaggcaaccaccattaacgagctgaagaagcctgttgtggagaaagaagctccagggcatgccatatgagggcatgcacgtacggcctcggaggggaaccagaaattatgttaacaaaataatctggaaccctaatgtatcagtgtcatcatcagtgtgtagtttaag

SEQ ID NO: 52738 - DNA, 280 bp, Glycine max
  unsure (1)..(280): unsure at all n locations; Clone ID: 701142055H1
cacaccagaactggcctgggctgntgccaagcatggncgtgttgtctacattcttgaattgctcttgcctttgaaggaagaaattccacncnanaaaagagaacggcagngtccttgttggggaagcttgttagccaacaaatgcangaccaagagttgcnataacacttgcaaggtttctccctgatggacttgtgtcagtaattagggatggacctggtgaattngntgtagtnggtctngagcanannangagacancagaattgtatggncacagc

SEQ ID NO: 52739 - DNA, 284 bp, Glycine max
  unsure (1)..(284): unsure at all n locations; Clone ID: 701142056H1
gagaaattgagtttctgagataaccacttttctctttgattcatcaatggcaaccgcgaggaccgcgaaggatgtttcgcctcacgatttcgtgaaggcttacgcctcccatctcaagcgttccggcaagatggagcttcctgagtggactgatattgtaaaaacagcaaaatttaaggaattggctccatatgatcctgactggtattatgttagggctgcctcaatggcaagnaagatttatttgagaggcggtcttggtgttggggcttccagaggatcta

SEQ ID NO: 52740 - DNA, 279 bp, Glycine max
  Clone ID: 701142057H1
cgacgcggcggttgcagaagaagattgcaagatgaagttcaacatcgcgagtcccaccactggatgccagaagaagctcgagatcgacgacgatcagaaactacgagcattttgggacaagaggatctcacaggaggtcagcggagatgcacttggtgaggaatttaagggctatgtcttcaaaattactggaggttgtgacaaacaaggattcccgatgaaacagggagtgcttactcctggtcgtgttcgacttttgcttcacaggggaatccttgc

SEQ ID NO: 52741 - DNA, 279 bp, Glycine max
  unsure (1)..(279): unsure at all n locations; Clone ID: 701142058H1
gtccaaacctatatagatgatcgacttgaaaagggagaagaaatctcacctacactcaccaaagccatcgaaaattctcgtgtatctattgtcattttctcagagaactatgcttcctcaaagtggtgcttgggtgaactcatcaagattatggaatgcaagaatgaaaaaggacanatggtnatnccagttttctacaacgtagattcatcccatgtgaggaagcagacagggagctgtgagcaagcctttgaaaaactgagggagaacctaggtgca

SEQ ID NO: 52742 - DNA, 278 bp, Glycine max
  unsure (1)..(278): unsure at all n locations; Clone ID: 701142060H1
ctcccttcccttcgactccacggcgcagatccgaggagtttgggaaaccctaattcattcctctttgcttctatctctattaccctaacaccagtgatggcaggtttggctccngaaggatcgcagtttgatgctcggcaatatgactctaagatgaatgaattgctttccgctgatggacaagaatttttcacttcatatgatgaagtctatgatagttttgatgcaatgggccttcaagaaaatcttctcagaggcatatatgcttatggttttga

SEQ ID NO: 52743 - DNA, 289 bp, Glycine max
  unsure (1)..(289): unsure at all n locations; Clone ID: 701142062H1
gttcagacacatttaaacaaaanaattcataaaatgctcgcnggantggccactgcacactacactgcccagtggccacccgccactgcattcatcccacactccaaacattaanttctcaggaanaaaaaacaanacaagcggcgtgatggcggtgaaacggcttattgncgtcgtggagagcaccgccgccatggggccctattgggagncctttctgagggatcatctcgacaagattatccagatgttttggtgaaaatgactcaactgtgcagaactcttgttc

SEQ ID NO: 52744 - DNA, 287 bp, Glycine max
  unsure (1)..(287): unsure at all n locations; Clone ID: 701142063H1
cggagaccgtgccggtttcngtcgcggctttggcggtcgtggacgcggcggcgacaggggacgagggcggcgcagggcaggagggcgccgcgacgaggaggagaagtgggtcccagtgacgaagctggggcgcctggtgaaggaggggaaaattcggagcctggagcagatctacctacactncgctcccaatcaaggagcaccaaatcattgacaccctncgtggggcccaccctgaaggacgaggtgatgaagatctgcccgtccagaagcagacccgcgccggt

SEQ ID NO: 52745 - DNA, 286 bp, Glycine max
  unsure (1)..(286): unsure at all n locations; Clone ID: 701142064H1
ttnncgcggtgtngccgctgggaatcatagctggaatgctctgcgtcatgggaaacgctcagtattacattcacagagctgcacatggcagacctaagcacatcggaaacgatatgtgggatgtggcgatggagcgaagggacaagaagcttatcgagcaagcctctccctccaattaacatcgttgttttgccgatgtcattgtgaagaaaataaactgctcacctggatttacggctgtgttcttgggaagcagggttaatcacagntccaattccgtctgttt

SEQ ID NO: 52746 - DNA, 290 bp, Glycine max
  unsure (1)..(290): unsure at all n locations; Clone ID: 701142065H1
gcgttttttgcacagaagaattaacacgtatatagcaagcatggcagtcacactctacgaccttagctctgcctctgggttgaagaagcttgatgagtaccttctcccacgcagctacatcaccgggtaccaagctacaaaggatgatcttactgtttatgcagctttgccaactgctccatcagatgaatatggaaatgtttccaggtggtacaagcacattgatgctttgttgagaatctctggtgtttcnggcganggatctggtgttatgttgagggatcccnggt

SEQ ID NO: 52747 - DNA, 286 bp, Glycine max
  Clone ID: 701142066H1
atggctcctcggtctagcagcaaggacgcccaagaccttttccgcgctctttggtctgcttatgctgcaacccccactaatctcaagatcattgatctctatgtcatctatgccgtattcaccgctttcatccaggttgtttacatggctttggttggatcatttccatttaactccttcctatcaggagtactttcttgtgtaggaatgctgttcttgctgtttgtctcaggatccaagtgaataaagagaataaggaatcaaggatcttgcacctgagcgcgct

SEQ ID NO: 52748 - DNA, 285 bp, Glycine max
  Clone ID: 701142067H1
ttgacaatgaggcctgctcttgctttgcttcctcttctatttgctttccttgttagctgccactacagaatcaagaaaagatacaggggaatattggaaaatgatcatgaaagatcaggaaatgccagaaggacttcaaggtcttgtttcatttcaatctgaaaataaccctaagactcaagagcagcttggtaaaggttccaaaaaccatgtgaagagtctctagttacaatacacaagttatagtgacttcgaacccataccaagtgttaccaaatatgatgt

SEQ ID NO: 52749 - DNA, 282 bp, Glycine max
  unsure (1)..(282): unsure at all n locations; Clone ID: 701142068H1
aaaaatcaatctgcattttggcattggggtcttgtttagtttgttccaatccaacgttggttgtgtgtgtttgtgttgggaggattgggattgggattggaatcagcgaccccatgagacctcagagaacgtcgatccacgccgtcacgacatgggtgaggcgacagcccccaaaggtgaaggcttttctcgccgtcgtttccggcatggcgntcctcgtcctccttcgcttcatcgtccacgatcacgacaacctcttcgtcgctgccgaggctgtcactc

SEQ ID NO: 52750 - DNA, 287 bp, Glycine max
  unsure (1)..(287): unsure at all n locations; Clone ID: 701142070H1
ggtagccaaatcaccgttaacctaagaaagagaagtagtagcagtagcagtaggaagaggatgatcggcgtcggaaagatcaagcagtacagtaacgtcctcgacaagcccctcaccaagggcaagcaagaggttagtttgancgcattcgcgttcttgttctcggagcttgttcagtacaaccaaacgcaggtncgacaatattggccgagcttgaacgaagactggaggatgctggatatgcggttggggctcgagttntgagctgctttgccacagagataagg

SEQ ID NO: 52751 - DNA, 280 bp, Glycine max
  unsure (1)..(280): unsure at all n locations; Clone ID: 701142071H1
gaaggtgtatggtccaacctatggatcccccaagagggtcctggtgtgtctgattgagaaggnaattgagtttgaaacagtgcatgttgatctcttcaagggagagaataaggaacctgagttccttaagctgcagccatttggatcccttcctgttattcaagacggtgattatactctctatgaatctcgtgcaataatcagatacttagctgagaagtataaagaccagggactgacttatngggaagccnatngaagaacggggncnagtgganaa

SEQ ID NO: 52752 - DNA, 282 bp, Glycine max
  Clone ID: 701142072H1
ggcgaaactggtcattattttgccatgaaggcaatggagaagggtgttatgctcaatccgtaacaaggtgcatagagcttgcacagagagagagatactcgacatgttggaccacccttttcttcctgcattatatgcttcctttcagacgaagacacatgtttgcttgataactgattattgttctggtggagaactattcctcttcttgaccgacagccagctaaggttctcagggaagatgcagtgagattttatgccgctgaagtagttgttgcgttg

SEQ ID NO: 52753 - DNA, 280 bp, Glycine max
  Clone ID: 701142073H1
ctgatactgaggaagcttctctctgcaaagacaacgcatgcacaggaaacataaagaataggaaactcgttaacactcccgtttccacagcccaatccctctccaagaatgtggaagagtccaaggttgacccctcggtaaatggcaatactagaaatgtgaatacattgagcacttcgaagcacaaagatgtccctgaggagcactaccatgaccttgtagagataactgagatggactattctccagcaaagagaaagcctcccatacacaactgagt

SEQ ID NO: 52754 - DNA, 277 bp, Glycine max
  Clone ID: 701142074H1
gcaaggacttgggagtgaaattcccattcgaccagccaatgaagatctacaacagtttgtggaacgctgatgactgggcaacgaggggtggtttggagaaaacggattggtcgaaagcacccttcatagcagcgtacaaggggtttcacatcgacgggtgcgaggcttcggtgaacgccaagttctgcgacacgcagggcaagaggtggtgggaccagcctgagttccgtgaccttgacgccgcccagtggcgtaggctcagatgggtgcgccagaa

SEQ ID NO: 52755 - DNA, 276 bp, Glycine max
  Clone ID: 701142076H1
aaaatggcgtcgtcacaaccagagatgtagcatccaaagaaggtttttggttgggctgctcgggactcatactgggcttctctccccattcaacttctccagaagagaaacgggggagaaagatttggtattcaaagtgcaatactgtggaatatgccactcagatctacatatgttaaagaacgagtggggcaacacaacctatcctctggttcctgggcacgagatgctggtgtggtaacagaagttggaagcaaggtgcaaaagttcaaagtt

SEQ ID NO: 52756 - DNA, 280 bp, Glycine max
  unsure (1)..(280): unsure at all n locations; Clone ID: 701142078H1
caaaaatctcccttctaaccttattcttcttctcgtccttcaccatcattgcgcatgcaattgttcctcaaaacgaaaccttnaaatttgagaactcaggtgaacttggaccctacatcgttgagtacggtgcagattacagaatgataagcatcttcaactctccattccaagttgggttctacaacaccaccccaaatgccttcactctagctttgcgtgtagggctccaacgctcggagcagctattcgttgggtttgggaggcaatagggccaacc

SEQ ID NO: 52757 - DNA, 279 bp, Glycine max
  unsure (1)..(279): unsure at all n locations; Clone ID: 701142079H1
anacacacgacccatttttctcttggtgttgtagaaattgttgtttcttcctctctgagttccaactttcacctcaaccaaatacacaacaaaatggggtttcagaagataagggttggcaaccccatcgtcgaaatggatggggatgaaatgacccgagtgatttggaaactgataaaagataagcttatttttcctatttggagctggatattaagtatttgaccttggccttcctcatcgcgatgccactaatgatagagttatatgaaagtgctg

SEQ ID NO: 52758 - DNA, 281 bp, Glycine max
  unsure (1)..(281): unsure at all n locations; Clone ID: 701142080H1
cgaccgcgctttctccatgacggacgcgcaggagaggtttcgcaacattcgtttgcaggaagaatatgatacacatgatccaaaaggtccttcgtctgttgtattgtcatttctgagaaagaggtcaaagataattganattgtagcagcacgtgacattgtttttgcacttgcacaatccggtgtttgtgctgcatttagccgagagaccaatgaaagaatatgcttcttgaatgtcagtcctgatgaagtcataaggagtttgttttataataaaatnt

SEQ ID NO: 52759 - DNA, 290 bp, Glycine max
  unsure (1)..(290): unsure at all n locations; Clone ID: 701142081H1
tttggagcgatccgagaaaaactctgtaaacatgttggtttaccaggacctcctncacaggtgatgagcttctctctgactccttccgttacaaggaaattgagaatggaatgctgtgggaagttgaggggaagtgggttgttaaaggagcagttgatgtagacattggtgcaaacccttctgctgagggtggaggagaagatgagggagttgatgatgccagctgttaaggttgttgacattgttgacacattcagacttcaggagcaacccgcattcgataagaagcc

SEQ ID NO: 52760 - DNA, 285 bp, Glycine max
  unsure (1)..(285): unsure at all n locations; Clone ID: 701142082H1
tggggtttgggacccanggcttccatgaagaagaggcttattagtgaagggaagctcgataagcatgggaagcccaatgngaagactccacaggagtggcttaggaatctggttttnccaactggtggggatagcatgattnctggcttggctgctgcgccagaacctgaggacgacaagcttcagaaganggaggagggagatggggaagggaagnagagaaagnngcatganagcacagatagcctggttgctgttcctgctaagaaggcgaaatggtanatc

SEQ ID NO: 52761 - DNA, 266 bp, Glycine max
  unsure (1)..(266): unsure at all n locations; Clone ID: 701142083H1
ctgacactccttcttctccgcttccnnttcgatcatcgcttaagaatgccgccgaagttcgacncctcccagatcgtcgacgtcttcgtacgcgtcaccggcggtgaggtcggcgcggcgagttccctcgccccgaagatcggtcccctcggtctctcccccaagaagatcggagaagatatcgccaaggaaaccgccaaggactggaagggcctccgcgtcaccgtcaagctcaccgtgcagaaccgtcangccaaggtcangtg

SEQ ID NO: 52762 - DNA, 285 bp, Glycine max
  unsure (1)..(285): unsure at all n locations; Clone ID: 701142084H1
gggctacccgctgagtttaagcataactatgcggaggaagagcttaaaagagtannttttaactgctctcttatgtgttcagagtcagccagagaagagacccaccatacttgaggtggtagagctantgaagggagaatccaaagataagttagcccaactggaaaataatgaactctttaagaaccctccagctgtaggacatactgatgatgggaccgttgctgctgaaggcagttcagatttcatctcagaagacaaggatcaaaacctgagttggaaggc

SEQ ID NO: 52763 - DNA, 283 bp, Glycine max
  unsure (1)..(283): unsure at all n locations; Clone ID: 701142085H1
cccaggcgaggngaaagatggaggggaagnagcaggatgtgtcgttgggagcgaacaagttccccgagagacagccgattgggacggcggcgcagagccaagacgacggcaaggactaccaggagccggcgccggcgccgctggttgacccgacggagtttacgtgcatggtcgttttacagagcagggatagcagagtttgtggncattttctgtttctctacatncaccgtcttaaccgttatnggagtcgccggggctaatctaatgtataccttgggat

SEQ ID NO: 52764 - DNA, 282 bp, Glycine max
  unsure (1)..(282): unsure at all n locations; Clone ID: 701142086H1
ggcattttgggcatcgcttgggcctttggtggcatgatcttcatccttgtntactgcaccgccggtatttcaggaggacacataaanccggcggtgacattcgggttgttcctaggacgcaaggtgtcgttgataagggcgttgttgtacatggtggcacagtgtgccggtgctatctgtggtactggattggccaaggggttccaaaaagcatactacaacaggtctgnagtggtgcccaatctgttgctgatggcnacaacaatggtactgtttgggtgc

SEQ ID NO: 52765 - DNA, 283 bp, Glycine max
  unsure (1)..(283): unsure at all n locations; Clone ID: 701142087H1
gggatccacatgattcagagggncccgcatgattttcacttaataatantagaagagtttgttaacaaatgcattccctactctctatatggaaaatgtgagagaggacatttttccattagcattaaaattggagattggtgaactagcaccagttggtcattattagcnnnnnnnnnnnnnnnnnnnnnnnnnnnnnnnntttngtaagcacacctgtcccactaagaaaaaaagaaaatnanctttatattctaattctgcaaaccaaggncctgagatg

SEQ ID NO: 52766 - DNA, 279 bp, Glycine max
  unsure (1)..(279): unsure at all n locations; Clone ID: 701142088H1
tatttnttttaattattatcatctcatctcacccaattcaattcacgtaactnggaatcgattcttagggtttctgactcctttatgtgtttgtctcgcaattgatcatcgcaaccacaatgtccggtcccctcgatcgttttgccagancttgctttgaggggttttcgggcagtgnacgagaagaaggagaggagatctnacttcgagaatccgaggatgaaaggaggaccagaatggatctctcaaaaagaaggcattaatgcatctccaaattcc

SEQ ID NO: 52767 - DNA, 278 bp, Glycine max
  unsure (1)..(278): unsure at all n locations; Clone ID: 701142089H1
anggacatatgggaaggtgtacagagcaagagagaaggcaactgggaagatcgtggctctgaagaagactcgtctccacgaggacgaagaaggtgtccctcccaccactctccgtgaggtttccattctgcgaatgctctctcgcgatccccatgtcgttaggttaatggatgtcaaacaaggtcagaacaaggaagggaagacagtgctctacttggtatttgagtacatggacaccgatctcaagaattcatacgctctttccgtcaatctgggga

SEQ ID NO: 52768 - DNA, 276 bp, Glycine max
  Clone ID: 701142090H1
ctgattctaccgtcatcaactaggagaagaagcttcattttctgcaaaatggatccctctgcggcattgctatttaaccacctcaagggtgcagacccgttcttcctgctagcgggtcctaatgtgattgaatcggaggagcacattctgcggatggctaagaacatcaagagtgttgcatctgaagttggaataccattggttttcaagtcaagctttgacaaagctaaccgaacatcatcaaaatcatttcgtggcccggggatggctgaggga

SEQ ID NO: 52769 - DNA, 274 bp, Glycine max
  unsure (1)..(274): unsure at all n locations; Clone ID: 701142092H1
atcgcttggnccttcggtggcatgatcttcgccctcgtttactgcaccgctggcatctncagggggacacataaacccggcggtgacatttgggctgtttttggcgaggaagttgtcgttgcccagggcgattttctacatcgtgatgcaatgcttgggtgctatttgtggcgctggcgtggtgaagggtttcgaggggaaaacaaaatacggtgcgttgaatggtggtgccaatttgttgcccctggttacaccaagggtgatggtcttggtg

SEQ ID NO: 52770 - DNA, 278 bp, Glycine max
  unsure (1)..(278): unsure at all n locations; Clone ID: 701142093H1
caccgcgatatgaacgatgcaaaatagtttcagatacgtcgcgttgattgattgatatgaagtggttgacttctggaactgcatatctatcctcgtgttgnnnnnnnnnnnnnnnnnnnnnattgtcacacatacacatctactccttccctcatggctgagcaatcttccaagtccncttacgatttcacagtcaaggacatcngtggaaatgatgtgagtctgaataattacagcgggaaggttctactgattgtgaatgtcgcctcacaatgtgg

SEQ ID NO: 52771 - DNA, 282 bp, Glycine max
  unsure (1)..(282): unsure at all n locations; Clone ID: 701142094H1
gnagtcttcaagcacttagtttcttaaaggtaactcctttaaggtccattcataatcttctcagatagaaagagagtgatctattcattctaatcatttggggtgtcagaaacattcacattcacatctgggtctaaagttgtgaattcattaaccttcacctggtgccactaacaaaagtgaccctttggataagaattcaaaagggtatctgaggatctcacaaatttgttgaattccctgattctatgttgtatagggtgtgcaagaggtacagaatca

SEQ ID NO: 52772 - DNA, 282 bp, Glycine max
  Clone ID: 701142095H1
gaaaattgaactgctcaaggatggcatgtcggtccttgtcttgactggtttgcctggatccggcaaaaccacactggctaagaagatctgttgggacactgacatcaaaggcaagttcggggtaaacatatttgtcacagtctccaaaacacccaacttgaagagcattgtagggacagtgtttcatggctgtagacgtccggtgccggagtttcaaagtgatgacgatgcaattaaccgattaagagctctgctgctgagtgtggggggaaatgataaaaa

SEQ ID NO: 52773 - DNA, 283 bp, Glycine max
  Clone ID: 701142096H1
tataactcctgtttctttattaattctctctttcaaatatatggcagaagatgcttcaattattccaacacacacaaaagctctggtactactctgaacatggtagtccaggtgatgttctcaaattagatcctaattggcccttaccccaacaactcaaagatgaccaagtgctcatcaaggtcatcgctgcatccattaatccgttgattacaagaggatgcacggcgagttcaaggacatgacctcatctgcctattgtgccgggttagatgttgctggc

SEQ ID NO: 52774 - DNA, 269 bp, Glycine max
  unsure (1)..(269): unsure at all n locations; Clone ID: 701142101H1
tttcttctctctgttttccttcttccncgcatcaatggagttggacggcgttactcctcggcatgtgcaaccctctcctcgacatctctgccgtcgtcgacgacgctttcttgcaaaaatacggtatcaagttgaacgatgcgattctcgccgaggataaacacaaacctatgtatgaagaattggctaacaatcctaatgtggagtncattgntggaggtgctaatcagaattcaatcagggttgctcagtggatgcttcaagcacca

SEQ ID NO: 52775 - DNA, 279 bp, Glycine max
  unsure (1)..(279): unsure at all n locations; Clone ID: 701142102H1
gtttctntttctgggcattcagangattgcaggnaaagttatcagctttatttccatattgaacagagttgttgatctagaatggagatcactagaataggccaatggttaagtcttctgatatgtgtactactattactgcagacagaaggggttcctgtgggaatcacttttgttgaaaatgcagtggcaaaaggggctgtttgtttggntgggagtcctccagcttaccacttccacaagggatctggagcagggattaacaatggatagttcatt

SEQ ID NO: 52776 - DNA, 280 bp, Glycine max
  unsure (1)..(280): unsure at all n locations; Clone ID: 701142103H1
gcagcatgtttggngnngatgtcacagttctagtgggagtggcagtgaaagtggcacacaaacccagaagtctgtaaaatcaaagagtcttgagangtttgataataattctggaagcaatggcgaagatgataatggnagtataggactgaataatggggatggnngtgacaatggtagtggcactcagagctcatggaccaaacatgctgtagaagttgatagtcctaaaccagtttcccactgggataanatagctgagtgccctgacagtacctgt

SEQ ID NO: 52777 - DNA, 277 bp, Glycine max
  unsure (1)..(277): unsure at all n locations; Clone ID: 701142104H1
ccgaaccactccagaatggcaccgccgaaccactcctgccggacaatgtctccgcngcacaaccncccaccgagacggaatccaacgccgccgccgcggcttccactccgccggagaagaggtggccggggtggcctggtgactgcgtgttccggctcatcgtgccggtggggaaagttggaagcatcattgggcgcaagggagaactgataaagaagatgtgcgaagaaactcgatctcgcattcgcgttctcgacgctcctctcggcatcctgat

SEQ ID NO: 52778 - DNA, 276 bp, Glycine max
  unsure (1)..(276): unsure at all n locations; Clone ID: 701142105H1
ctctttcataacctagtgngactctgtgtcagagtttgtgaagtgaatcccataatcatgaagnnaggnaacttgggacttggtctcaaactctcagttcctgtgtctgatcaatctaattttgccaggttcctgactganagtgggacttttaaggatggggatctgcttgtcaacagggatggagttcgaattgtctctcagaatgatgtcgaagctccacctccaatcaagcctacagacaaccagttaactttggcagacatagatgtnatc

SEQ ID NO: 52779 - DNA, 279 bp, Glycine max
  unsure (1)..(279): unsure at all n locations; Clone ID: 701142106H1
ggcactggtttcgaacccttcgttgtggttaggtcttcttcacctttcganttttggnatccatgggtcagggaactccgggcggcatgaaccggcagggcgaccggaagccggacggcggcgacaagaaggagaagaagttcgagccgtcggctccgccggcgcgcgtggggcggaaacagcggaagcagaaaggtccggaggcggcggcgcggttgccgacagtgactccggtgncnnatgcaaactgcggcttctgaagctggagcggatcaagga

SEQ ID NO: 52780 - DNA, 271 bp, Glycine max
  unsure (1)..(271): unsure at all n locations; Clone ID: 701142107H1
gananntangtctggccattgangtntgtaaattcttctttcactttaatatnccccactggattctttccatctgtcactcttacagtcttcaaacttgtcttctcaaaagagttggcaacaccatcaatgtcaaggtcaagatggtaaatgtagaagtggtcgtggtaaacaccaatgctgtttgccgacaccaagataccatgttgatcgctcttgatctcactcttgtgcttatttcgattttcganggtaaaaagatgaatctgag

SEQ ID NO: 52781 - DNA, 281 bp, Glycine max
  unsure (1)..(281): unsure at all n locations; Clone ID: 701142108H1
gnataactgaatatcgtatagctcaaaataaagatttaaccaaatgcaattcatatgaaaaaagccaattaattctttacaaagaacaacaagtaaacgcattnnnnnnnnnnnnnnnnnnnnnnnntagatacgatcttttatcctataattttatcaattatgcagataagaaagactcatatatttatggatatagatccctatttcaagtaaaaaaaaaccaagtgatttcttctaattacancncgnataaaaaagaattattggntatcatagnt

SEQ ID NO: 52782 - DNA, 281 bp, Glycine max
  unsure (1)..(281): unsure at all n locations; Clone ID: 701142109H1
gggcctgctcttgctttgcttcctcttctatttgctttctngttagctgccactacggaatcaagaaangatccnggggnntnttggnaaatgatcatganngatcaggaaatgccagaaggacttcaaggtcttgtttcatttcaatctgaaaataacccnaagactcaagagcngcttggtaaaggttccaaaanccattgtgaagagtctctagttacaaatncacaagttancagtgattcgancccatnccangtgttcccanatatggtgtttgg

SEQ ID NO: 52783 - DNA, 278 bp, Glycine max
  unsure (1)..(278): unsure at all n locations; Clone ID: 701142110H1
ccaccacctaangtgatgcaggtggntaagtctgcatggntgactgatgaagaatttgcaagaganacgattgctggtttaaatccaaatgtcattaagattatagaggagttcccactaagtagcaagctagatactcaagcctatggtgatcatacctgtataatagcaaaagaacatttggagcctaacttaggtgggctcactgttgagcaggctatccaaaacaagangttgttcatcttagatcaccatgactatctcattccttatttgag

SEQ ID NO: 52784 - DNA, 270 bp, Glycine max
  unsure (1)..(270): unsure at all n locations; Clone ID: 701142111H1
anngggttcggtgttctgttcgcgntgngagccangtggnngangangcgtatgnggnggttgangnggnngcgccgaangatgngacagagatccaagtagtgcgttaaacctagtttgtttctgttgcttttacaattgcttatgttgtcgnntgggacacccagttgttagtggcactggtttctcctttttgatgtttgatacattttgttggattcaagtagtttatgttcgtctatgttatagctcaaaacaatgttgttatgc

SEQ ID NO: 52785 - DNA, 276 bp, Glycine max
  unsure (1)..(276): unsure at all n locations; Clone ID: 701142112H1
cnggtngttgcttgtgcggtgcgacanagttcagntgtgtgatgntaatanttaccgaatggngaagcngggttgtaaaacctaaaccatacagtagangcantgtgtgatgattgatattataaatgacaacgatttcccaccgaaccagaccaaaccaaaccgagagtgaaccctagttaaccacccaatcgtggcggaaccaaagtagttagttagctatattacattacaattacatgtggggctgtcggcagcgccttgttttgtactgta

SEQ ID NO: 52786 - DNA, 276 bp, Glycine max
  unsure (1)..(276): unsure at all n locations; Clone ID: 701142114H1
cgcattttnggcnttgaaaactaattgnnggngttgcngtccagcgttgatcagaatcagagcatggacgggcatgattcagaagacccaaagcaaagcactgctgatatgacagcttttgtgcaaaatcttcttcagcagatgcaacttaggttccagacaatgtctgactccatcatttctaagattgntgagatgggagaccgtataaatgagttggagcaaagcatcaatgatttaagatcagagatgggngtggagagcactccatcacct

SEQ ID NO: 52787 - DNA, 276 bp, Glycine max
  unsure (1)..(276): unsure at all n locations; Clone ID: 701142115H1
ggccagcntcttctcgaagacgagcttcaacttctctgcgaatatgtaaaagagatccttattgnggngtccaatgtgcagcctgtcantagtccagtgactgtttgtggtgatnttcatggtcaattccatgatctaatgaaacttttccagactgggggtcatgtgcctgaaacaaattatatttttatgggagactttgttgatcgaggttacaatagtcttgaagttttcaccatccttttacttctaaaagctagatacccagctaatatt

SEQ ID NO: 52788 - DNA, 278 bp, Glycine max
  unsure (1)..(278): unsure at all n locations; Clone ID: 701142116H1
cccagnttgtgttcgagcacttgaccatcacatactttcggttgcntggntgccacctttaccacaatggngngcccttaggngagcttgtgccaccaaagtgttctcttctcagcagctcaatttnacacaagttcttcgccagaggangatgcaagatttgatggattatgtgnnggnacgatgcgagagaggtgaagctntggatattggtgaggcttcctttacaactgttcttaattccatatcaaacactttcttctcaatggatttggctt

SEQ ID NO: 52789 - DNA, 283 bp, Glycine max
  unsure (1)..(283): unsure at all n locations; Clone ID: 701142117H1
cagaattcaaagnnggcgtcttcataaacgcctttattctccgtttccgtttccttcccggaattcgatttttcatctctgaaaatgagagagtgcatctcgatccacattggtcaggccggtatccaggtcggaaatgcttgctgggagctctactgtcttgagcacggcatcgggcccgatgggcaaatgccaagtgacaaaacagttggcggaggtgatgatgctttcaacactttcttcagtgagactggtgctggaaagcagtgccacgtgccgtctt

SEQ ID NO: 52790 - DNA, 283 bp, Glycine max
  unsure (1)..(283): unsure at all n locations; Clone ID: 701142118H1
ctcgaggngagagtggttgggttcgatggagnaggngttggtggcnttgtnccgaagcggcgaagaaggcggcggatgctgccatctccggcgacggcaaacatgaggaaagccgatgcatcgatgcgctcgagcagctcaagaagtttcccgttaattacaagattctcgtcaacacccaggtgggtaaacatcttaaagttttgacaaagcacccgaggctgaaaattaaggcctttgctattgacctaattgagatatggaaaggcataattatcaagga

SEQ ID NO: 52791 - DNA, 279 bp, Glycine max
  unsure (1)..(279): unsure at all n locations; Clone ID: 701142119H1
gtccctttctgttctcttcactcttggtcttgcgagagaaagccatgccagagacgaagatttttggcatgctgtttggccaaacactcccattccaagttcattgcgagancttctanagcctggccctgcaagtgttgaaatcgatgatcaccctatgcaaattgaaganacacagtacncgaaaaccttcttctataaagaagaccttcatccaggcaaaacaatgaaagtacaattcagcaagcctccctttcaacaaccatggggtgttggtac

SEQ ID NO: 52792 - DNA, 262 bp, Glycine max
  unsure (1)..(262): unsure at all n locations; Clone ID: 701142121H1
ttttgaccaggatgnctgggngcactatgctaagcttactgctgnggttggacaccaatgtacaaattgttggtgatgatctcttggttaccaaccccaagagggttcagaaggcaattgatacaaaagcatgcaatgctcttctccttaaggtcaaccaaattggttctgtgactgagagtattgaagctgtcaggatgtccaaaanagctggctggggtgtcatgncgagtcncagaagtnganannctgnggntccttt

SEQ ID NO: 52793 - DNA, 248 bp, Glycine max
  unsure (1)..(248): unsure at all n locations; Clone ID: 701142122H1
gttcaatcatatgaanntttccctcattggcntccatttggatctaattatctaatcccacgctctgctttaatacaaaaatttgtgttcgaggtagccattgatattctgctaatgactatggtgttcaaaaacacaaaccagttagaggaaagtatggattccacttatgacaggnaggctgaagtgaaagcctttgatgattcanaagctggtgttaaaggtcttgtagagtctggattgacana

SEQ ID NO: 52794 - DNA, 73 bp, Glycine max
  unsure (1)..(73): unsure at all n locations; Clone ID: 701142123H1
ggcggattggtttnttctactanntcttacactgggattagantaaggcgantgtgcacttctaacaacaanc

SEQ ID NO: 52795 - DNA, 280 bp, Glycine max
  unsure (1)..(280): unsure at all n locations; Clone ID: 701142124H1
gcagcttccgtgcgactccgatggcgtctgcntgctctgcaaactcaaacccagtccctcccaaaccctctcctgtggaacgtgtgccactccctggcaccttccgtgtctcccttcgccccctctctccctctctgactcccattgggactgccccgactgttctgacaccttctgccatcaccccgtcgctcccaccgctcaccttgtctccgccattcacgccattcaggccgacacctctctcactgaccaacagaaggccataaaacgccaacaa

SEQ ID NO: 52796 - DNA, 277 bp, Glycine max
  unsure (1)..(277): unsure at all n locations; Clone ID: 701142125H1
taagttcttcctataatttctgccaattccttttcagatgatgctaganagtgttttatgcaatgaaatataacttatttagatatttatactgttggataaaatatgaganaaagtgttatataaaattcaataaagacaatcttcattttcgtctttttgtgtccacaattctttgttgttcatctggtaaacaactttctgtgatttctttatttctcatggttctgataaatatggtattatgccatattgccatccaacatataactgtgca

SEQ ID NO: 52797 - DNA, 276 bp, Glycine max
  unsure (1)..(276): unsure at all n locations; Clone ID: 701142127H1
ctttcattcaattctcttctctgctcttctcttctgttcccnccntctgatccatcatccctcgttttctccgaacaatggctgctggtgtcactgtcaagtccgaggttctagaatcttctccccctgaaggagtatgttccaacacggaggaaaaccacctggttcagaccaatttgtctgatgggtcacccaacaagtctgtgccagcatctggacttaatgcagtgattcctagtgcaaatcagcttaccatcttctataatgggagtgttt

SEQ ID NO: 52798 - DNA, 276 bp, Glycine max
  unsure (1)..(276): unsure at all n locations; Clone ID: 701142128H1
ggcgccgangntaacacgtnnggttagcagaaaccccgaattgntaaggggnatcggaaagtactcgaggtctcaaatgtaccacaagaggggcatttgggctatcaaggccaaaaacggtggcgttttacctcgccacggccctaaacccaaacctgaaactcccgctgaaaaaccacccaaattttaccctgctgacgatgtcaagaaaccccttgtcaacaagcncaaacccaaacccgcgaagttcagggctagcattactcccgggacagt

SEQ ID NO: 52799 - DNA, 274 bp, Glycine max
  unsure (1)..(274): unsure at all n locations; Clone ID: 701142129H1
cgngtnnngtttntccttgcagcccaagccanggcgccttctgatcctgcatggtggaaaaaccaacaaaaattcttacaagacactcattgcggcggagnatgccggcgtccaagttgactttgccccaaattttgagatgggtgtctccaataaaactcctgaatttctcaagatcaatcctattggcaaggttcctgtgttggaaacacctgatggtccagtattcgagagcaatgccattgctcgctatgttacccagctgaaaggtgat

SEQ ID NO: 52800 - DNA, 265 bp, Glycine max
  unsure (1)..(265): unsure at all n locations; Clone ID: 701142130H1
gnggtntngtgttctnngagtgngcaacttgtgagnnatggcttccaaggctgcacttctcttgtgtctcantgttctcttttcactgtggttagttccacatatgtgccatgtnatccaccccccaaaactcccaaacacccacctgtcccaaagccaccatccccaaagtagcaagtgccccaaagacatattaagttcggtgtgtgtgtgatgtgtnaggttgattatgtgcaattgggaagccaccaaagacccatgtgca

SEQ ID NO: 52801 - DNA, 276 bp, Glycine max
  unsure (1)..(276): unsure at all n locations; Clone ID: 701142131H1
gcgngnnaggttttcttctttccggttgttgtcgcggcgganccctagctagtccggtggtgcgngnnngngtgtgtgagngnganngacgntgagtgggnngggcggtggcngccacaacnatggcggcggcnaggcgctgtcggcgacgattccggcgtcatcgcggaagntggttcagagcttganggngattgtctccaatttccccgatcacgagatctacgccacgctcaaagactgtaacatggaccctaacgaagctgttngtcgtct

SEQ ID NO: 52802 - DNA, 281 bp, Glycine max
  unsure (1)..(281): unsure at all n locations; Clone ID: 701142133H1
cccattcatacgtggtgttgttactgctgctcttttctcttttcttttctctttagttctctcttcccctnnnnnnnnnnnnnnnnnnnnnnnnngagcttgtttaagcttttcttccattaacatattatcacaatgtgtggtattcttgctgttcttggttgttctgatgactctcgagccaaaagggtccgcgtgcttgagctctctcgcagattgaagcaccgtggccctgactggngtgggctccatcaacatggtgactgctttttggcacatca

SEQ ID NO: 52803 - DNA, 209 bp, Glycine max
  unsure (1)..(209): unsure at all n locations; Clone ID: 701142134H1
ccgagagttcgtcatatctgtatctgtatatatacctatacctatacctatatcgtatccgcatttccgaaaggatatatcttatttagggttttgtgatgtgtcncaaccgagtgccatgggcgcngagattgaaagtgcgcnggagntacgcatttgaacgcnaggncatcagcgtcctatgtctngtggnccagggntntctcacg

SEQ ID NO: 52804 - DNA, 258 bp, Glycine max
  unsure (1)..(258): unsure at all n locations; Clone ID: 701142135H1
cttnggtcttccgaattcgaagttanntttgcaagatggctactggaaaaggctcagatcaaacttgtggtggttggtcatgtggaccctgaggnggcaaccaccattaacgagctgaagaagcctgttgtggagaaagaagctccagggcatgccatatgagggcatgcacgtacggcctcggaggggaaccagaaaattatgttaacaaaataatctggaaccctaatgtatcagtgtcatcatcagtgtgtagtt

SEQ ID NO: 52805 - DNA, 276 bp, Glycine max
  unsure (1)..(276): unsure at all n locations; Clone ID: 701142136H1
gctagtttatcgtgnggngnntatgnngttgtttgtnttctttgttgctgcagtagttttggtagcatggccatgccatggcgcaggctaccaaaggttccctctccgaatgaaaactggctatggtgagcgttcttcggaggtaaaatgcgcaagttttaggcttgctgtggaagcacacaacatccgagcntttaaaaccattcctgnngagtgcgttgaaccaacaaaggactacattaatggcgaacaatttagatcagactctaaaacagt

SEQ ID NO: 52806 - DNA, 274 bp, Glycine max
  unsure (1)..(274): unsure at all n locations; Clone ID: 701142137H1
ggggaactggctncatagganannggttggtgaaggcaagtttagctcaaggacatgaaacatttgttcttcacaggccagagattggtgttgatattgngaaagttcagcttctattgtcattcaaggngcaaggngctaggcttgtttcaggttcatttaacgaccataagagcctagtgaatgctgtgaaacttgttgatgttgtcatttgtgccatttctggtgttcacatccgcagccaccaaattctactccaacttaaacngttgat

SEQ ID NO: 52807 - DNA, 277 bp, Glycine max
  unsure (1)..(277): unsure at all n locations; Clone ID: 701142139H1
ctgnaagngangntcgnggnganaatngagggtgatcatcatcatcacaaggatgaggacacaagtgtccctgttgagaaagttgaggttgttgaaacagcacatgctgaggnaaaganggggttcctcgacaagattaaggagaagctaccagggcacaagaagacagaggaggccacagctactactcctcctccaccaccacctgttgcatcattggagcatggtgaaggtgctcatcatgaaggagaggccaaggagnngannggtatattag

SEQ ID NO: 52808 - DNA, 83 bp, Glycine max
  unsure (1)..(83): unsure at all n locations; Clone ID: 701142140H1
ctttcngctaagttnatgtttantggnncaacaactagangagtgttataatacngtttgagataaaanaaaatgttccatgc

SEQ ID NO: 52809 - DNA, 276 bp, Glycine max
  unsure (1)..(276): unsure at all n locations; Clone ID: 701142141H1
gttcgntcaaatagctcccagtactttaattgntttctgaatatcatcacttaatttgnnggnnngatggtgagcgtagtgaggatccgccaggcacaaagggcagaaggcccagcaaccatccttgccattggaactgcaaacccaccaaactgtgttgatcagagcacctatcctgactactacttcagaatcaccaacagtgagcacatgaccgagctcaaagagaattccagcgcctgtgtgacangtctatgatcangaggagnttntgtc

SEQ ID NO: 52810 - DNA, 274 bp, Glycine max
  unsure (1)..(274): unsure at all n locations; Clone ID: 701142142H1
aaaaactcttccaaagtagaggcagagaatctgaaagctagggtttgggatgccgaagaacaagggnnagggnggnaagaaccggaagcgcggtaagaacgaggcggacgacgagaagcgggagctggtattcaaggnggacggacaggaatacgcgcaggttctccgaatgctcggaaacggtcgctgcgaacgatgtgcatcgacggcaccaagcgcctctgccatatccgcggcaagatgcacaagaaggtctggatcgccgccggcgaca

SEQ ID NO: 52811 - DNA, 273 bp, Glycine max
  unsure (1)..(273): unsure at all n locations; Clone ID: 701142143H1
gngggtggttgaggggctgtctggtggttttcgcagtggtctcagcgttgggcgtgtgtggccctgctctttactggcgattcaagaacgccatcactctccgnnnnnnnnnnnnnnnactctcttgcccttcctgcctctgtgactgccctccccctctctcgctcttccaacttgctcctgggctggcgaatctctctgtctcagattgtggaagtnatgacccggatctaaaggaggagatggagaagcagtttgtggaccttctcagcg

SEQ ID NO: 52812 - DNA, 272 bp, Glycine max
  unsure (1)..(272): unsure at all n locations; Clone ID: 701142145H1
cctcctcttcacacattttctgtggtgctctaacaaacattctcgttcacactttcagattgtntgangatgngggcgggtggccgaactgatgttcctcctgccaacaggaagtcagaggttgaccctttgaagcgggtgccatttgaaaaacctccatttagtctcagccaaatcaagaaggtcattccacctcactgtttccagcgttctgttttccgctcattctcctatgtngtttacgaccncaccatagccttctgcctctatta

SEQ ID NO: 52813 - DNA, 271 bp, Glycine max
  unsure (1)..(271): unsure at all n locations; Clone ID: 701142147H1
tccccgaagcccttcaccgcattgcaaccatgtcgnggagaaaggtcagagagccaaaggaagaaaacgtgactctgggcccagctgttagagatggtgaacatgtctttggcgtcgctcgcatctttgcctccttcaatgataccttcattcatgtcactgatttgtctgggagggaaacgcttgtccgcatcactggtggaatgaaggttaaggctgacagagatgaatcgtctccttatgctgctatgcttgcagctcaggatgttgc

SEQ ID NO: 52814 - DNA, 273 bp, Glycine max
  unsure (1)..(273): unsure at all n locations; Clone ID: 701142148H1
ctttgntactactcatgttngnnngnncatcgggntttggnnggncgatggtgatgngttaaaaccatgttggcttaagccatctgangataacgtggatcagactgaggggtttgttaccttttctttaaccaatggcccggagtaccatatatctcagatagcagatgcagtgcttgttgctcgtagtcttggggcgacacttgtcatccctgacattagaggaagccaacctggtgacaagnggnatttgaggacatttacgatgtcgat

SEQ ID NO: 52815 - DNA, 279 bp, Glycine max
  unsure (1)..(279): unsure at all n locations; Clone ID: 701142149H1
tctccttgaactcaaacatggcagatgaggtggttctgctagatttctggccaagtccatttgggatgagggtcaggattgcacttgctgaaaagggtatcaaatatgagtacaaagangaggacttgaggaacaagagtcctcttctcctccaaatgaacccggttcacaagaagattccggttctcatccacaatggcaaacccatttgtgaatccctcatgctgttcagtacattgaggaggtttggaatgacagaaatcccttgttgcctctgac

SEQ ID NO: 52816 - DNA, 277 bp, Glycine max
  Clone ID: 701142150H1
ggcaatgaagcttccattaagcagaagctgaagctgattaaggggtccttctactccatcaccttcagtgccgctcgaacctgtgcacaagaggagaagctcaacgtgtcagtggttccaaccactgagaagagggactggggcatcatccccattcagactatgtatggtagcaatggctgggagtctttcacttgtggcttccgagcagatttcccagaagctcaaattgtcatccataaccctggcaaagaagaggatccagcttgtggtcccc

SEQ ID NO: 52817 - DNA, 275 bp, Glycine max
  unsure (1)..(275): unsure at all n locations; Clone ID: 701142152H1
cgacattgnngtttgtccactatgccagantttgaggcttgtgtatgattgcccggcggagagttgtcanggggtggaacacactactcagatttgcngggcatgcactctntgcatacccaggtgtagccagtgtggttgctgcatcaatgatagtgaatatgnggnaacattttgtctggaattgctttgttcttcttgctctaagcagctngtncnatgttcagaaagagangataggnagattgggtcagataaatcagctgttattcatg

SEQ ID NO: 52818 - DNA, 190 bp, Glycine max
  unsure (1)..(190): unsure at all n locations; Clone ID: 701142153H1
ttggntcnttcnctcagactgtanaacngngnagggtacgccgtnaattcaaggctaacaanatctgcngnggangagtatntaaagtcaattanggaggaaattcgcaaagttgttgagcttcaagaagagcttgatattgatgttcttgttcatggagaaccagcgananatgntatggttnagtccc

SEQ ID NO: 52819 - DNA, 277 bp, Glycine max
  unsure (1)..(277): unsure at all n locations; Clone ID: 701142155H1
ctctattctttgaaaccaaagttcaaactctgtcttccctgggttctatttcgaaatcaacgacgatgagttccacagaggcagcagccacagagaagaaaggtggaagagggaaaccgaagacttcaaagtccgtttcccgttcctccaaagctggccttcagtttcccgtcggccgtgtcgctcgctacctcaaggccggtcgctacgcccagcgcgttggctccggttcccctgtttatctctccgcggttctcgaatacctcgctgccgangt

SEQ ID NO: 52820 - DNA, 257 bp, Glycine max
  unsure (1)..(257): unsure at all n locations; Clone ID: 701142156H1
gtttgtnttctttgttgctgcagtnnnttttggtagcatgganntgccatggcgcaggctancnaaggttccctctccgaatgaaaactggctatggtgagcgttcttcggaggtaaaatgcgcaagttttaggcttgctgtggaagcacacaacatccgagcntttaaaancattcctgaagagtgcgttgaaccaacaaaggactacattaatggcgaacaatttagatcagactctaaaacagttaaccaacaa

SEQ ID NO: 52821 - DNA, 277 bp, Glycine max
  unsure (1)..(277): unsure at all n locations; Clone ID: 701142157H1
ancanaccaaaacatacctcaaaacctcaacacattcatacaataaccataaagcacaccaacaacaaattacaacttcaaataaaacagagcatctctctgctcttctctgttctgttctgttctgttctgtttctctctcctccccatatattcctcttcttcttcagaactcagaactcagaagggccacttcacttttagaaacccagttttgcatctgggtttttgcctgttgaagtgccaattttgaagatnataataaaaacnattatga

SEQ ID NO: 52822 - DNA, 166 bp, Glycine max
  unsure (1)..(166): unsure at all n locations; Clone ID: 701142163H1
gnagaacgtaacgtgctctggtttctggactcgaagatgaaggccacanaggaattgagcgagcaagtggnggaaaacgaggtcaaggttttggttgaggnggacgacgaagaatacgagtccgtggatgangtagtagacgacgcagaagatgatgangacgang

SEQ ID NO: 52823 - DNA, 277 bp, Glycine max
  unsure (1)..(277): unsure at all n locations; Clone ID: 701142164H1
gcaattcccatctcatggccatctcaaacaataatcatcatgctcttctccttgtttcaccaggaataggtcacataatccctgccctagaacttgccaagcgtttagtcactcacaaaatcatttccaaactcaccttcttttatggttcaatcaaaatctctactccatcnnaagctgagacacaaattctccaatcagccataaaggaaaaccttttcgatctaattcaactcccccctattgatctctccatccatgttagtcctcatgacac

SEQ ID NO: 52824 - DNA, 279 bp, Glycine max
  unsure (1)..(279): unsure at all n locations; Clone ID: 701142165H1
cacagagacagagagaatgagtacggtgggngnagggnnggtgagtngtaatggtcatggatgttgcaaatcagggccaggctatgcttccccactggaagccatttctggtcccagagagtctctcatttatgtaacctctgtctacacagggaccggaatagagaagccagactatttggcgacagtggntgtggatccaaactctccaacttattccaaagtcatccataggcttcctgttccttatttaggtgacgaattgcatcacacaggctg

SEQ ID NO: 52825 - DNA, 280 bp, Glycine max
  unsure (1)..(280): unsure at all n locations; Clone ID: 701142166H1
aacnccacccattcccttatccccacntcaccacactctatcagnacccaattctggtcatgcttctctctnccgttcgcncctccatcgccgtggaaacccccacggagacggtgaagctgaacaagtacagctcccgcatcaccgagcccaaatcgcagggcgcctcccangccgtgctctacggcgtcggtctctccgaggacgacatggccaagccccaggtcggcgtctcctcggtctggtacgagggcaacacctgcaacatgcacctcctcca

SEQ ID NO: 52826 - DNA, 272 bp, Glycine max
  unsure (1)..(272): unsure at all n locations; Clone ID: 701142167H1
ctctgntggggggttcggtngtggnggncaaccacgacctcgaccacgacctcgacctcgacgatactcccttagcntctgcctcttctaaatcccaccagcaattccatagcttcgatttcgaggatacaagtgttctagatttgcggcgctcatccatctttaacataacacgtatgagcaggagtatttattttgtcttaattaaagccaagatcaacctcttgcttccctttggtccattcgccattctcctacattacgtaatggac

SEQ ID NO: 52827 - DNA, 273 bp, Glycine max
  unsure (1)..(273): unsure at all n locations; Clone ID: 701142168H1
ggcccttcgatgtcttcttgtgtttcantgaggcagngacacgccacagcttcacaggtactctctatcacgctttacagagcgccagattcaagacttacatggagaatggcaagttgagacgtggcgacaaaatcgcaaccgctattctcactgcaatggaagcatcaaggatttcaatcgtcgttttctcaccatactttgcctcctccacctgctgccttgatcaacttgtccacatccatcgctgtatgaataccaaaaaccaatcat

SEQ ID NO: 52828 - DNA, 273 bp, Glycine max
  unsure (1)..(273): unsure at all n locations; Clone ID: 701142171H1
ctcttctccatcgcgcgtncaganacacattttagttgctactaatnggaactgttgaagctgcaaacaaggntgcaaatggaagtctcctagagaaaaatccttcagttgtttttgtgttaggtggcccaggaagtggaaagggtacccaatgtgcaaatattgtccaaaattttgggtatactcatctcagcgctggtgatcttctgcgagcagaaatcaaatctggttctgaaaatggtacaatgattcagaatatgattaanganggna

SEQ ID NO: 52829 - DNA, 340 bp, Glycine max
  unsure (1)..(340): unsure at all n locations; Clone ID: 701142172H1
cgnttctatcatcgtttcntcaaatggcttttttgtatggngctcagcgtctggcttcgccacaccccacttngttcattcccactatggctttccattcgtctcaggcttcaaactctncacttncccccaaaacttttncgtcagcggtcttntctagaactgcacanaaagntggaacaacccttcaaggccaggcatttttnctttcttttttgggggcaggctgggtttgcaaggctcaagggtggatcanacttgnatcagnaggccttctgggcaaggattcaaangggggatttccgcttttttggtaaaactttaattaacaaaacccatt

SEQ ID NO: 52830 - DNA, 273 bp, Glycine max
  unsure (1)..(273): unsure at all n locations; Clone ID: 701142173H1
cgctatngngattgttagtggnaagagcaacacaaattataggccaaaggaggngtttgtatatcttttagattgggcctatgttctccaagagcanggaaaccttctggagctggtggatccaagtcttggttcaaagtactcctcagaagaggccatgagaatgctgctgttagcactcttgtgcaccaacccttctcccactcttagaccatgtatgtcatcagtagtgagcatgcttgagggaaaaactccaattcaagcaccataatt

SEQ ID NO: 52831 - DNA, 273 bp, Glycine max
  unsure (1)..(273): unsure at all n locations; Clone ID: 701142174H1
cgnnantatttatnatantaataaccgcaaaattagcattcgatactgataaatgatagtctaaatatatttatgatgaatattccgaacggtgataagtggaccttcccattaagcagatcctagatcagtcacctccgtgcaattctgtgccctgctcccaacaataacgccctccccacagcactagtatgaagacccaaaaccagagcaacngtgccacctacagccacccacttccagtctatgccattacccttttgtgcggtatta

SEQ ID NO: 52832 - DNA, 271 bp, Glycine max
  unsure (1)..(271): unsure at all n locations; Clone ID: 701142175H1
ccactctgaatgccaaacaccttccaagnggagagtcatcagtttctggtcccgtagttaggttgttcaagccattcgatgaactttttgttgacttccaggatttcaatgtggaagctctagagaaatttgttgaggaatctagtacccctgttgttactgtctttaacaatgatccgagcaatcaccctttcgttgccaaattcttcaacagtcccaatgcaaaggcaatgttgttcatcaacttcactgccgaagtgctgaatctttt

SEQ ID NO: 52833 - DNA, 267 bp, Glycine max
  unsure (1)..(267): unsure at all n locations; Clone ID: 701142176H1
gaaccatagcttattggcaangnttattgaggnngaaataaccagtcgttgcattgntatgattnttacctttgacagctatggtgtctcaggtcattgtaatcatcgtgatgtgcattatggagtatggtaagttgaacattagtattgatccntatcaaagaactatcgcggaaaaatctggggntatagtagcctgattggntggacttagttcaaggnagnnnttgtttgttttctaaatgctctcaaaaagctaacaaaaac

SEQ ID NO: 52834 - DNA, 270 bp, Glycine max
  unsure (1)..(270): unsure at all n locations; Clone ID: 701142177H1
ctcaggcgttctactgtggnatanngttgattttgaagatgaactnttatggtcttcngcagaacgcctttgcagcctgtgaagagatgagaggccctgtgaattttgttgaacngaaggagcctgtcatttgccctnagccgcgccgagttggggttgtatctaacatgcctatgaggcatttgagatggcatttcaatccacnggctgagggttctgactcaaaagctggggcagagctattagagataatgtttaaganggagagcc

SEQ ID NO: 52835 - DNA, 269 bp, Glycine max
  unsure (1)..(269): unsure at all n locations; Clone ID: 701142178H1
ggttaccattatttctttataactatactactcattcagctgcatggtatttttgctttcannnnnnnnnnnnnnnnnnnnccacttcatcaactttacttgacaacaanattgtaaaactcaaaatctagtttcatacttttttncttcttcttgaaatggctctccaggctgcttctcttgttcctgcttctttctcggttcttaaagagggnnagagtggtgtgtctctcaaggactccaccttgttcggtctttcatttcagaac

SEQ ID NO: 52836 - DNA, 252 bp, Glycine max
  unsure (1)..(252): unsure at all n locations; Clone ID: 701142179H1
gngctcgagcccagccgcagcagcaagtgatcgnngcgaaaancgagtaatcagcagagaaactactcgtcgtagttatgggtaaagttcacggatcacttgcacgtgccggtanggttagaggccaaaccccaaaagtggccnnnnnnnnnnnnnnnnnnnnnccacgtggccgcgctcacaagaggatgcagtataatcgccgattcgtcaccgccgtggtgggattcggcaagangaggggacctaact

SEQ ID NO: 52837 - DNA, 264 bp, Glycine max
  unsure (1)..(264): unsure at all n locations; Clone ID: 701142180H1
attcgctctctctctctgatttcctattcctttatatcantttcctcaccttnncactttntgaacgagacacagtgnggaaactgaacccttttgtttgttttttcagctgaaaattcagaccaatatatattttgagtattttttttcctttgatttcgtggaaagttattatcacagaatctgagggttttgtngacagaacttcaggtttaacaatgaagaaggttcccaagancagctgcnagtctgcatcacacaggt

SEQ ID NO: 52838 - DNA, 276 bp, Glycine max
  unsure (1)..(276): unsure at all n locations; Clone ID: 701142181H1
gcgagtgtgagatttttagagagagagaggtgagaacgctgagtgctctgctgagagattccattgccccaagagaaggaagaggaggagaaggtggnnnnnnnnnnnnnnnnnnnnnnnnnngtttatttatcctcagagtggtggatagggatttttccctctgcagcgttccgttcctttccactgtgatttgttgacgtttctgatggagcagcgaaagttgtggttttggggattccgtgggatgtcgatactgagggattaagggaatat

SEQ ID NO: 52839 - DNA, 270 bp, Glycine max
  unsure (1)..(270): unsure at all n locations; Clone ID: 701142182H1
ggnttttgcagagcttccgcgttgaaaccatccaaccctcttagcctcatattcgttgtctatacttccctccttccttcgtgtaattacatttttttcatcagcaggaccaaattgatacacaagatcactgtttttttagagagagattgagagaggatgtttggttcaaagaaaactcctctgagagatgctaaacctagttctgttggccatgcccataacccctttgattctgatgaagagncaaacgataaangtatantctct

SEQ ID NO: 52840 - DNA, 271 bp, Glycine max
  unsure (1)..(271): unsure at all n locations; Clone ID: 701142183H1
gactgttgatggaccatcagccaaggactggagaggtggacgagctgcttcatttaacatcattcctagcagcactggagctgccaaggctgttgggaaagtcctccctgctttgaatggaaaattgactggtatggcattccgtgttcccaccgtggatgtctctgttgttgacctcacagtgaggctggagaaagaagcttcctacgatgaaattaaaaatgctntcaaggaggaatcagagggcaagttgaagggattcttggttaca

SEQ ID NO: 52841 - DNA, 271 bp, Glycine max
  unsure (1)..(271): unsure at all n locations; Clone ID: 701142184H1
gnnggtgngtngtnntggtcatggntgttgcaaatcagggccaggctatgcttccccactggnagccatttctggtcccagagagtctctcatttatgtaacctctgtctacacagggnccggaatagagangccagactatttggcgacagtggatgtggatccaaactctccaacttattccaaagtcatccataggcttcctgttccttatttaggtgacgaattgcatcacacaggctggnattcatgcagctcttgcatggagacc

SEQ ID NO: 52842 - DNA, 273 bp, Glycine max
  unsure (1)..(273): unsure at all n locations; Clone ID: 701142185H1
gcttgtctcaangnttaagccntgcatgtgtnngtntgaactanttcngactgtgnaactgcgantggctcnttaaatcagttatngtttgtttgntggtatctactactcggataaccgtagtaattctagagctaatacgtgcaacaaaccccgacttctggaagggatgcatttattagataanaggtcancncaggctctgcctgtngctttgatgattcatgataactcgtcggatcgcacggcctttgtgccggcgacgcatcattc

SEQ ID NO: 52843 - DNA, 275 bp, Glycine max
  unsure (1)..(275): unsure at all n locations; Clone ID: 701142186H1
cgtngngttnntttntggngcantggtgcctgtggntgtccagaaagcactagagnnggngtttganatggctttgcangatcgtgtgatgganganacaaaagacaagaaaaacgcagttgaggcttatgtttatgacatgaganacaagcttaatgacaaataccangagtttgtcactgcttcagagagagatgattttactgctaaacttcaggnngtggaagattggctttatggtgngggtgaagntganactnnaggtgtatatactg

SEQ ID NO: 52844 - DNA, 306 bp, Glycine max
  unsure (1)..(306): unsure at all n locations; Clone ID: 701142188H1
ccactactactcactcactgcagatctcaattgcatcgctgtccatggctaccatcgttagcatcaagggcccgccagatcttcgacagtacgtggcaatccaactgtcgaggtggatttgacttgctccgatggtacttttggccagagctgctgtttccaagtggtggcatccactggggatttatgagggcccttgaattgagngatgngagngattctgnactnacctttgggaccaggggtgtnttcaacagggctgtttgnaccctcgtggaaacaaccggnccatttgggcccctnncc

SEQ ID NO: 52845 - DNA, 272 bp, Glycine max
  unsure (1)..(272): unsure at all n locations; Clone ID: 701142189H1
ggatcgcacggcctttgtgccggcgacgcatcattcaaatttctgccctatcaactttcgatggtaggntagtggcctaccntggtggtgacgggtgacggngnattagggttcgattccggagagggagcctgagaaacggctaccacatccaaggtaggcagcaggcgcgcaaattacccaatcctgacacggggaggtngtgacaataaataacaataccgggctcattgagtctggtaattggaatgagtacaatctaaatcccttaa

SEQ ID NO: 52846 - DNA, 273 bp, Glycine max
  unsure (1)..(273): unsure at all n locations; Clone ID: 701142190H1
gnaaaacgcggtttttgttcccctgctctatctgactctgtctctctttctctctgcaaaaaccttcgttcatcgtcaacccacgaactcaaacaacaaatcattcattctttcaattgtaacatataaaaaaaaatgggttgtttcgccagcaaaaacgctgacaccaaggccagtagggccgcgcgctggcgatccacgggcatcgttgctttgcgcgattccaaattaaagacgtttccggatgaaattctcgagttagacagatctgtt

SEQ ID NO: 52847 - DNA, 268 bp, Glycine max
  unsure (1)..(268): unsure at all n locations; Clone ID: 701142191H1
tctctttctgcaaccaaaccaaaaattagggtttctcgatcttcttcatttctcactgctctcaccgttttagggttttaccttcccaatacgactcagggctgcttctaagcaattttgttcgttttgaagagtatttatctgtttcagcagtttttttgttttatttttttaattggnggctacttgtaaagctgctatcctgattctggaaaggnggggttttccctttnaattttgcggacaactgttgactacgaganttgtg

SEQ ID NO: 52848 - DNA, 268 bp, Glycine max
  unsure (1)..(268): unsure at all n locations; Clone ID: 701142192H1
gcggctngggttttngcgcanttcttctagatttnaggnngntgggtnnggnaanggttcacntcagtattgtggttattggccatgttgactctgggaagtccactaccactggccacctgatctacaagcttggnggcattgacaagcgtgttattgngagatttgaganggaagctgctgagatgaacaagaggtctttcaagtatgcctgggtgcttgataagcttnaggctgagcgtganagaggaatcacaattgatnttgc

SEQ ID NO: 52849 - DNA, 270 bp, Glycine max
  unsure (1)..(270): unsure at all n locations; Clone ID: 701142193H1
ggnggntggngttgtttgtntcattctntgaaccatatccgattcgatcctagtgggaactgactcactcctttctctccctccctctaaatatatatttctgacaacccaaagtcaaacaaagaaaagcaactgaactagaaatagattgattgtttcatgataaaaaggcctcatgccttgtctcccttttgatcaagcgtgacaaacttgttttttntttttatnattgtaaatcaaaaagttccctttcnttttgttatataataa

SEQ ID NO: 52850 - DNA, 270 bp, Glycine max
  Clone ID: 701142194H1
ttctgatcgctccctgagagagctcgtcgcggcggttgcagaagaagattgcaagatgaagttcaacatcgcgaatcccaccactggatgccagaagaagctcgagatcgacgacgatctgaaactgcgagcattttgggacaagaggatctcacaggaggtcatcggagatgcactcggtgaggaatttaagggctatgtcttcaaaattaccggagttgtgacaaacaaggatttccaatgaagcagggagtgctgactcctggtcgt

SEQ ID NO: 52851 - DNA, 272 bp, Glycine max
  unsure (1)..(272): unsure at all n locations; Clone ID: 701142195H1
cacatngtagctattatactctctagagtaattgcggaatctgctagaattttctaataatggcgaaagacgttgagcaggtcacagagcanggtgaatactccgcgaaggactaccatgaccctcctccggcaccgttgatcgacccagatgagctcacaaagtggtccttgtacagagccgccatagctgagttcatagcaacactcctttttctttacatcaccgtgttgaccattattggctacaagagacagagtgacaccaaaatc

SEQ ID NO: 52852 - DNA, 270 bp, Glycine max
  unsure (1)..(270): unsure at all n locations; Clone ID: 701142196H1
ggatatcctttggtatatagttgaggttnatttcactgccactgcctacaaatcgaccaaatagcattgaccctgcattgaaaatgtctggtagatttgatagtgaaattgatattggtgttcctgatgaagttggaagacttgaagtccttcgcgtacataccaaaaacatgaagctttcagatgctgttgatctagagagcttgcaaaagatactcatggatatgttgatgctgaccttactgcccttgcatgaagctgctctcaatg

SEQ ID NO: 52853 - DNA, 270 bp, Glycine max
  unsure (1)..(270): unsure at all n locations; Clone ID: 701142201H1
gtttctcttcctccctggaagaaaaanaagagtcaccgctacgacgccgttcgtgcttttttgangtgccacagtgcatgtttgggcgtngtggaccaangaggagtgacaactccaaatattatgatattctcggggtttccaaaaatgccagtnaagatgaaatcaagaaggcctatagaaaggctgctatgaagaaccatccagataagggaggagatcctgaaaagtttcaaggagttaggtcaagcatatggagttttaagtgat

SEQ ID NO: 52854 - DNA, 263 bp, Glycine max
  unsure (1)..(263): unsure at all n locations; Clone ID: 701142202H1
agctcttcactttcagtagccagtgaacatagtagtatttgtggagatgagttcatcagttctgaggtttcttcagatttagggacaacaagttccaaagacataggaaanncnctctccantgtcaaaattgcagccagggctactgatttgagtatgtcaaatgtagaggcagatgtggcagtgagccttgaagagacaggagttagatctggctcaaagcctactacaggtgtttttcancaantaactctggaaagatc

SEQ ID NO: 52855 - DNA, 262 bp, Glycine max
  Clone ID: 701142203H1
tttgtctccatcattttctcgagagctttcagtttctgtggttcatctttcttcttcttaatctttccccccctgctgctgtaacatcccgcttctctgaatccctttctgctaatcatctgtctttcaagctaagattttctggtttgtcttttaattcaccaaaaagcaaacttagaaggatttttcgaaagccaggtgttttcagaaacgagatccaggttttattgtcgaatttcgctagtcatattaatatttcatc

SEQ ID NO: 52856 - DNA, 258 bp, Glycine max
  Clone ID: 701142204H1
tattattgaattgacaatgaggcctgctcttgctttgcttcctcttctatttgctttcttgttagctgccactacggaatcaagaaaagatccaggggaatattggaaaatgatcatgaaagatcaggaaatgccagaaggacttcaaggtcttgtttcatttcaatctgaaaataaccctaagactcaagagcagcttggtaaaggttccaaaaaccattgtgaagagtctctagttacaaatacacaagttaacag

SEQ ID NO: 52857 - DNA, 259 bp, Glycine max
  unsure (1)..(259): unsure at all n locations; Clone ID: 701142205H1
gttgttgctctttgaactcgaacgaagttctccgaagtcgaaacactcgttcgatttcgctgaactctgaagttaatttntgttgcgaaaatgtcggtggcgaagaagttgattagatgcgtcatccttgacttggacggcacgctgctcaacacagatggcatcgtaggcaacgttttgaaggttatgttaggtaaatacgggaaaggaatgggacggaagagaagctcagaagataattggaacgacgccgtttgag

SEQ ID NO: 52858 - DNA, 256 bp, Glycine max
  unsure (1)..(256): unsure at all n locations; Clone ID: 701142206H1
gggatagaacgtttccgagaccaacccagtaaactctctgcgatggaggatcacaaagttgcgatttttttgtgattggatcggatgcgactcagcattgtgggtatcgaagcaatgcatagagcgatctcgtttctcattcaaccgcgatgcctccttctcatagttgttctctcaattttcntgattctcgcattatctggttccaaacgagttgaagagaaagaagaagaacttgaaattacagatagagtat

SEQ ID NO: 52859 - DNA, 257 bp, Glycine max
  Clone ID: 701142207H1
attgacagagtacaaaatttataaaactgatggattggcagatgcttcaactcagacagaagaaaatgccagcagatccagagctcagaaaacttgcacaaggggtgtatcaacggaggatggcttgttagaatccgaatgtcatgaaattcgtcaagctgaagctccacgagtgaaagatactccacgaatctgtagggatgccgtttctcctccgccctcaacgtcaagttcctcatcttttgtggggaaggctg

SEQ ID NO: 52860 - DNA, 258 bp, Glycine max
  Clone ID: 701142209H1
ccagtagtcatatgcttgtctcaaagattaagccatgcatgtgtaagtatgaactaattcagactgtgaaactgcgaatggctcattaaatcagttatagtttgtttgatggtatctactactcggataaccgtagtaattctagagctaatacgtgcaacaaaccccgacttctggaagggatgcatttattagataaaaggtcaacacaggctctgcctgttgctttgatgattcatgataactcgtcggatcgca

SEQ ID NO: 52861 - DNA, 255 bp, Glycine max
  Clone ID: 701142210H1
cgatttcgatctcgcatagcattctacaatggccactattccagttaaccccaagcctttcttgaacaatttgactgggaagcccgtaattgtgaaactcaagtggggaatggagtacaagggctatctcgtttccgttgattcctacatgaacttgcagctggccaacactgaagagtacattgagggacagtttactggaaatttgggagagatttaatcagatgtaacaatgttctctaccttcgaggagta

SEQ ID NO: 52862 - DNA, 257 bp, Glycine max
  unsure (1)..(257): unsure at all n locations; Clone ID: 701142211H1
ggacactgnaaggattgatcaggctcatnccagttggggtcacttcggtgtcgtgggcgccatcgatggcacccggagcccttgtcggtgctgggttgcttgatcctgtacagaagctgtgctctggtggttgataatactgtgaaggtatggaagctaaacaatggactctggaagatggactgcttccctgctcttcagatgcacatggattgcgttcgagatgttgnttgggcacccaatttagggctccctaa

SEQ ID NO: 52863 - DNA, 258 bp, Glycine max
  unsure (1)..(258): unsure at all n locations; Clone ID: 701142213H1
ctctttttcgcctcattccattttcatctatcaatggctccagtancagcagcatcttcagattcaatcaagccaagagatgtttgcatcgttggtgttgcacgtacaccaatgggtggatttcttggtactctgtcatctctatctgccaccaagctaggctctatagctattgaagctgctcttaaaagggccaatgttgatccatcccttgtggaagaagtattttttgggaatgttcttagtgctaattggggc

SEQ ID NO: 52864 - DNA, 228 bp, Glycine max
  unsure (1)..(228): unsure at all n locations; Clone ID: 701142214H1
ctacttgtttgtatgtgttcaggaccattcaagcattggttcttctatttgaagttcactattacaaaatctaacatgattatgtcagattatacaaactgtgctgattctgtcttgaaatttatcaattattgtctgcagaaaatatttgttaacaattataaccttgttggaaatcagatgacccatgtgtggcaacacagtcacaaaacaaanaaaaaaaaaagg

SEQ ID NO: 52865 - DNA, 266 bp, Glycine max
  unsure (1)..(266): unsure at all n locations; Clone ID: 701142215H1
aganaaaggaaaacaatgggttccgataatcaccagaacttggagttcttgaaggagatcggtttgggctcttgccaacattgggctcttacattaatgggccagtggaaagccactggttcttctgtcacttctgttaatccttctaacaatcagagtatagctcaagtgaccgaagcaactttgcaagattttgaggaggggttgcnagcttgcagtgaagcagctaagacatggatgactataccggcaccgaagagaggtga

SEQ ID NO: 52866 - DNA, 266 bp, Glycine max
  unsure (1)..(266): unsure at all n locations; Clone ID: 701142216H1
tcttctatgctggtgaanaagcaaaagccaagattctgaaaatatgtgaagcctttggtgctaatncgttacccttttgctgaggaacttggaaagcaagctcaaatgattacagaggtttctggaagacttttagaattgaagaccactttagatgctggactactgcatcggaataacttgctaaatactattggggctcaatttgagcaatgggatgttttgttgaggaaggagaaatctattcatcataccctgaacatgct

SEQ ID NO: 52867 - DNA, 265 bp, Glycine max
  unsure (1)..(265): unsure at all n locations; Clone ID: 701142217H1
gcctgctcttgctttgcntcctcttctatttgctttcttgttagctgccactacggaatcaagaaaagatccaggggaatattggaaaatgatcatgaaagatcaggaaatgccagaaggacttcaaggtcttgtttcatttcaatctgaaaataaccctaagactcaagagcagcttggtaaaggttccaaaaaccattgtgaagagtctctagttacaaatacacaagttaacagtgacttcgaacccataccaagtgttacc

SEQ ID NO: 52868 - DNA, 260 bp, Glycine max
  unsure (1)..(260): unsure at all n locations; Clone ID: 701142218H1
ttggtgtgcactttcacttgtggagctagctgcaccaacagcagtggaaattgccttgttcttgagatgtctggcgttcttctttgggtgagttctggacccaaagagaacatcaactccttggtgagtttttcatgcaggannnnnnnnnnnnnnnaaagaacacaaaagaggttttctggaatcagttttgcaagtggtgcctctgctttttcaagtgcagtggcagctgagactttangatcctcagaggagagggt

SEQ ID NO: 52869 - DNA, 238 bp, Glycine max
  unsure (1)..(238): unsure at all n locations; Clone ID: 701142222H1
gctgcatgcactttcactncgaagacccttgaagcgagtctncggccacagcaaccagcgacnacaactcaatgcagctagggttgctttgcttgctatcttgttggaggattttctgttcaagagaagatggtaactagaattgtggatcttcgttcagacacagttacaaagccaactgaagcaatgagagctgctatggcaagtgctgaagttgatgacgatgttctaggctatg

SEQ ID NO: 52870 - DNA, 257 bp, Glycine max
  unsure (1)..(257): unsure at all n locations; Clone ID: 701142223H1
caggaatggaggtcgcaacaaacacggccgcggccacgtcangttcattcgatgctccaactgcggcaaatgctgccctaaggacaaggctatcaagaggtttctggtgaggaacattgttgaacaggctgcagtcagagatgtgcaggaggcttgtgtctacgaacaatacacgcttccgaagctgtatgtgaagatgcagtattgtgtttcctgtgctatccactctcatgttgtgagggttcgatcccgcactg

SEQ ID NO: 52871 - DNA, 256 bp, Glycine max
  unsure (1)..(256): unsure at all n locations; Clone ID: 701142224H1
tccgatctccgacaatggcgacccaaatgagcaagaagagaaagttcgtagctgatggagtgttcttcgctgaactgaacgaggttctgacaagagagttggccgagcncggttactccggcgtggaagttagggttacgccgatgcgcaccgaaatcataattagagccaccagaacccaagctgttctcggtgagaagggaaggagaataagggaacttacctctgtggttcagaagaggttcaagtttcccga

SEQ ID NO: 52872 - DNA, 260 bp, Glycine max
  unsure (1)..(260): unsure at all n locations; Clone ID: 701142225H1
gctacctccatggtgaagcttatgcttttctctgctctcatactcttgtccttgcaagcagttgtgtctgtaacaccactgcattttcaacatccactagaccctttaaccaaacaagagataagtcttgtccaaaccatagtccaaaacaagtacccaagctcaagtaacaggttgagcttccactacattggactcgnccgaacctgaaaaggatgccatcctcaaatgggaatccatcaaaccaactgttataactg

SEQ ID NO: 52873 - DNA, 256 bp, Glycine max
  Clone ID: 701142226H1
catcaacaaaaccagctcctggacttgcttgcatactctctctgttctttctattcaaagatctgtaaatttatatattatgcttttatcatatatagtattagtatagtccacttgtttaaaccacctgtgttgcatattctgaatcctatcatcttgtggctttgatgtctagagcattggaacatgattacatagggttggcagagaatccgtcaatggatggtaaaaactcatcatcactgaacttgaagga

SEQ ID NO: 52874 - DNA, 259 bp, Glycine max
  unsure (1)..(259): unsure at all n locations; Clone ID: 701142227H1
gcaagctctcacctttgaagccccaattttgaagagatataactggcctgacagaaactgacaggatgaaacgtaataatagtgtttatcccgctgcacttaactgtgatgacatcctgcatganatcctacttcgaataccaccaccaactatctccaaattanttatcgtatcaaaaatatggctgcgtgtgatatgcagtccttcatttcgtcaatgctacgtgaggcaatggggacaaagttttcgacttttggg

SEQ ID NO: 52875 - DNA, 250 bp, Glycine max
  unsure (1)..(250): unsure at all n locations; Clone ID: 701142228H1
ctcccatctgcttctcactgatctccattcccattccatggcttccactgaanccatcccctttcaanaaaattcagattcaaagggatgacactacatttgacgcatatgtggttggaaaanaggatgctcctggaattgttgtgattcaggagtggtggggtgtggattacgaaattaagaaccatgccgtgaagatttctcagcttggtagtgggtttaaagctcttattccagatttatacagagg

SEQ ID NO: 52876 - DNA, 260 bp, Glycine max
  unsure (1)..(260): unsure at all n locations; Clone ID: 701142229H1
ggcccacctcgatccctcttagtagtgggctcactgcggtcctgtatggcggggannttcgntaagtnccatgcantcaaggggcncggatgtaantggggtttcaaggcttccantgaagggatcaccnttgattggttgaatcacttgataggttggcttttctgattggatggccctancagtgnagctaaattgcctcttagaaggcaggatgtggagtggtgaananccagagaggccctgggagctacaagagt

SEQ ID NO: 52877 - DNA, 263 bp, Glycine max
  Clone ID: 701142230H1
ctcagattttgcagagcctggagctgagctgagaaaacccccaaccccaacctcaaccttaacctctcctcactttcttttcaaccagaactatgattaagctttttaaagtaaaggaaaaacagagagaactggcagaaaatgcgagtggcggaccacccgttaagaagcaaagtgccggcgagttgcgtcttcacaaagatataagcgagctgaatctaccaaaatcatgtaccatgcaattccccaatggcaaagatgac

SEQ ID NO: 52878 - DNA, 265 bp, Glycine max
  unsure (1)..(265): unsure at all n locations; Clone ID: 701142231H1
atgccatncctcaaatgggaatccatcaaaccaactgttataactgtccctngcaaagccttggccattgttatantcaacagccaaacccacgagatcttaantgatctaaaggcaaggcgcattgtctccgacaatattcactccgggaatggcttccctaccctttccgttgatgaacaagtcgttgccatagagctgccactgaaatacggtccattcattgagtcagtgaacaagagagggctgaacctctctgaggtgg

SEQ ID NO: 52879 - DNA, 266 bp, Glycine max
  unsure (1)..(266): unsure at all n locations; Clone ID: 701142233H1
gganacgaagcaaaatcctgaggcttctatggaagaaaagagttcatctgaacagccatcagattctcaaccaaagcccgntcattcacaaaagnaatcaagatgntctggctgcagcaaaagagcgntttctggnacgtaagaaagcanaggaacaatgaaattttccctgcctttgttcagatgtttggtggttcatttggtctttagtttttcgtccttgatctaatatccatgaaccttgaatgccaaagagctttatctgt

SEQ ID NO: 52880 - DNA, 257 bp, Glycine max
  Clone ID: 701142235H1
agaagtttcctgctagactttttgcagtcgctcctcgaatagcccagggagctattccaggggttacagctgaatcttatcaagaggacaacaaattatggaaaaagcatgttaacgcttacaaaagaatgaataaattgattggcactactagatatcggaatgtgatggacatgaatgcaggccttggaggatttgcagctgcacttgaatcacaaaagtcttgggtgatgaatgttgtgccgtcaattgctgag

SEQ ID NO: 52881 - DNA, 254 bp, Glycine max
  unsure (1)..(254): unsure at all n locations; Clone ID: 701142236H1
gagctctgccggcngtgaggggtgctccgacgctagcnaccggacagataaggagcaaaggaggtcctcccatgtttctggcactgagattgtgggagtgtgtgaggagagaggatcagagtgttcagtggaggtggatctggttcctgaggttaaggtgcatttggccaatgaggagagggattgtaggatttgccatctcagcatggatatgaccaaccatgaatctgggactcccattgagttgggatgtt

SEQ ID NO: 52882 - DNA, 254 bp, Glycine max
  unsure (1)..(254): unsure at all n locations; Clone ID: 701142237H1
cactgcagccgtagaaggaaaaccgaccatggtgcacgtctccttttacaggaactatggtaagatcgtttaagangccccgccgtccgtacgagaaggagcgtctagacgcggagtgaagctggtgggggagtacgggctgcggtgcaagagggagctgtggagggtgcagtacgcgctcagccgcatccgcaacaacgcgcggaatctccttaccctgcgacgagaagaacccgcgccggatcttcgagggc

SEQ ID NO: 52883 - DNA, 254 bp, Glycine max
  unsure (1)..(254): unsure at all n locations; Clone ID: 701142240H1
gttcactcaatctcactgtgttgtgagtngtgtgtgagcaccaaccaacaatggtgtctctgactccgttatgtttctttattaccttgttgatcgctggtgcaganccagcggcggagccccaaacggtgcgttttgacaccggggggttgagcagagacacctttcccaaaggattcttattcggaacggccacgtctgcgtaccaagtggagggtatggcccacaaagacggtcgcggcccaagcatttgg

SEQ ID NO: 52884 - DNA, 256 bp, Glycine max
  Clone ID: 701142241H1
tctctctctcgatcaatcatggctttgcccaatcagcaaaccgtcgattaccctagtttcaaactcgtcatcgtcggtgacggtggtacaggaaagacaacgttcgtgaaaaggcatcttaccggtgaatttgagaagaaatacgaaccgaccattggagtggaggttcacccattggatttcttcacaaactgtggaaagattcgcttctactgttgggatactgccggacaagagaagtttggtggcctcaggg

SEQ ID NO: 52885 - DNA, 255 bp, Glycine max
  unsure (1)..(255): unsure at all n locations; Clone ID: 701142243H1
aaagcacaggagtgagttatgtcagactcaggtgcagttaccttgccagctgtagatgaccattcccaagcatgagaattgtagcgaactgggtattgttgtggctgaagctgagcatctacagtcactggaacccgaaagttctttttttggagctagacagaacgcataaaaggcaaatatatatagcagcaagttcaggaanttggagtgaggcttatcctatttcaaaattcatcctcattggtggcgant

SEQ ID NO: 52886 - DNA, 257 bp, Glycine max
  unsure (1)..(257): unsure at all n locations; Clone ID: 701142244H1
gctgggacccctctaaatgattccttggcatatgtatacccagatgatcctttttataaggactatacttattcaaagacactgtcggagaaacatgtgttgagctacgggaacgatgaaaatggtggaggattggaggtggtaacactcccttgtgggctagtgggaggcgacacccttcaatcttctacacccgttagcggagtagtttgtatcgcacagatcatgcaagatgcaagggcgtacatntcactcaa

SEQ ID NO: 52887 - DNA, 260 bp, Glycine max
  unsure (1)..(260): unsure at all n locations; Clone ID: 701142245H1
ctgnttctcccttctctcatactccctgtacggtgccattgnctctttgcntatgctcgncatcgccattcaccaaacaacaatgccatcccaggtgtgggcatantgtgagtgttnanaatggcttanagtantgttttgtgatattgttggtgaaagagtcaagtaaagagttattgaagccgcagtgagtcagtgcctttgtcctcaatcaaacactggatnacagtggagtagtnaaagaggcaagnattgaaggg

SEQ ID NO: 52888 - DNA, 264 bp, Glycine max
  unsure (1)..(264): unsure at all n locations; Clone ID: 701142248H1
aaagcttgctagctttctaggcattatagctagaaatccagagttagcacctttaaacatagacgattggagatgtttngacaaagaagaaaaaaataaattggtggatcttgtgaggaagaagttctcgatcccggaacgtggtgtggaatttgtcaaaaaatcacttggaaagaaatggaaagactacaaatgtgatttaaggagtatgtatttcacaaagtataagactaaacataccttattgaaacacagaccgaatca

SEQ ID NO: 52889 - DNA, 242 bp, Glycine max
  unsure (1)..(242): unsure at all n locations; Clone ID: 701142249H1
ctcttgcaccgcaataatggcaatacnaatactagcataatacctttgtgagtctcaaaacattagcacactatatatacactgcatagccttggggtcttcaaaatcatcaattcaatggcttccctcatgagcaccatcctcatgcaaaggtcttcttctanttcacttgctgctgggaggttgttctccacaacaacagcaaccattattgattccccttcacttgctcagagaatcag

SEQ ID NO: 52890 - DNA, 259 bp, Glycine max
  unsure (1)..(259): unsure at all n locations; Clone ID: 701142250H1
aaaacatccaaaaaaaaatttcggacagagaagaatatagcttcttcttccaccagtgaacaagtnaaccggttttagtctcttccttcagnttatttactggatcttttaaaaaagctgttcctggatgcaccgtgtcagggtagtctctatgaacctgtttttgctgctttgattactcccacggaaattaatcagctcgtcaaacattcttctgaagtggacatgcaaactaagaaaaaaacctctaggcgaaatg

SEQ ID NO: 52891 - DNA, 255 bp, Glycine max
  unsure (1)..(255): unsure at all n locations; Clone ID: 701142251H1
agganatancctgtttgttcattattttangtngattnntnnnccgttnggtcatagatngcattgtaggatntnatatantatgatatgntnttcccctttgcttcaaggntgtngcntcattcattanttgggttctctatanganaaagtatggggtcatgnaagtcttttgtagtnttttagttgngntgtnttcacatntttatctttcgtgccaaagtggtggtgatgttggtgatggntgatnaaata

SEQ ID NO: 52892 - DNA, 253 bp, Glycine max
  unsure (1)..(253): unsure at all n locations; Clone ID: 701142252H1
gtttttatggccccttcattcgtagtgttctcagtctctgtttttttttnctttttcttgtttttttttgttgccnaagttgttgttgtnaaatattttggaagtgggttttttaagggaaggggttatgaattgtgatgatnccgtgtangaaggggcggcananaagggttttnccccctttggcaggaatgngattgnctatgttgtnaactgngcccttcttttaaagatggnatatgtatattgtncc

SEQ ID NO: 52893 - DNA, 257 bp, Glycine max
  unsure (1)..(257): unsure at all n locations; Clone ID: 701142253H1
cagggctnacncttgaagctgatcaagctagggaacgacaganaagagaagaagaagaacatcttgcatgggaagctgctgaagccgagagaaagcacaaggaagangaggcggctcgtgaaagancagcacaagaagctgcagagaaacaagntgcnttggctaaaatacgttcaagagaaagcccantntcttggtgaagaacctgaaaaaggacctantgttacacaggttttggtacggtttccaactggtga

SEQ ID NO: 52894 - DNA, 253 bp, Glycine max
  unsure (1)..(253): unsure at all n locations; Clone ID: 701142255H1
agtctttgtcctagtgtcttccacaacaactnggaccgagtttccaaatattcacataagagaagaacaatagttctctcccnagaaactcangatatgctagataagccatccttaggagcaatatatccgtcctcttcaatttattagcagaaggtgtgttgcgtattagaccatagtctttttgtcattgttgtttcccaacaacgcagtttagcctttgagagcatcagcaatcacatggtgatcagaa

SEQ ID NO: 52895 - DNA, 235 bp, Glycine max
  unsure (1)..(235): unsure at all n locations; Clone ID: 701142256H1
atccgcttgggctctggaggctttactacgtgcattgtttacacnattagggttcttgccgaacaaggctgataaagaattggcttccaatgggaaatcccctgagaagttgaaaggcgctggctccgtccttatgaaattttttggcacccttgcgggaaaaggctctaagcgtgttggagcattatatgtaacttgtcagttattcaagatttacttaagcttggcacagttc

SEQ ID NO: 52896 - DNA, 255 bp, Glycine max
  Clone ID: 701142257H1
ctttttcgcctcattccattttcatctatcaatggctccagtagcagcagcatcttcagattcaattcaagccaagagatgtttgcatcgttggtgttgcacgtacaccaatgggtggatttcttggtactctgtcatctctatctgccaccaagctaggctctatagctattgaagctgctcttaaaagggccaatgttgatccatcccttgtggaagaagtattttttgggaatgttcttagtgctaatttgg

SEQ ID NO: 52897 - DNA, 236 bp, Glycine max
  unsure (1)..(236): unsure at all n locations; Clone ID: 701142258H1
atggcacttcgttgcttggtgatgncccctttctgttctctacactcttggtcttgcgagancaaagccatgccagagacgaagatttttggcatgctgtttggccaaacactcccattccaagttcattgcgagatcttctaaagcctggccctgcaagtgttgaaatcgatgatcaccctatgcaaattgaagaaacacagtacccgaaaaccttcttctataaagaagacctt

SEQ ID NO: 52898 - DNA, 255 bp, Glycine max
  unsure (1)..(255): unsure at all n locations; Clone ID: 701142259H1
gtcctctcgaagctttcatcgttcaacatattctcaccatctcagtcatgggcctgctatcttgttttaggtctaccgtcctgagaaaatgttccaaaggaagctctggcatgtcaagattcctgtatacgaacaattttcaacgaaacttgatttcgtctggtggcaatgaatcgtattatnggtattttaacaggagatcatacacttcactttatatgggaactggaactgtgggtgggattacaagtgcta

SEQ ID NO: 52899 - DNA, 259 bp, Glycine max
  unsure (1)..(259): unsure at all n locations; Clone ID: 701142260H1
ctgggatgnccagtttcgaaccgagggtttgaagctcatgctccaagccaacaagttantccaggaaactgacaacgatacattggacagtttataatttaacgttgaaaccagtagcatgttttgaaaangttttgttattcattggaagctcaggagtcatcttttgaagaagataaccatccttctatatttcgctctattttcattcaaggttgtgcttcatatgaacaaaatccatcttcttggaataaagttg

SEQ ID NO: 52900 - DNA, 257 bp, Glycine max
  unsure (1)..(257): unsure at all n locations; Clone ID: 701142261H1
gaggctgnncgaaagaggaaggggaagtggtagccatgactggngatggtgttaatgntgctcctgccttgaagcttgcagacattggtattgcaatnnggcattgcaggcacagacntngcaaaggaagcttcagatatggtgttggcagatgataattttagttcanttgttgctgctgttggtgagggtagatctatctacaataatatgaaggccttatcaggtatatgatctcttccaatattggcgaggtt

SEQ ID NO: 52901 - DNA, 258 bp, Glycine max
  Clone ID: 701142262H1
gcttccaaggctgcacttctcttgtgtctcaatgttctctttttcactgtggttagttccacatatgtgccatgtaatccaccccccaaaactcccaaacacccacctgtcccaaagccaccatccccaaagctagcaagctgccccaaagacactattaagttcggtgtgtgtgctgatgtgttaggtttgattaatgtgcaattgggaagccaccaaagaccccatgctgcaacctaattcagggtcttgctgatc

SEQ ID NO: 52902 - DNA, 265 bp, Glycine max
  unsure (1)..(265): unsure at all n locations; Clone ID: 701142263H1
ctccccgttatagatctttctccctccctctccggcgagtgggacccacttctctngcgccgaggtcagccgcagcctgcagggaaaccggcgcgctcctcgtcaaggaccctcgctgcaccgtcgaggacaacgatcgcttcatcgacatgatggagcgctacttctcaaaaccccgcgacttcaaacaccgccatgagagaccccacttgcattaccaggttggggttacaccagagaaagtagaagttccaagaagcttggt

SEQ ID NO: 52903 - DNA, 262 bp, Glycine max
  Clone ID: 701142265H1
tttttcaccttcccctttgtttctcaacatcattccccaatttccccttctgtattgtttttcttcatttctctttttcaatccccgatttcccccttcttcgttttgtgtcttcataattcagatcctctcttcaatctagggttcctggcttaacgaaatcaaatgtttaaggaagaatttctatgacgattcgcaaccccatgcgacgaatccgtctcctccactccttttccgtcgtcttcctctactggttctacgt

SEQ ID NO: 52904 - DNA, 260 bp, Glycine max
  unsure (1)..(260): unsure at all n locations; Clone ID: 701142266H1
ctatccccttgncnatcgaagagagatgggggacggaagtgggaaccggtggagcagggcggagtgggtgcagcagtacgatctcttaggcaaaatcggagaaggcacttacggcctcgtcttcctggcccgaaccaaaggcantgccctccaaatccatcgccatcaaaaagttcaagcaatccaaggacggcgacggcgtctcccccaccgccatccgcgaaatcatgctgctcagggagattacgcacgagaacgtc

SEQ ID NO: 52905 - DNA, 256 bp, Glycine max
  unsure (1)..(256): unsure at all n locations; Clone ID: 701142267H1
aaagcccaccatgaaaatcggtcgccctcggcgtccgaattgtagtctggagangcgtcctcagtggcggaccgggcccaagtcccctggaagggggcgccagatagggtgaganccccgtcgtgcccggaccctgtcgcaccacgaggcgctgtncggcgagtcgggttgtttgggaatgcagccccaatcgggcggtaaattccgtccaaggctaaatactggcgagaaaccgaatcagcaccagtggaggaag

SEQ ID NO: 52906 - DNA, 251 bp, Glycine max
  Clone ID: 701142268H1
tccggtcactcctctcgccggcgatcccttattcctccgtcctccgtcgagtcctttccgattcgaatcgttcccagccttgtgccaccatgaatcccgaatacgattatttgttcaagcttttgctgattggagattctggtgtaggcaagtcatgtcttctcctgaggtttgctgatgattcataccttgacagctatatcagtaccattggagtggactttaaaatccgcatgtggagcaggatggga

SEQ ID NO: 52907 - DNA, 256 bp, Glycine max
  unsure (1)..(256): unsure at all n locations; Clone ID: 701142269H1
cttctctccacgcccttcttgggctcaccgtctgaagtgcagcaatggcagatggattgcattcgcagcatnccatgcggtagttcagaagttatctggacagtcttatnttgtntccaggcttgntcctaatcantccagaaantgttctaccactggtagttanttcaatggaggtttgcagtcttcaggtttggttccagtcacggcacacgctcncggctgagaaaggggtgtctggatttttgttggattt

SEQ ID NO: 52908 - DNA, 251 bp, Glycine max
  unsure (1)..(251): unsure at all n locations; Clone ID: 701142270H1
aaataactgcacagcataagcttgtagaattgtactgcatcgcaaagccccatgttgatcgtgttcatttgcatcttccttttcttcatcnttctttacaagttcctcatcgcttatggcgatttcactttgatgtctaagaagcaacctaagcgccaagagattgaagataaggttgtttggattactggtgntagccgtggaattggggagattctggctaaacagtttgcaagtttaggggccaagct

SEQ ID NO: 52909 - DNA, 251 bp, Glycine max
  Clone ID: 701142271H1
tttcaccagtaccaggttgttgggagggctcttcccactgaaactgatgtgcatcctaagatctacaggatgaagctgtgggccaccaatgaggtccgtgccaaatccaagttctggtatttcttgagaaagctaaagaaggtcaagaaaagcaatggccaaatgctagccatcaatgagatttttgagaaaaatcctaccaagatcaagaattatggaatttggctgcgatatcagagccgaactggtta

SEQ ID NO: 52910 - DNA, 252 bp, Glycine max
  unsure (1)..(252): unsure at all n locations; Clone ID: 701142273H1
gggtgttgaaattcaaagccatatccgtcattaaccaaatttgtntttctccgattgcaagcaatggactccttcaattccttcttcgattcaacaaaccgatggaattacgatactctcaaaaacttccgtcaaatttctccggtcgttcagaatcacctcaagcaggtttattttactctgtgtttcgccgtggttgctgcggctgttggggcttaccttcatgtcctcttgaacattgggggttttctt

SEQ ID NO: 52911 - DNA, 253 bp, Glycine max
  Clone ID: 701142276H1
tcgttttaaattgttaattccaaaagaaacttgcagcattgcgttctctttttctggagtcaggtgtcctggtcgtgatgaaccatattcagacgaagcaattgctctgatgaggagaaagataatgcaaagagatgttgagatagaggttgaaaccgttgatagaactggaacgttcttgggatccttatgggagtcgaggaccaatgtggcaattacactgcttgaagctggtcttgcaaaacttcataca

SEQ ID NO: 52912 - DNA, 255 bp, Glycine max
  unsure (1)..(255): unsure at all n locations; Clone ID: 701142277H1
ctagatttaaggaagatgggtaaggaaaaggttcacatcagtattgnggtcattggccatgtcgactctgggaaatccactaccactggtcacctgatttacaagcttggaggcattgacaagcgtgttattgagaggtttganaaggaagctgctgagatgaacaagaggtctttcaagtatgcctgggtgctggacaaacttaaggctgagcgtgaaagaggaatcaccattgatattgctttgtggaagttt

SEQ ID NO: 52913 - DNA, 257 bp, Glycine max
  Clone ID: 701142278H1
gccggagcatcctcgtccgtgattaaggtggctgcactttccggatctttaaggaaaggctcttacaacagagccctcattcgttctgctattgagctaagccaaggtagagttgaaggccttcaaatcgagtacgttgatatttcgcctttgccccttctcaacaccgatcttgaggtgaatgggacctaccccccacaagttgaagcctttcgccagaagattctcgcagctgatagtatcctctttgcttcccc

SEQ ID NO: 52914 - DNA, 96 bp, Glycine max
  unsure (1)..(96): unsure at all n locations; Clone ID: 701142279H1
gnttcctcgttcgtgntantaaattggnggtcacagattgcaacccccgagagattgcanatccaattntttnttgcncnatttgntttntgggtt

SEQ ID NO: 52915 - DNA, 259 bp, Glycine max
  unsure (1)..(259): unsure at all n locations; Clone ID: 701142281H1
gccgttcctcccgtcgacgaaatcggactaccttcaaggcagcttcggcggcgacgccaccgcctccgacgaggacgacctnctacagccgcctgaaatccctccagcnccagtggagttcatcgacatccaggaggagtacgtgaaggatgagcagaagaatctcaagcgcgagctgctccgagcgcaggaggaggtgaagcggatacagtcggtgccgctcgtcattggccagttcatggagatggttgaccagaac

SEQ ID NO: 52916 - DNA, 100 bp, Glycine max
  unsure (1)..(100): unsure at all n locations; Clone ID: 701142282H1
aaaagttgcaacggtgcatacaacgagcttgtggagtataagcttgttctgncagaaggctggtgagtttttccaccacaacatatcnanncncnncnnt

SEQ ID NO: 52917 - DNA, 253 bp, Glycine max
  unsure (1)..(253): unsure at all n locations; Clone ID: 701142283H1
gccacagggagcatggtttcnagatggtgggtttgagactgctggagaaggagttgttatagggttcgttgacaccggcatagatccaacacatcctagttttgatgataacaaatatgaaaagccgtatcccgttcctgctcatttttctggcatctgtgaggttactcgcgactttccatctggttcttgcaataggaagcttgttggggcccgtcattttgcagcttctgccataaccagaggaatattt

SEQ ID NO: 52918 - DNA, 253 bp, Glycine max
  Clone ID: 701142284H1
gccatggccacctccaacttctctattgttctctccgtctccctagccttctttttggtgctacttaccaaggcacactcgaccgataccgtttctttcaccttcaacaagttcaacccagtccaaccaaacattatgctccaaaaagatgctagtatttcatcctctggggtgttacaactcaccaaagttggcagcaacggcgtgcccacctcgggatctctcggtcgtgccctttacgctgccccaatcc

SEQ ID NO: 52919 - DNA, 251 bp, Glycine max
  Clone ID: 701142287H1
agctgctctcataagattgcacttccatgattgttttgtcaatggttgtgatggatcagtgcttgtggactcaacaccagggaatcaagctgaaaaggacgctattccaaatcttacactccgaggctttggcttcattgaagcaataaagaggcttgttgaagctgaatgccctggtgtagtctcttgtgctgatatcttggctttgactgccagagactctattcatgccactggtggaccctattgga

SEQ ID NO: 52920 - DNA, 252 bp, Glycine max
  Clone ID: 701142288H1
acttgggcttcatcaaaccaccattgaatgaagaagaaggtcttgtcttttctcagcttttgaatctatctagattcccaaaagtatatgtgaaatttagttctctttttcaagtgtcaagagagaagtttccttatctggatttggctcctcttttgtcccaagttgtcgctagctttggtgctaaccgtgttatgtggggcagtgattttccatatgctgctgctgaatgtggctacaaagcagccaaag

SEQ ID NO: 52921 - DNA, 252 bp, Glycine max
  Clone ID: 701142289H1
gaaattttaaaaatgactgggataaacttaagaattcaattattgaaattgaataagtaaacaatttaattggattggtcgaatggtatcaaaaaaatggagtactaactcccatttcttatttattattgaattaaccgatcaacttgctttgttatcgaacatttctttttgatttcaaaaattttccggaaaaaatttgaatctatttttatatgcgaatcaatcctactacttctggtcctgaggttt

SEQ ID NO: 52922 - DNA, 253 bp, Glycine max
  Clone ID: 701142290H1
gtcatggctatggctttgagtctctcccaattccctgttcgtgggtctgtttctttgcccaaaagaagactacccagaagaagcttttgcattaggggcatgtcagaaacctcttccacttcttctgtgagcacccaacaagaacaaccaacttctgataatgcttcttcagtgacaattgctcctccccctaacttcaagccccctgagcctaaacgctttgcaattaggcctgataagaccagtgaagtgt

SEQ ID NO: 52923 - DNA, 253 bp, Glycine max
  Clone ID: 701142291H1
ggaccataacatacctatacctcaatatcacaagtcttatggaggcagagcgagacaagtacaagatgatcaactttgaagaaaccgagttacgactcggcctcccactcagtggaaacgagacgctcaaaaccacttgcagcactgggaagagggttttttcggatactgccgtggatttgaagcttaacctttcctcaacctcaaacagtgcttcttctgacctgactaaagagaagaacatcactgctgc

SEQ ID NO: 52924 - DNA, 256 bp, Glycine max
  unsure (1)..(256): unsure at all n locations; Clone ID: 701142293H1
gatttnnattaaagaaaagtgcaaaaactaatggttggagcaggcgatggtttgtgctaaatgaaaagacaggaaagcttgggtacaccaaaaaacaagaggaaaaacattttcgcggtgttattacattagaggtatggagtgctttccattaatcttgtacgttcaataatttgatnaactttacggtactgtgtcttgtgcatgttggaattcttaactaagtaattcatgatacttccttgaatagattttg

SEQ ID NO: 52925 - DNA, 106 bp, Glycine max
  Clone ID: 701142294H1
aaaatataaagctcaataatagctacaattacattttactagaaaaaaatttctgtatggacttagttaacatatctatcaagaatgagcattttggaattgttac

SEQ ID NO: 52926 - DNA, 257 bp, Glycine max
  Clone ID: 701142295H1
gggatttccatggaagtctcaaaagaagaagctcgagtggcacccgcaccggccctagtggcgtgctgccatcccctggcatgggccacctaatcccaatgatcgagttcgcaaagcgagtggtgtgtaccataacctggcggtgagttcgtgatccccactgacggcccaccttcaaaagcccaaaaggcagttctggaggcccttccggactcaatttcccacaccttcctccctccggtcaatctctccgactt

SEQ ID NO: 52927 - DNA, 262 bp, Glycine max
  unsure (1)..(262): unsure at all n locations; Clone ID: 701142296H1
gaaaaacaaatgggtcctgaatcttttcgtagaattttgcaaactatantttctcgtgctcaagataaaactcgttccataaagactcttagtacctaaggagtttcgacattttgctaacaaggttgggaatcttgaacgcccatttcttaaagatttctttcctcggtgggttggttcttgtggatgtcctgttttaaggatggggttttcctataataaaaggaagaatatggttgaattggctgtgctgcggggatgt

SEQ ID NO: 52928 - DNA, 303 bp, Glycine max
  unsure (1)..(303): unsure at all n locations; Clone ID: 701142301H1
acctggtcacttgtactctagcaaagaaagagggttccgcagatggtacaatcctccttggttctctgagggctattccatctgccccttatgatcctcttgttttaagacacgcctttgagcaggcagtcataaaaaggttgatgactgatgtgccttttggtgttctactctctggaggtttggactcttctttggttgcatccatcacttctcgttacttggncaacacaaaggctgctgagcagtggggatcaaagttacattcatctgtgtaggcctgagggctcaccagatttgaag

SEQ ID NO: 52929 - DNA, 303 bp, Glycine max
  unsure (1)..(303): unsure at all n locations; Clone ID: 701142302H1
aagtgaaggaanagaagcagaaaccaaatcatgtgttctctactttggagttccattgcnttgtgtgtagctttcctactccttgagcttggcgttgtgcacccttcaccctcacaccataggatcactcgcttgccgggtcaaccccatgttcagtttcatcngttttcaggttatgtaaccgttnatgncaaaaaccagcgtgcnctttttttctactttgctgaagncgaaaaagatgcatttccaagcnccctcgttctgtggctcaatggagggctggttgttcttctcttggagtng

SEQ ID NO: 52930 - DNA, 301 bp, Glycine max
  unsure (1)..(301): unsure at all n locations; Clone ID: 701142303H1
gggctgcttgaggaanatatatggttattcaaaattcaaatgtgttattttgttatttctgattcttagtttatcaattcatggctatattctttttagcaagaaaggttcacacgatgtctggctcattaggggacaggatacaaattttcctgtttttttgtgttgtatagtgctaagatcccagctagggagaaagcatacaagttagtaggatgcaacaattttttagtaccagcttctatattttcttntgaagaacatcatcatcctttttggcctgttttaattatgttgcatt

SEQ ID NO: 52931 - DNA, 303 bp, Glycine max
  unsure (1)..(303): unsure at all n locations; Clone ID: 701142305H1
cttcaccatgtcacttgctgggaaaatcaccactgaaatcggggttcatgcaaccgctacaaagtggttcaacctcttcgcaacacaactccatcatgttcaaaacctaactgatagagtgcatggaaccaagctggntcaaggtgaagactggcatcacancgagacagtcaagcactggacttataccatagatggtaaggttacaacatgtctggagagtattgaatccattgatgaacagagcaaaacaatcacctacaagctcttcagtggtgacattgntcataattgtaaggactt

SEQ ID NO: 52932 - DNA, 307 bp, Glycine max
  Clone ID: 701142307H1
cacaaccctgaactcatacgcgaatcccaacgccgtcgtttcgccagcgtcgaaatcgtcgacgaggtcatcaattctcgacaaagaatggcgaaaacgtcaattcgagttggaaaatctccgcaaggaattcaacaagatcaacaaggaagtctccaaactcaagcgtgctggggaggatgcttctaagttcattactgaatcagaggagaccaaaaaatcgatagcggagaaagaggttgaagtgcgggaaactctgaatctcttgaattccaagttggaaatattggaaacctcgtccacgatt

SEQ ID NO: 52933 - DNA, 231 bp, Glycine max
  unsure (1)..(231): unsure at all n locations; Clone ID: 701142308H1
gctanacccttttttctatctcactaacacaacaatgggagacgagaagaagggcaagcctgctgcttccggcgtgtggtccaccatcaagcctttcgtcaatggtggagcctccggcatgctcgccacctgcgtcattcaacccatcgatatgatcaaggtgaggattcaattgggcaaggatcagctgcgcaggtcattccaccatgcttaagatgaggtttgtgcttc

SEQ ID NO: 52934 - DNA, 303 bp, Glycine max
  unsure (1)..(303): unsure at all n locations; Clone ID: 701142309H1
gtttcaccgcacgaatatcttgttgtttggagcgatccgagaanaactctgtaaacntgttggtttaccaggacctcccttacaggtgatgagcttctctctgactccttccgttacaaggaanttgagaatggaatgctgtgggaagttgaggggaantgggttgttaaaggancagttgatgtagacattggtgcaaacccttctgctganggtggagganaagatganggagttgatgatgcagctgttaagttgttgacattgttgacacattcagacttcaggagcaacccgcattcg

SEQ ID NO: 52935 - DNA, 165 bp, Glycine max
  unsure (1)..(165): unsure at all n locations; Clone ID: 701142310H1
cgaaaacccctagacgaaaaccccacttntctctctttcactagctcngttcaagttctaactaagcacttcgtcgcngcntttggcttacngtagaagatgtcgctgcgagtgcngaaccctaacgccgaatgctgaaaaaatcgccggaanttancagnaatt

SEQ ID NO: 52936 - DNA, 306 bp, Glycine max
  unsure (1)..(306): unsure at all n locations; Clone ID: 701142313H1
gggaatcgntcttaaggctgggggtaanancaaaaagaccnanagancagcaccagnntccaatgacatcctnccctcaaattacttgtcaagctttatcggttccttgttcgaaggactggcagcantttcaatgctgttatactcaagcgcttgttcatgagcaaggttaacaagcctccaatttctttgtcaaggttaattaagtatacaaaggggaaggaggataaaattgctgtaatagtggggactgtaactgatgatatcagagtntatnaagttccagcattgaaanttncngcctca

SEQ ID NO: 52937 - DNA, 306 bp, Glycine max
  unsure (1)..(306): unsure at all n locations; Clone ID: 701142314H1
tcattccttcatttttanacctagctccatctccctccactcaccataacatctccatcanaagcaaatggctgccaacacccaacttctgtgtaaatgttagcnncaatggctacattagtgctaatgaccccttgaactggggtgnggcggcggaggctatggctgggagccacctcgacgaggtcaagcgcatgctagaggagtaccggangcccgtcgtcaagctcggtggaganaccctgaccatctcgcaggtcgcggcgntcgcggcccacgaccagggggtaaaggtgagctggcgga

SEQ ID NO: 52938 - DNA, 278 bp, Glycine max
  unsure (1)..(278): unsure at all n locations; Clone ID: 701142317H1
caaagatgtttggggncttcgacaagcgggcnaaagataaanggganagtggtgtngntgccagaganatgtgttggnnttcaacgncataacctccatcggtaanggtggtgntattgacacagccaccggcatcttnngccaangcntcanttagttcgcggagtaatngatgctgccncttccttcttagnncgtnatatcnccntnnnattgatcagtgctnctcagncttatggnagtgggaatnggaaagntggaaaagaagtctntcttgc

SEQ ID NO: 52939 - DNA, 304 bp, Glycine max
  Clone ID: 701142319H1
ctcggttctgccttcacaaaaaaattatcgagatcccctttttctcctaagaaaagccatggctaagggtcccggtctctactctgacatcggcaagaaagccagggatctgctgttcaaggactaccacagtgaccagaagttcaccatcaccacctactcacccactggagttgctataacagcatcaggaaccaggaaaagtgaactgtttgtggctgatgtcaacacccagttgaagaacaaaaacatcactactgatatcaaagttgatacagattctaatctcttcacaatatcatgt

SEQ ID NO: 52940 - DNA, 161 bp, Glycine max
  unsure (1)..(161): unsure at all n locations; Clone ID: 701142321H1
gggcgacgcaccggcattgccagagactcttaaaaattacaacaagctgttgtctcttggcttcaagattgtattcttgtcaggaagatatcttgacaaaatggccgtaacagaagcaaacctaaagaaggctngcttccacacatgggagcagttaattc

SEQ ID NO: 52941 - DNA, 302 bp, Glycine max
  Clone ID: 701142322H1
gagagagagagagaggagagagtattggcgcttcatcaagatgggtatttctagggattccatgcacaagaggcgtgccactggtggcaagaaaaaggcttggagaaagaagagaaagtatgagcttgggcgtcaggcagcaaacaccaagttatcaagcaacaagacaatcaggaggattcgtgttagaggtggcaatgttaaatggagggcattgaggctggatactggcaattactcatggggtagtgaagcagttactcgcaagactcgtattctagatgttgtttacatgcctcaaa

SEQ ID NO: 52942 - DNA, 305 bp, Glycine max
  Clone ID: 701142323H1
ggagcatcttcttccacggtaggccaaattgcacgttttctggcacgaagggatgctgaagcatgacacgggcaatggcgtgtttgacacggggatggatccaggcttcttagaggtgttggagaagcaccctgaaaactcagacagagtgaaaaacctagtgtctattctcaaaaggggtcctatctccccttacatttcttggcaccttggtacacctgcaaaaatccctgagcttttttcttttcacactcctgaatacataaatgaactggtagaagttgataaagaaggggggaagcagc

SEQ ID NO: 52943 - DNA, 302 bp, Glycine max
  unsure (1)..(302): unsure at all n locations; Clone ID: 701142324H1
gatctccctcactccgtttttggttctgaaagtgtagccttcgattgccatgggaaaggaccatatgttggagtgtctgatggtagaattctcaggtggcaagagacaaagananagtggattgactttgcagttacctcgccacacaggaacaagaaattatgcgacgggttacaaaatgacaagatggaatcaatgtgtggaagacccttaggcctcaaattcaacactgtaacttgtgaatgtacatngccgatgcatactttgggntctggtggtaggaccaagtggtggtgtggcaa

SEQ ID NO: 52944 - DNA, 304 bp, Glycine max
  Clone ID: 701142325H1
gggaatcataaattttacatcaacttatgatagtagaactcaagaagtggaaggttctttagttgcaaggggagatttgtggagagtagaggcatcacatggtggttctgcgtctagaaatgaaaattcatctcttttcctggttcagcttggacctcttctctttatccgtgattcaactctcctcttgcctgttcatttgtcaaagcagcactttctgtggtatggctatgatagaaagaatggaatgcattctctttgtccagcagtgtggtcaaaacacagaaggtggctgttaatgtcc

SEQ ID NO: 52945 - DNA, 305 bp, Glycine max
  unsure (1)..(305): unsure at all n locations; Clone ID: 701142327H1
aagcgaaatcgcaatcgcaatccagcgaatatncaaggtcgtcgctgcatacttgctcgcagtgttgggagggaatccttccccttctgccgatgacatcaaacacatcctcggcgcagttggagctgaggctgagaatgagttgattgagttgctcttgactgaagtcaagggaaaagacttcaatgagctaattgctagtggaagtgaaaagatgtctgcagtgtctggtggcggtgcagcggttgccgttgctgctgcaccagctggaggtgctgctgcacctgctgccgaagcaaaggaag

SEQ ID NO: 52946 - DNA, 293 bp, Glycine max
  Clone ID: 701142328H1
cgttaagatttagttccatttgctgtaagagtcaatcattctctaattatagttgtaataacaccatcaaggtagctatcaactacacggtttctggatatcttgtggttcttggccttcatctctgattcagcccgaagaccttttctggacaacaactttgacaagttcttatctccaaccatacaaattggacatgctggatcatacctatctgcctctgatgtcatagcctctaaacattctgcatgatatgaatgaccacagactagtacagcaacaatgagaggtca

SEQ ID NO: 52947 - DNA, 308 bp, Glycine max
  unsure (1)..(308): unsure at all n locations; Clone ID: 701142330H1
cacctgcaactatttggattgctgatttttgttaataccatatttactgatattggcgcatttctttgagaaagttactaattcctagatagaggcaaaaatgttgggaattttcaaggagaagttggttaaagcacccaaagagctgaacagtccagcttcgttgaattcatgcactaagcctaagctaagtcacgaaatccttcaggatttcatgtcctgcaattcctccaatgctttctcantgtgctttgggaatgaagctttgctagcctattccccttcaaacaagccctccattcntcang

SEQ ID NO: 52948 - DNA, 202 bp, Glycine max
  unsure (1)..(202): unsure at all n locations; Clone ID: 701142332H1
ggacnattgggncctanccncaattcacctnctctctcacatttangntcacganatggnatngctccttcacttntntcccgcttacatgtcnatcnaatgantantactattnctttactcacattttttattgaaataaataaattcngntttacnattgattgatctttcatgtatttaaggcnanttggaaagnncg

SEQ ID NO: 52949 - DNA, 296 bp, Glycine max
  unsure (1)..(296): unsure at all n locations; Clone ID: 701142333H1
ctacccgcngctcgatgggaattgcgcttcaaggcgtctngtagggctaatncgcctcacganggtcaccaacggaactgncnttggggggccgangcnccctactgctgcgtcggaaaacggacggnnggngaagcgtcgcttctagcccggantctgacttagaagcgttcagtcatantcnaacgcacggtagcttcgggcaatnggctttnnaacnangcncgatgaccattgtgcgantnancggttcctctcgtactaggttgatnactatngcgacactntnatcatag

SEQ ID NO: 52950 - DNA, 300 bp, Glycine max
  unsure (1)..(300): unsure at all n locations; Clone ID: 701142334H1
cagagatgcaaggnagcgcactgaaaggtgaagccttngatttcgagcttgangncgatgacttgatggaacgatgacggngcacccgacgcngacgcttctcngcctcaacctaagctcaaatccgccatnaccgncgncgccgcccccaaaaagaccaanggtcgcggattccggcaggacancgacgccaacngtgacactcgcctctccggctccgacttcgaatctctcaacaccgacggnggaactggcnaacaaagatncatgaaggatggatcatctggtcacggcgtgcac

SEQ ID NO: 52951 - DNA, 302 bp, Glycine max
  unsure (1)..(302): unsure at all n locations; Clone ID: 701142335H1
ctcgtttacacatctctccaacctttcactttcgtttctcagttttattcgaatccctctctcaatctcctttccaaatggccagcgttgaggttgcacagcaaacaccaacaacagttccagaaaatganacaaccgaggtaagcaagacccaggaaacanccccagtcactgaggntcctgcaacagaacaaccagcagctgaggttcctgcnacagaacaaccagccgctgaggctcctgccccagaatcaaccaccgaagcaccaaaggaagaaaccaccgaggcaccaacagaaaca

SEQ ID NO: 52952 - DNA, 299 bp, Glycine max
  unsure (1)..(299): unsure at all n locations; Clone ID: 701142336H1
tctttttcttctctctcaacaacttcaccttnttcctcctcgatcatgtctnacttcaagggcaagtaccatgatgagcttatccgccaatgctgcgtacattggcactcctggaaagggtattcttgctgctgatgagtcaacagggacaattggcaagcgtttggccagcatcagtgtagagaacattgaatccaacaggcgagctcttaggcnnnnncttttcactgctcctggtgttcttcaatatctcagtggtgtcatcctctttgatgaaaccctctaccagagcacagtgc

SEQ ID NO: 52953 - DNA, 298 bp, Glycine max
  unsure (1)..(298): unsure at all n locations; Clone ID: 701142338H1
caantatactaaatgtcttagtcttaagaggggggaaaaactggaattccaatgnttcttaanttcttncaatcccaatctgcaaactgagtnngatatataactngtttntgatttcttcctcatcatttntgcatatacaaagattaaantggaagggtttttgganattgcttcaatatgattttnctgatgttgtgcttcaccaacttgagcatagcttttgctcaaagtcatatgaatggatttggagagcngccatggccaagattgccattcacaagaccgttttggcgnt

SEQ ID NO: 52954 - DNA, 108 bp, Glycine max
  unsure (1)..(108): unsure at all n locations; Clone ID: 701142339H1
ctcgcttctaacgtcaccgaactcagttgtngtcagcgagtccagtgactngtttctctgcacncnacaagcgttcagccacnccaanacangananaagacacnntc

SEQ ID NO: 52955 - DNA, 300 bp, Glycine max
  unsure (1)..(300): unsure at all n locations; Clone ID: 701142341H1
ccgaaaccctaaccctaacggagagatggcggagcacttggcatcgatattcgggacggagaaggacagggtgaactgtccgttctacttcaagatcggngcgtgcaggcacggcgaccggtgctcccggcttcacaccaagccgacaattagcccaacattggttctgtcgaacatgtaccagaggcccgacatgaacatgagcattatcaccaaccccgatcagccacaaccccaatcccttgaccccgacaaggtgcaggatcattcgacgacttctacgaagatctcttcgaggag

SEQ ID NO: 52956 - DNA, 300 bp, Glycine max
  Clone ID: 701142343H1
tgttaccaaagctgtgaagaaaatcaagcgaagaaatgggccacatagaggagaggatttcaccttgtcacaagcaatggccaaggccgatttttgggtcatgttcttctctcttgtcatgggctgtggatcgggcttgacaatcataaataacatgggtcagatttgtcaatcattgggagacaacaatgtcaatgtttatgtgtcggttatcagcatatccaacttccttggtcgtgttggtggcggctacttctcagaggttatagtaaggagttttgggtacccaagacttgctgc

SEQ ID NO: 52957 - DNA, 200 bp, Glycine max
  unsure (1)..(200): unsure at all n locations; Clone ID: 701142344H1
ggagatcaaccggcgcatcttagccaccaacaagtacatcagctacggtgcgctgcagaggaacatgtccctgctctcgccgcggcgcttctatacaattgcagaccggggccaggncancttaacggtnacgcatagatnaactatttattatatttcgttatgattttttttanttnnntaannaatngactcgtttt

SEQ ID NO: 52958 - DNA, 302 bp, Glycine max
  unsure (1)..(302): unsure at all n locations; Clone ID: 701142346H1
cggaggttgggaattactattatggtcaaggtcacccaatgaagccacatcgtatacggatgacacatgctcttctagcccattatggnattgctacagcacatgcaggtccacaagccatttcctgctagagacagggacctttgtcgttttcatgctgatgattatgttgaattccttngagnnntaantcctgaaacnacannaggatcatctaaggcaatgaaacgctttaatgttggtgaagattgtcctgtttttgatggcctctatctttctgtcaaacttatgcagggggntca

SEQ ID NO: 52959 - DNA, 304 bp, Glycine max
  unsure (1)..(304): unsure at all n locations; Clone ID: 701142347H1
aaaagggtacgatggtgcaaaggttgatatttggtcttgtggggttgttttgtttgttttgatggcgggntanttgcccttcccatgaccgtaacgttatggctatgtataagaagatttacaagggtgagtttcggtgtcccaggtggttttcttctgaacttacaagacttttctctaggcttctcgatacnaacctcanacaangattnnnnnnncccgaaatcatggagaatcgctggttcaagangggttnnaannagattaagtttnatgtggaggatgatagagtttgtagtttnga

SEQ ID NO: 52960 - DNA, 157 bp, Glycine max
  unsure (1)..(157): unsure at all n locations; Clone ID: 701142348H1
ctcaaactcgggatcacagaaaccancaacagttcttgcnctgaggtttcacgatgttgctggaacttgcnttgggtgtatgtgttagctttgtttctgcacttgcgtcccacaccaagtgcaaaatcnaaagcnttcgncacctcncannccctcc

SEQ ID NO: 52961 - DNA, 301 bp, Glycine max
  unsure (1)..(301): unsure at all n locations; Clone ID: 701142349H1
cagcaatggtgtacgtcaaggctcagaaatcaaaagcctacttcaagagatatcaagtcaagttcaagagaagaagananggaaaaaccgattaccgtgccaggattcggttgattaatcaggacaagaacaaatataacactccgaaataccgatttgtggttcgctttagcaacaaggacattgttgcacaaataatatctgctagcattgccggcgatttagttcttgctacagcatattcacatgagctgccacgatatggtcttgaagtaggacttacaaattatgcagcagctta

SEQ ID NO: 52962 - DNA, 277 bp, Glycine max
  unsure (1)..(277): unsure at all n locations; Clone ID: 701142350H1
attcattctcgtttccctttcgancgtgattgtttgttaactgaacttttcgagcaaaanntctggacgtggaaangggggcaaaggtttgggaaanggacgagcgagacgacaccgtaagtgttgcgcgataacattcagggaatcaccaancctgcgattcggcgtttggctcgcatgggtggtgtgaagcgnatcagtggtctcatctacgacgagacacgtgcgcgtgctcaagatctttctggagaacgtgattcgtgacgccgttacctac

SEQ ID NO: 52963 - DNA, 296 bp, Glycine max
  unsure (1)..(296): unsure at all n locations; Clone ID: 701142351H1
ccctactcattctccatacctcaacgaagaggttaaagagacggcaacactttgctgtccgccttgaccgagcagagcttcgtcttggccctcgattttgccctaaagtactctcagtcacaacagacacnnnnnnnnnnnnnnnnnnnnnnaatggcaccgaagcagaccaaggctgagaagaagatcgcttacgatgcgaantgtgcgacctaatggaggagtacggccagatcctcgttgtgaatccgataacgtgggatcgaaccagctccagaacattcgcnaggtctccg

SEQ ID NO: 52964 - DNA, 249 bp, Glycine max
  unsure (1)..(249): unsure at all n locations; Clone ID: 701142352H1
cattccgcaaaatggctgccaccaccttagtctctgaagtcactctcccctcctcntccggccagcggaagatgccgtgatgggctcggaccgcgccggaagcaaccagcgggtaccacaaaagatgtgttttnggcataagagggtacannatttatgtgtttgttatnttgaaagctgnggagagcatagtgaaannttaanncaagntatttgatcagagncantctcatcatacaattgnggnat

SEQ ID NO: 52965 - DNA, 297 bp, Glycine max
  unsure (1)..(297): unsure at all n locations; Clone ID: 701142353H1
gacgatcaccatgctgcgacaaggtaggtttaaagaaaggaccatggactccagaggaagatcagaagctcttagcttatnttgaagaacatggccatggaagctggcgtgctttgccagcaaaagctggacttcagaggtgtggcaanagttgcagactaagatggaccaattntcttaggcctgacattaagaggggaaaattcagcttgcangangaacaanccatcattcnattcatgcctcttnggaaacaggtggtcggcatagccacacattgccaaagagaacggacat

SEQ ID NO: 52966 - DNA, 301 bp, Glycine max
  unsure (1)..(301): unsure at all n locations; Clone ID: 701142354H1
ggtatccattacctaacaaatcagcacctgttatgttgtagtcgacattagagtntncggtntgatctttnatnagcatggacatggccagcaaagatcacatcaactttgtactcgatgaaccagctctcaaaaacagatcgcatgctttcaccctccatatngtgagctcnattactattgtngagnggcacgtgcatgagcacaatgagccacggagtntnctcatctngcacaacgcgcttnngctnctctttgagcnacatgtattgaggagtgtatttcncaaatggtgaatagc

SEQ ID NO: 52967 - DNA, 299 bp, Glycine max
  unsure (1)..(299): unsure at all n locations; Clone ID: 701142355H1
gggagaatatgaagttgtttgttttctttgttgctgcagtagttttggtagcatggccatgccatggcgcaggctaccaaaggttccctctccgaatgaaaactggctatggtgagcgttcttcggaggtaaaatgcgcaagttttaggcttgctgtggaagcacacaacatccgagcnttnaaaaccattcctgaagagtgcgttgaaccaacaaaggactacattaatggcgaacaatttagatcagactctaaaacagttaaccaacaagctttcttttatgtagtgaacgcgagt

SEQ ID NO: 52968 - DNA, 110 bp, Glycine max
  unsure (1)..(110): unsure at all n locations; Clone ID: 701142356H1
cttaatgnngtgtataacattgnggacnttatnccttggattnattncntggacttgcagggttacataaacaggntcaacactttnagcaagaantttcatatgntcat

SEQ ID NO: 52969 - DNA, 306 bp, Glycine max
  unsure (1)..(306): unsure at all n locations; Clone ID: 701142357H1
gccaccgactcctccgctgcttcgtcacgccagctttcgcagagggagacggacatccagatgatgcttcgtngncgacgtttcanctcgggcancaaannacngctnntttttagatcaaacgctacgtcttcgagcgcccgcaccgatggtatttncataattnaccttggaaagacatgggagangcttcagcttgctgctaggattatagtcgccattgagaacccacnggatatcatcgttcagtccgccaggccttatggccagagggcagttctaaagtttgctcaatacactggagct

SEQ ID NO: 52970 - DNA, 294 bp, Glycine max
  unsure (1)..(294): unsure at all n locations; Clone ID: 701142358H1
accgccccaaanttgaatcctttctgtccacacaacataaaacttaaatnttcggatgccccgaattctgttccgttatggatgtgcnnggagatnggattttcccggatgaggtngttattcanattctagcaaggttgcctgtcaagtcccttttcaggttcaaaaccgtntgcaaattgtggtataggttgtctttgnataagtatttcattcaactctacctnngangtgtctagnaagaaccccatgattctcgagnaggttnagatncacctctnnaannnttncaat

SEQ ID NO: 52971 - DNA, 298 bp, Glycine max
  unsure (1)..(298): unsure at all n locations; Clone ID: 701142360H1
gctacatgtggttatgttcccnttccttgcatttggccacattagtccatttgttcagctctccaacaagttgttctctcatggtgttcatgtcactttcttgtcagctgcntccnacattcccagantcagatcaactcttaatctcaatccagccatcaatgttatctcactaaagttcccaaatggtataaccancactgctgaattgccacctcacttagctggaaatctcatacacgcccttgacctcactcaagatcaggtgaagtcccttttgttggaatcaaaccccact

SEQ ID NO: 52972 - DNA, 302 bp, Glycine max
  unsure (1)..(302): unsure at all n locations; Clone ID: 701142361H1
gcagttctgggatgaagccgcaaaaagtcgtcacatagttgaagctgtgccaggatttgagcanngcaatccaagggtatgcaatcccatgtcctttccttgacttaccaaaggattcctagaactgtgcttgctgaggccattaacatagaaggtttatccttggacaaattccttgaaaatcaagtggccaacaatggttgggttattgagaagagccaaggtagggctcaacttattgtcctccctagaaatgaatttaatgacccagctttgaagaaaaatgccgcagacagtgtacc

SEQ ID NO: 52973 - DNA, 302 bp, Glycine max
  unsure (1)..(302): unsure at all n locations; Clone ID: 701142362H1
aaaaatccgcgattncgctcttctcttgganaagtgaaaaccagaagtacgaacgaaagagaagancgatntggnagttnnncnnacagggggntgntcttcacgaagcccgttnagnnggttgtttgcgaagaaggaaatgaggattctgatggtaggtctcgatgctgctggtaagacaaccatcttgtacaagctcaagcttggagaaatcgtcaccactatccccaccatcggatttaatgttgagactgtggagtacaagaccatcagcttcactgtgtgggatgttggtggtnagg

SEQ ID NO: 52974 - DNA, 299 bp, Glycine max
  unsure (1)..(299): unsure at all n locations; Clone ID: 701142363H1
gaaggtgcttcggcgactcctcgagacaccagggntctcaccaggggccagcctgtttcgacgctctgggtgcgaactcatnggaatccgctggcttcccctantgcatcacnagtggnttctcatcgccgcttccaggttggctctgcccganaccggcttcatctcctacggngaaatgctggagcagggccaactcatcacccaagccgtttccattcccgtcattggngacgccgacaacggtacggcaatgccatgaactcaagcgaaccgtcaagggtttcattgncgcggtt

SEQ ID NO: 52975 - DNA, 156 bp, Glycine max
  unsure (1)..(156): unsure at all n locations; Clone ID: 701142364H1
cggaagtcaacttagtggtaagaactgttgtnaccgtgggcaactacgataacatcattgattgggantttaaaacaagtggctcaatcannccctcgattgctctctcgggtatattggaaattaagggagtggatattncgcacaagagtgagc

SEQ ID NO: 52976 - DNA, 298 bp, Glycine max
  Clone ID: 701142365H1
gctaaatcctgcaaaagaaagtctcccaatgtttgtggtttagataatgctgatgatgtgtggtaccaaaaaatggaggtctgtaaaacccctttacctgaggtaaccagcaaaaatgaagttgccggaggagagttacagaagtttcctgctagactttttgcagtccctcctcgaatagcccagggagctattccaggggttacagctgaatcttatcaagaggacaacaaattatggaaaaagcatgttaacgcttacaaaagaatgaataaattgattggcactactagatatc

SEQ ID NO: 52977 - DNA, 133 bp, Glycine max
  unsure (1)..(133): unsure at all n locations; Clone ID: 701142366H1
gctcggtcttcttctccaatggcgctttnngatgagcctgaaagtgtagccactgtctcngncnactcttccctgngcngacgtcactcnggnacctccnccgccggcntcttcnnttacgcctganacaacc

SEQ ID NO: 52978 - DNA, 220 bp, Glycine max
  unsure (1)..(220): unsure at all n locations; Clone ID: 701142368H1
ttgttcaagtngtcacnantantgtaagtcanctatgttatancgganaatanacatgaaaattgtntnngggatgccgacttcagtctgtanatgctantactatactggatcttagttttgattactagagctacctgncccctggtnnggccataatgnantgtaaatcactgaanaatatcaacctgctctngattgtgnacantattgnnntaat

SEQ ID NO: 52979 - DNA, 152 bp, Glycine max
  unsure (1)..(152): unsure at all n locations; Clone ID: 701142370H1
tgaggtgtagctttagagcaataatgttaaggaggtcattatttgaggttagcatatntagaagtcaattttgantgcattgccgcatcntgttcaagactaaaanagaccattcatttttaancaggatgaatattgtgacatttaaacat

SEQ ID NO: 52980 - DNA, 294 bp, Glycine max
  unsure (1)..(294): unsure at all n locations; Clone ID: 701142371H1
gaaactcgagagtgtaaggttttgcatttcatttgacgaagagtgagagagtcttatctgtcgtctctgatctctgatcgcatcttcattccgaaaatggctgtttcggctatcactggagcgaggctaactctagggatgtctctttcctcttccacgcgatnnanaaacngagnaatggccgtatctatcgaccccaagaccgataacaaactcactcttaccaagtccgaggaagctttcgctgcggccaaggagctgngcctggaggagtgaatcccagttcgtgccttt

SEQ ID NO: 52981 - DNA, 297 bp, Glycine max
  unsure (1)..(297): unsure at all n locations; Clone ID: 701142373H1
ctacccgccgctcgatgggaattgggcttcaangcgtctcgtanggctaatccgnctcaccgagggtcatnaacggcacgttgcctntngggggtngaggccncctagtgnntggtnggcaaacggacggcnggcgcacgcgtcgcttctagcccggnttctgacttagangcgttcagtcataatccancgcacggtagcttcgcgccactgncttttcaaccaagcgcgatgaccnnttgtgcgaatcaacggttcctctcgtactaggttgnattatattgcgacactgtcatc

SEQ ID NO: 52982 - DNA, 295 bp, Glycine max
  unsure (1)..(295): unsure at all n locations; Clone ID: 701142374H1
gagaatggaagcctcagagcagaacaattcaaaggtagtgtncattgattctttgcagtcatgggagttccacgtcaaccaagcctataatcagaatactcctgttgttgttcacttcactgcttcatggtgcatgccatcggtggctatgactcctgtttttgaagaactggcttcaagctatccggaagttctgtttctcactgttgatgttgatgaagtcnaggaggtagccaccaaaatggatgtaaaggcaatgccaacatttttgctgctgaaggacggtgctgcggtg

SEQ ID NO: 52983 - DNA, 299 bp, Glycine max
  unsure (1)..(299): unsure at all n locations; Clone ID: 701142375H1
caccccttcanaacccttttcctcttttcctcactccttcatccctnctcctgctcaanattcaatttttgctcgccccgtgatttggttcaccagctttctgtgtgttataagatacccctttgtctcaaaaccttcttttgatgacattgcttccgaatcaatgcgtagtttcttgcagcaggacggtcctcacttgtctgattcagcattggcacccatttgggtgtctaaggctttggtgaagctgaaaggggaccctaaatcagccctgaagttcttcaaggaggcaggggctc

SEQ ID NO: 52984 - DNA, 297 bp, Glycine max
  unsure (1)..(297): unsure at all n locations; Clone ID: 701142376H1
ctctcgtcgttctttttatttgcggtttcttcttcttctcacgttctacctaacattttctaaaacatgtctggggaagaggaagaaaacgccgcagagctcaaaattggagacgagtttttgaaggcaaagtgcttaatgaactgtgaagtttcattgattcttgagcacaagtatgagcagcttcaacagacatccgatgatcccatgaatcaagtttctcaggtatttgaaaagtcactgcagtatgtgaagcgtttcagccgctataaaantcctgatgctgttagacaagtt

SEQ ID NO: 52985 - DNA, 298 bp, Glycine max
  unsure (1)..(298): unsure at all n locations; Clone ID: 701142377H1
cgtggcagttctatcgatgcttctcgtagcagcgttgatcccactctacctatggaaacgttnccaggattcgaaacttccccctccccaccgcgacgaagctcctcaggctccgcggagagaaacggtggcccgcgccaccgccactcgtcgcatgcgtcgccgacctaccgcgtctggagctagtacttcggcagatccacctgcgacgcaagaagaatctgctggtgagagtgacgatgaagctgctggtggagggtattatgaggctaaagcaccaaagaaaaaggaaataaaa

SEQ ID NO: 52986 - DNA, 209 bp, Glycine max
  unsure (1)..(209): unsure at all n locations; Clone ID: 701142378H1
ctcnanccgcgaaaccgaanaattagaaccgttgttgattacagngggttcagcctctgacccatcgacctcgntgatgatcttgatgattacgangagtgattgcgtgatagtnaaagagacatnccagtgtggataagcttgaaaatnatgtncatagtatatgtactccacaannnattcnaagcatnagnactnaatantaanag

SEQ ID NO: 52987 - DNA, 293 bp, Glycine max
  unsure (1)..(293): unsure at all n locations; Clone ID: 701142381H1
tgttgccatctctacgccgagttccgggcagaagaatggatcaggaggttgttttcttagtggaaggaaattganggtgaaaaaggagagagcagcaattggaggacgatcgatgggcactacagtgtgcgcagttgctgagcctgacagacctctatggttcccaggcagcacccctcctccatggcttgatggcactctacctggagacttcggctttgaccctcttggtcttggatctgacccggagagtctgagatggaatgttcaggcagagctagtgcatgcagatg

SEQ ID NO: 52988 - DNA, 293 bp, Glycine max
  unsure (1)..(293): unsure at all n locations; Clone ID: 701142382H1
gtgtggtggtgttgagttnaaaatgtggtaccattgtaatgagaaatattgattaccctcccctatggtttctattttagaagattttggtatttaggtaaagggtggcttttcaccctcaatggtctttcccacttttttttgaattgcataaattaggtttgagggagcataagaataaaggcattattgtatttgggtatnagtttacccccttgtattctttatgaaatccggaattaccccttttgactaaaaaaanaanaaagaaaaaggggcggccccgctaaatt

SEQ ID NO: 52989 - DNA, 295 bp, Glycine max
  unsure (1)..(295): unsure at all n locations; Clone ID: 701142383H1
gcagaggatgctgccaggaaatttttaagcgaatacgacattaagttggttgttnattaacccatccaatgtccatagggcctctcttgcaaccagagctgaatgcaagttcttcttcaattttaaacctaatcaatggttcaccaacgttttcaaataatagttttgggtggatcaatgtgaaagatgttgcaaacgcgcatattcaagcntntgagattgattcagctagtggaagatattgtctggttgaaagagtgatacacttctccgaacttgcaaaaattttacgtga

SEQ ID NO: 52990 - DNA, 294 bp, Glycine max
  unsure (1)..(294): unsure at all n locations; Clone ID: 701142384H1
gtggtgtcatcctctttgaggaaaccctctaccagagnacagctgcaggcaagccctttgtgaatgtcttgaaggaagctggtgtgcttcctggcatcaaggttgacaagggcacagtcgagcttgctggaactaatggagaaaccaccactcagggtctagatggccttggtcagcgttgtgccaagtactacgaagctggtgcacgttttgccaaatggcgtgcagtgctgaagattggtcccaacgagccatctgagctgtctatccatgagaacgcctatggcttggcta

SEQ ID NO: 52991 - DNA, 285 bp, Glycine max
  unsure (1)..(285): unsure at all n locations; Clone ID: 701142385H1
ctattatccccagacgccaccgccgcagcaccagaagaagaagaagtgtgatggctgagtacgacctaacttccgcggatggcgccgaatctcgacaggcaccttgtgttccctctcctggagttcctgcaggagcggcagtctacgacgacgaccacatcctgaaggcgaagatcgaccttctcaacaacnccaacatggttgactacgctatggacatccacaagagcctctaccacaccgaggacgtccngaacgatatggtcgaccgccgcgccgaggtng

SEQ ID NO: 52992 - DNA, 294 bp, Glycine max
  unsure (1)..(294): unsure at all n locations; Clone ID: 701142387H1
gaataccaggattttgtggttcgcaactattctccacctccacaaattaacaatagcatcaagatggaagttggaattgaagattgtctgcacatcgaatttgaatacaacaaaagcaagtatcatctgaaagatgtcatcattggcaagatatacttcttacttgtcagaatcaagataaaaaacatggatcttgagattaggcgtcgagaatccacaggatcagggaccaacncccatgttgagacagaaacattggctaaatttgagttgatggatggtgctcctgttaga

SEQ ID NO: 52993 - DNA, 293 bp, Glycine max
  unsure (1)..(293): unsure at all n locations; Clone ID: 701142388H1
ggacacctgctagcaggaacacgtacaatcttcgagacgcagtttcgcggtgcactactcaggtatatccccaagtcatggactgctatatatattgcgcttgacaacgtgggaatntggaacttgaggtctgaattttgggcacggcagtaccttngccaacagttttacatgcgcgttatacaacatcgacatcaatccgagatgaatatcnggttcaaannatgcactactttgtggtagggcaantnggagacacactcgacccctttgaggctagtagcaagaacctt

SEQ ID NO: 52994 - DNA, 293 bp, Glycine max
  Clone ID: 701142389H1
aggcaaaagagtggtattactgtgttagtgttaccttaccactcaggcaaaataatggggagtaagaaaaaaaatggtggaaagggagagattgtggatggttccaagattatggagttagttggaaacgagaaagttttcagcaactttgtggaccataagtttgatgaattggataaagacagagatgggaaactctccatgaaggagcttgaacctgctgttgctgacattggtgctggtcttggtttgcctgctcaaggcactagtcctgattcagatcacatttattt

SEQ ID NO: 52995 - DNA, 275 bp, Glycine max
  unsure (1)..(275): unsure at all n locations; Clone ID: 701142390H1
cgcaaccttatatgtgctgaccntaactttgccatcagcatctgcagtctatanggcatttggggaccagcttctcacccattccaatgccctctcattgctcccaaagactggtttcagagataccgctgtcatcctcatgctcattcatcagttcataacttttggatttgcttgcactcctttatacttcgtgtgggagaaattcattggggtgcatgagaccaagagtttgttcaaaagggctttggctagacttcctgttgtgattccaa

SEQ ID NO: 52996 - DNA, 272 bp, Glycine max
  unsure (1)..(272): unsure at all n locations; Clone ID: 701142391H1
cntagttatgctagggagttgnacagggggtatttctttancaaggtgcagattcttttgcnttttggaaaaagacactaccattcttaatctccnactcaggatgctcctctttaatatattcaaggagttcctggtcagaggagaacagcaacatttgcttagcatccttaattganagatagtcataggccttctcactgcnaccagctatttcatctctgacagtctttgccaaaagatccataanataaacgtatgtatcatgtggc

SEQ ID NO: 52997 - DNA, 296 bp, Glycine max
  Clone ID: 701142392H1
gtgacaaatatggatcctcaggcctttattaggttgtcaataggttctctggggttgcgatgcactggaattgaactgaggcactacaaaatctggaattcaaacactctctttaccttgtgtttgtgagatacggcttcgaggttttcctgttcaaacatcatcagtccccgtgatatcctccacagaagttatacctgatactcagaacgttgcttttagcttttaccttgaggaatctgatttaaaagcgttgttagctcccggttgcttctacaacactcatgcttgtttgg

SEQ ID NO: 52998 - DNA, 296 bp, Glycine max
  unsure (1)..(296): unsure at all n locations; Clone ID: 701142393H1
taaatttgagaganaactctgcaaacatgttggtttatcaggacctnccttacaggtgatgagcttctctcggactccttccgttacaatgaaattgagaatggaatgctgtgggaagttgaggggaagtgggttgttaagggagcagttgatgttgacattggtgcaaacccttctgctgagggtggagaagatgagggagtcgatgacgcagctgttaaggttgttgacattgttgatacattcagacttcaggagcaacccgcttttgataagaaacagtttgttaccttcat

SEQ ID NO: 52999 - DNA, 296 bp, Glycine max
  unsure (1)..(296): unsure at all n locations; Clone ID: 701142394H1
gcgccgtctccgatctccgacaatggcgacccaaatgagcaagaaganaaagttcgtagctgatggagtgttcttcgctgaactgaacgaggttctgacaagagagttggccgaggacggttactccggcgtggaagttagggttacgccgatgcgcaccgaaatcataattagagccaccagaacccaagctgttctcggtganannnnnnaggagaataagggaattacctctgtggttcagaagaggttcaagtttcccgagaacagtgttgaatttatgctgaaaaggtcac

SEQ ID NO: 53000 - DNA, 297 bp, Glycine max
  Clone ID: 701142396H1
gtttctaaagtaattcaggaatatggtgaagaaaatgaagataaactacttgaagaacttctctcatacaagggctctggaaagttctccccaaccacagcagcgaattgagccagatccttgttcttcagagaatgcagggagctcttgggatgatttctctgatactgatattttttctgatgatgaagaaattgcaaaaactatgtctgagaatgatgataccttacggtctttggtgaaaatgggctacaaacaagaggaagctttagttgccatagaaagattaggcccaaa

SEQ ID NO: 53001 - DNA, 287 bp, Glycine max
  Clone ID: 701142401H1
gtgtgggtggtggtagcagttatatgggtggtggcggatcaggatcttattattgaggtaagtcgtctgataacttcttgggattgcatttgtggtgtaaatcaggatgcatccaatataagtgtatatttttgagagatttctctatcctcgaaatagcatctctatttttttcacaagtgccggcgaaggttgcactctggtcaccagtgcattgtctgtgaacagatctgatatgataaagtggctgctgtaggatgactgttgaacatgagcctacaatttgg

SEQ ID NO: 53002 - DNA, 293 bp, Glycine max
  unsure (1)..(293): unsure at all n locations; Clone ID: 701142402H1
acggctgtcacgaaattgtgagcaggtaaacatctacaatctgttgccatggcaaaaacaacttcacatagctattgtttcaagccctggttttggccacatagttccaataancgagttcagcaagcgacttgtgaagcttcacccaaattttcaagtgacctgcatcattccttcacttgagtcatccacagaatcctggcaaagcctaccttaaaacccttccttcattcatagacttcatctttcttcctccagttagcatagaacaattatcccaaggaggatacant

SEQ ID NO: 53003 - DNA, 268 bp, Glycine max
  unsure (1)..(268): unsure at all n locations; Clone ID: 701142403H1
ttccacctggtcacttgtactctagcaaagaaagagggttccgcagatggtacnaatcctcattcangcctttcatttctgatgactctcgagccaaaagggtccgcgtgcttgagctctctcgcagattgaagcaccgtggccctgactggagtgggctccatcaacatggtgactgctttttggcacatcaacggttagccatagttgatcctgcttctggggatcaacctctctttaacgaggacaaatccgtcatgttacggta

SEQ ID NO: 53004 - DNA, 282 bp, Glycine max
  unsure (1)..(282): unsure at all n locations; Clone ID: 701142404H1
tgatggcaaacagttgtgtttcaatggacaataataatatcctgggtcttctcaagcttcgaattaaaagaggcgttaatcttgcaattcgcgatgctcgtaccagcgatccgtatgtcgtcgtcaacatgggtgatcagaagctgaagactcgtgtcgtaaaaaacaactgcaaccctgactggaatgaagaattgaccctttctgtaaaggacgttaaaaccccaatacatctgacggtttatgacnaagncactttctctgttgatgacaaaatgggtg

SEQ ID NO: 53005 - DNA, 283 bp, Glycine max
  Clone ID: 701142405H1
tacccagtagacaacttttcatagatggagagtggaaagtccctcttctcaacaatcggtttccgatcatcaaccccgctactgaagacatcatagggcatattccagccgctactaaggaagatgttgaccttgcggtggatgctgctaaaagagccttttcccataacaaaggcaaagattggtcttcagctcctggctctgttcgtgctcgctatcttcgagccatcgcttcaaagataacagagaaaaaggatgaactaggaaagcttgaagcaattga

SEQ ID NO: 53006 - DNA, 280 bp, Glycine max
  Clone ID: 701142406H1
ggccaagcccctgtgttttccaaagcaaggtacacggttcgttcctttgggattagaagaaatgagaagattgcatgctatgtcactgtcagaggtgacaaggcaatgcaacttttggagagtggtttgaaggtgaaggaatatgaacttctcagaaggaacttcagtgatactggttgctttggctttggcattcaggagcatatcgatttgggaatcaagtatgatcctcaactggtatttatggaatggacttctttgttgttccggagcgtcctgg

SEQ ID NO: 53007 - DNA, 279 bp, Glycine max
  Clone ID: 701142407H1
gcggaatcagcggggaaagaagaccctgttgagcttgactctagtccgactttgtgaaatgacttgagaggtgtaggataagtgggagctggaaacagcgaaagtgaaataccactacttttaacgttattttacttattccgtgaatcggaagccgggcactgcccctctttttggacccaaggtcggcttcggccggtcgatccgggcggaagacattgtcaggtggggagtttggctggggcggcacatctgttaaaagataacgcaggtgtccta

SEQ ID NO: 53008 - DNA, 264 bp, Glycine max
  unsure (1)..(264): unsure at all n locations; Clone ID: 701142408H1
aaccataatagtcatgggtttgaaggaggcttttgagcagtatgctgagaaagcaaagactttgccaccgactcaatcaaacgaagacttgcttatcctttatggattgtacanacaggccaccgttggacctgtcaacaccagccgtcctggaatgttcaacatgagggacagagctaaatgggatgcatggaaggctgttgaagggaaatccaaggacgaagcaatgggtgattacatcattaaggtgaaacanctgctgga

SEQ ID NO: 53009 - DNA, 282 bp, Glycine max
  unsure (1)..(282): unsure at all n locations; Clone ID: 701142409H1
cacgtatcttcatcantaatcgcagaagcagtttccggtgcatntcatcgtcttccaaaatgaacgacgcagatgtctcgaagcaaatccagcagatggtgcgtttcatccgccaggaagctgaggagaaagccaacgagatctctgtatctgccgaagaggaattcaatatcgagaagctgcagttggttgaagccgaaaagaagaagatcaggcaagaatacgaacgcaaagagcgccaagtcgaaattcgcaagaagttgagtactcaatgcagctgaa

SEQ ID NO: 53010 - DNA, 117 bp, Glycine max
  unsure (1)..(117): unsure at all n locations; Clone ID: 701142410H1
tnggagncaagaggagagcacggaacagcgaaagnaagnnatgctcgccattatggagctcgctaacatgntaagcgtacctatggcgttaaacgcngnngttcnggntcnnagtng

SEQ ID NO: 53011 - DNA, 279 bp, Glycine max
  Clone ID: 701142411H1
ctcattcggtgctccgaatctcagattctagggttagggttcccaatttctccaccgatcagaaaatgagttcaactggtggttctaccaagggcggaaggggcaagcccaaagcctccaaatccgtttcaagatcgcagaaagctggtctccaattccccgttggaagaatcgctcgattccttaaggctgggaaatacgccgagcgtgttggtgctggtgctcctgtgtacctctctgcagtgctcgaatatctcgctgctgaggttttggaattgg

SEQ ID NO: 53012 - DNA, 277 bp, Glycine max
  Clone ID: 701142412H1
tgctactgaggggccacaggaacagaaattgaatggaataccattattgcatggtccagaaacagagcgaaaaggctcacggagtatggttgaaggaatgaactttttccggagagtcaatagaacatcttgcatctcaactgaagctaaaaaagtttctagtcagagcatggacagcaatggggaatgtgatttcatttctgattctgattctggatctgctttacttctccttgggactgttcaaactgctgaattgtcagaacacgataatcct

SEQ ID NO: 53013 - DNA, 270 bp, Glycine max
  unsure (1)..(270): unsure at all n locations; Clone ID: 701142413H1
tgagcagccaaacactctctctctgtctctcgaaaattctcagtttgcagagaaaatctgaatcatgtcgtggcaagcgtatgtcgacgatcaccttctgtgtgacatcgaaggtaaccacctcactcacgctgctatcatcggccaagacggcagcgtttgggctcagagtaccgacttccctcagttcaaacctgaggagataactgccatcatgnnnnnctttaatgagcctggatcacttgctccaatggattgtatctcggtggc

SEQ ID NO: 53014 - DNA, 279 bp, Glycine max
  unsure (1)..(279): unsure at all n locations; Clone ID: 701142414H1
tccctccttcctctgccttataattcttgtgacccttttngctggtagcattgaaagtgcaccagcaaacgtgaagccaagccattatgctgcacccttcaataggagtgtttttccttctggttttctatttggaataggctctgcagcttaccagatagaaggagcagcagctatagatggcagaggaccaagtatatgggacacctatactaaacagcaaccagggaagatttgggatcatagtgatggaagtctagcaattnattttatcaccgg

SEQ ID NO: 53015 - DNA, 282 bp, Glycine max
  unsure (1)..(282): unsure at all n locations; Clone ID: 701142415H1
gtgattttatacccacaagccattttcagggatccattcagaaggggtaacaatatcttggttatctgtgatgcctacactcctgctggagaacctattcccactaacaagaggcacgctgctgccaaggttttcagccatcctgatgttgttgctgaagtgccatggtacggtattgaacaagaatacaccttgttgcagaaagatntcccaatggcctcttgggtggcctgttggtggtttccctggactcagggnccatactactgtggtgttggcgcc

SEQ ID NO: 53016 - DNA, 286 bp, Glycine max
  unsure (1)..(286): unsure at all n locations; Clone ID: 701142416H1
agaacaggctcctcgttgactgagataacaactccgactcttgagttgagtgtgtctggtcggaacagtatgcagttcagtatcacatcacaattccttcatatcttctctcttaccatcctcattatcattacctcttcactttcacaatccagccagttttgtgatgcgggaactgaaattccatcatccaagctgttgatcaagggtggcacggttgtgaatgctcagcaccaccagattgctgatgtttacgtggaagatggcatcattgttgcngttaanc

SEQ ID NO: 53017 - DNA, 287 bp, Glycine max
  Clone ID: 701142418H1
ctaccctaactattatccctttccttcctgcctctctttgctttcctggctctttcagaagatgttgaacaagttgtggacataagtggcaaccccattttcccaggtggcacatattacattatgccatcaacttggggcgctgccggtggtggattgaaactaggccggacaggaaactcaaactgcccagttactgttttgcaagattactcagaaatcttccgtggcacaccagtcaaattcagcatacctgggataagccctggaatcatctttacaggtac

SEQ ID NO: 53018 - DNA, 287 bp, Glycine max
  unsure (1)..(287): unsure at all n locations; Clone ID: 701142419H1
gtggcactgcattcttcccattgacttcaacctnnatcaaagataggaaattcagccttgaaccttgtgcaaactacttcctgaatttcttcattgtttcctggttccngtccagcaaactggntgcacggaaatgccaagannttcanatccttgattcttgtacttctcgtacaatacattcaattctttgtaatntgtctgtgtcaaaccacattgagaggcgacattcacaatccagtagaacctccncgctgtaatcatcagcgntnncatcatttccacac

SEQ ID NO: 53019 - DNA, 281 bp, Glycine max
  unsure (1)..(281): unsure at all n locations; Clone ID: 701142420H1
gcgaaacgctgtcgttgcgccaatcgcggcgttgttgttggtggtgctactcgcggcgagtgtggtggtggaggctcaggagaactcggacgtgaagacgctggtgaagcacatgcacgggaagaagtactgcgacaaaggatgggaatgtangggctggtcaatttactgttgtaacctcactattactgattatttccagacctaccagttcgagaatctcttctccaagcggaactcgccggtggcgcacgcgtcggattttgggactaccactcgtt

SEQ ID NO: 53020 - DNA, 283 bp, Glycine max
  unsure (1)..(283): unsure at all n locations; Clone ID: 701142421H1
cacaaacaatgtcctgacagtcaagaatctgacaagaacattgagatatggaagatncaagaaattgatcaaggctctggaagctgctcgaggtaatggtaccagcatgatttctctgctaatgcctccacgcgatcaaatttcaccgggtcactaagatgttgggagatgaatttggaactgcttcaaacatcaaaagtagggtgaaccgacagtctgtgttgggagccatacttctgctcagcagaggttgaaactatataacaaggtccctccaaatggt

SEQ ID NO: 53021 - DNA, 282 bp, Glycine max
  Clone ID: 701142422H1
gtttcagggtcactactactctgtctctgctctccctgttttggctcttgtccctgcaccaagcaagagctgcaaagttccacaatgtgagtggcttccagagggaaaaagccagttgtagcaaatgggtgcaatttgtccctgggaagttgggtggttgacacgtcttatcctctctatgactcttcatcatgccccttcattgatcccgagtttgattgccaaaagtatggaagacctgacaaacagtacctcaaatacgcttggaaacctgattcatgt

SEQ ID NO: 53022 - DNA, 271 bp, Glycine max
  unsure (1)..(271): unsure at all n locations; Clone ID: 701142423H1
ggctcctgcttcttcctctccatctcagaggggggatgatgaaccaactcctacnattgatgttgccaatctgtctccaactcctgcaactggagaagaatcatcgcagccgactttagtttcgcctgttcaagcagaacaggtgtctgcttcaggatctggaactactgctcttgctacagatcatcagggatcatcctacaacaataggagatctcctaatcagtcatctccaagtagtcaagacagagcaggaccatcagaattacag

SEQ ID NO: 53023 - DNA, 281 bp, Glycine max
  Clone ID: 701142424H1
gaagctttcaataggcatattacctaaaaacagtctcttggagaagtacaatctacttgagtatagtaaaatcgtacaagctcttagaaggggcgatcttcggcttcttcggtgtgcactgcaagatcatgaggaccggttcttgaggtcaggtgtatatcttgtcttagagaagttagaacttcaggtataccagagattagtaaagaagatttacatcattcaaaagcagaaggacccaggcagagctcatcaggtgaagttagaagttattgttaaag

SEQ ID NO: 53024 - DNA, 279 bp, Glycine max
  unsure (1)..(279): unsure at all n locations; Clone ID: 701142425H1
gacgttacggcatagcatgggattgataagcgccagtgttcccatgaatatcgttcctcaattcgggtcgctccgaacacccattcgggtcggaaacccttccgggttgagcttccttcggaagaggaataacggctttgtttgcttcgccgtcgatgacgagctcagacagaagcagcaggacttgagtactaccgcaactgggctgggctccgcacttgaagaaaggcccngaaacacagatctttttgagagtacaatgaagaaacgcaggaaatt

SEQ ID NO: 53025 - DNA, 279 bp, Glycine max
  Clone ID: 701142426H1
cctaactacgcacgcactcattcttgagaaagctcaatattcattcgtccatggcactctcttctcgtctcttttccaaatccaaattgatctatggctgtcaaatacttctgcaaaaggagcatgctattccagttcgtcactttgctaaagagtctgcccctcctgcccttaagggagatcagatgctgaagaacatttttgtggaggtgaagaacaaatttgagactgccataggaatattaaagaaggagaagatcaccattgacccagaagatc

SEQ ID NO: 53026 - DNA, 280 bp, Glycine max
  unsure (1)..(280): unsure at all n locations; Clone ID: 701142429H1
agccactagggtacgtgttcgataatactgtggtttctgttcttccagacnaangaananngncagtgcgnaatgcatgcaagcagcaaaattggtgaaaaatataaaccttggatcatctttcttcatctactagtaatcacgtgttcctgcaatagaagctgcngagccaggggattgattgaaacagaagacaaattcttcaaagcaacctcaaatgatcatcatgaaacagaacatgcacatgtcactctcacgtggatcacatagatccttctgt

SEQ ID NO: 53027 - DNA, 286 bp, Glycine max
  Clone ID: 701142430H1
cacaatggcaatctcctccacttccaactccctgcattcccaccaaatctctaatcccccaatcccaccccctcattcccaacaccaggcccgccctccggcccaagcccggcccatccccttccatcttcgccgttcacgccgccgagcccgccaaaaaccccgtcgtcaccgacaagcccaagccccaagcccaacaacctcccccggcctcggcccgggcaacgaaatgggccgtggacagctggaagtcaaagaaagcctgcagctgcccgaatacccgagc

SEQ ID NO: 53028 - DNA, 282 bp, Glycine max
  unsure (1)..(282): unsure at all n locations; Clone ID: 701142431H1
actgngtccttctgttgcgggggaagggcaaaataatggncttgttatgaacttctacaaggaatcatgccntcaggctgaagacatcatcacagaacaagtcaagcttctctacaagcgccacaagaacactgctttctcctggctcaggaacatcttccatgactgtgctgttcagagttgtgatgcttcactgttgctggactccacaagaaggagcnnnncnnagaaggaaacagatagaagctttgggttgagaaattcaggtacatgagaccatca

SEQ ID NO: 53029 - DNA, 290 bp, Glycine max
  unsure (1)..(290): unsure at all n locations; Clone ID: 701142433H1
gaaatttacgatagcttttgaaggtaccagtttttgtcatcactctctcagctgatcggtgcttatagatccagcgtcagcagattcaatttgacactggaagcaatttctcatttcaaagattaagtganaacatggttgtccttgctgcatccattgtgagcaaatctggcaaagttctagtttctagacagtttgtggacatnnctcgtatcagaattgagggtcttctagcagcatttcccaagttaataggcactgganagcaacacacatatgttgagacggag

SEQ ID NO: 53030 - DNA, 283 bp, Glycine max
  unsure (1)..(283): unsure at all n locations; Clone ID: 701142435H1
cttgaagttgttgctcaaggactaacggggaggattttttttccnggtggcgacaatgtcgactcctgctaggaagaggctgatgagagacttcaagaggctgcaacaagacccgcctgcagggatcagcggtgccccccaggataacaacataatgctgtggaatgctgtcatatttggtcctgatgatactccatgggatggaggcacgttcaagttgactctccagtttactgaggattnnccanataaaccaccaactnnncncnttgtgtctcgcatg

SEQ ID NO: 53031 - DNA, 281 bp, Glycine max
  Clone ID: 701142436H1
cccaccccccatttctttgttgccagttcaggaaaacaaataaagttctcctttgaaacttctctgggctatgttattttgaaagaagttacttcgcatcaataatgggttcaggtgattggtttaagacaataattagcttaagaaaatcaaaagaaggcagatcaaagaaagcaaagggtatcttaactcaagagaaactaaatgcatcaaagtcaaacaattatccaggaaaagaatccagtggtttaacaaatggtattaaaagtgaaaacctgtgt

SEQ ID NO: 53032 - DNA, 270 bp, Glycine max
  unsure (1)..(270): unsure at all n locations; Clone ID: 701142437H1
cacttttctctttgattcatcaatggcaaccgcgangnccgtgaaggatgtactcgcntcacgatttcgtgaaggcttacgcctcccatctcaagcgttccggcaagatggagcttcctgagtggactgatattgtaaaaacagcaaaatttaaggaattggctccatatgatcctgactggtattatgnnagggctgcctcaatggcaaganagatttatttgagaggcggtcttggtgttggggcttccagaggatctatggtggaag

SEQ ID NO: 53033 - DNA, 219 bp, Glycine max
  Clone ID: 701142438H1
cttgcatgacccataccactgtgaagcaaggaaacaaccatcacttccaaaaatctgcagtttccccaaaccagcttccctgacaattcaattcaggaacttggttcaaccattaagaattcactctctcttggacaaccctctttggaattgagctccaatgggaaaagtcctcttcacctcacacagcaggcttcatcaaatcactatcacttcttt

SEQ ID NO: 53034 - DNA, 226 bp, Glycine max
  Clone ID: 701142439H1
tgattgaagaagatgccgatcagaaacatcgccatcggaaggcctgaagaggctactcaccccgacacgttgaaggcggggttggctgagttcatctccaccttgatcttcgtgttcgccggttcaggttccggcatcgcctacaacaagctcaccgacaacggcgccgccactcccgccggcctcatctccgcttccatcgcccatgctttcgccctcttcgtcg

SEQ ID NO: 53035 - DNA, 276 bp, Glycine max
  unsure (1)..(276): unsure at all n locations; Clone ID: 701142440H1
gctgataaaataaaccccggcagttgcagtctctgtggcagaccaatgcaatttgagatgcagctgatgcctccattactatactttcttcaggaagcacttggtgaccagagaaagatggtggaaaaatgggattggntgacccttattgtatatacttgctcagaggttggtattcttccattgtcgacttcataagttttccttacccatttacaagtttcactatataagaaaggctttgcagtgataaagctgttagatgccaattgtatc

SEQ ID NO: 53036 - DNA, 279 bp, Glycine max
  Clone ID: 701142441H1
tgaatctttttggattattactgattttgttagttgctgtattgatacttgttcatttctttgagaaagcctatacaatccttggagaagggaagaaaaggagagtactggtaacattggaggggaacaacaatacagagccagaggaagagacaaattaagatgttgggaattttcaaggacaagttggtcaatccaccagaagagctaaacagccctgcttctttgaattcatcaaaaaggtctaaacttccaaatgaaatccttcaggaattccag

SEQ ID NO: 53037 - DNA, 275 bp, Glycine max
  Clone ID: 701142442H1
gaaaaactctgtaaacatgttggtttaccaggacctccttacaggtgatgagcttctctctgactccttccgttacaaggaaattgagaatggaatgtcgtgggaagttgaggggaagtgggttgttaaaggagcagttgatgtagacattggtgcaaacccttctgctgagggtggaggagaagatgagggagttgatgatgcagctgttaaggttgttgacattgttgacacattcagacttcaggagcaacccgcattcgataagaagcagt

SEQ ID NO: 53038 - DNA, 273 bp, Glycine max
  unsure (1)..(273): unsure at all n locations; Clone ID: 701142443H1
ctccctccaagatcacatttntctttgacccttttgctccctgtatctaaaattcncctctncacccantttnccatnagcntcaattncatgcttnnctggntcngatcctagatcttnctgncggtgggttgatcggagnagatgtcgccgtcaaacgggatgcagaacggcggngtcggnggggtaatgnggtganttctatagagcaccaggtttcnanacntgacnctcatgcaggtntggcancaagnacggngttcaggtagcnga

SEQ ID NO: 53039 - DNA, 278 bp, Glycine max
  unsure (1)..(278): unsure at all n locations; Clone ID: 701142444H1
gtttaccttcactgttcaggatggaatagatgccattgaagatgttatctaccatattgaaacatatgatgtgactacaattagagcaagcacacctatgtttctcatgtctcggaagattaaatcacttggtgtcaaatgggttatctcangagaaggatctgatgagatctttggagggtatttgtacttccacaaggcacccaacnnncgaggagttccacagagnaacatgntggctagatcaaagcattcaccaatatgattgcttgcgagcc

SEQ ID NO: 53040 - DNA, 277 bp, Glycine max
  Clone ID: 701142445H1
ggacctcaataagttgaacaccacaaaaattgagatggaccctggaagtcgcaagacatttgatcttagctactatagtcatgtgattaagagaaggggtctatttgagtcagatgctgcattgttgacaaactcagttacaaaggctcaaatcattgaattgcttgaagggtcagttgaaaatttctttgctgagtttgcaacctccatggagaaaatgggaagaattaatgtaaagacagggacagaaggagagatcaggaagcattgtgcattt

SEQ ID NO: 53041 - DNA, 279 bp, Glycine max
  Clone ID: 701142446H1
caaaattctatgtggtgttgcagatggtgatgattactgcttggatcactgaccttttcacttgtatgggtggttgttttggatgctgtatgaaacccacaccaattattgctgtggatgaacctgcaaagggactaagaattcaggggcagacagtaagaaaaccacacatatcagatggtttctggagttcaagcacttgtgatctggataacagcaacattcaatctcagagaagtatctcgtctgtcagtacattaaatcaaattctctatcatg

SEQ ID NO: 53042 - DNA, 277 bp, Glycine max
  unsure (1)..(277): unsure at all n locations; Clone ID: 701142448H1
aatggcacttcgttgcttggtgatgtccctttctgttctcttcactcttggtcttgcgagagaaagccatgccagagacgaagatttttggcatgctgtttggccaaacactcccattccaagttcattgcgagatcttctaaagcctggccctgcaagtgttgaaatcgatgatcaccctatgcaaattgaagaaacacagtacccgaaaaccttcttctataaagangaccttcatccaggcaaaacatgaagtacattcngcaggctcctttca

SEQ ID NO: 53043 - DNA, 285 bp, Glycine max
  unsure (1)..(285): unsure at all n locations; Clone ID: 701142449H1
ctcggttcacttcacttctctgtctttaaaatttcacatttttcacttatgtgtgtaattccaggattattcatgtatgtggggaatttctttttgccccttttgtnttngtgtttgctagagctcaagtagggttggattttccnaggaattttggttatttcanatgggtcgtgtgtgattttgtaatttgagttcagaaaatngcaatttgttactgtntgttgagatttcgaaatattgggattcaatatgggtctatgtaattttntccnatctctngtt

SEQ ID NO: 53044 - DNA, 283 bp, Glycine max
  Clone ID: 701142450H1
gcaagaactcagagcacttgcttcttgcagcatcaaaatgggcttctctctgttaccaaaagcaactccttgcattttgttcttggctctgctgttttgtacttgcttcacttcaacagatgcttatgatccgcttgacccaaatgggaatatcacaatcaaatgggatattataagctggacccctgatggatatgtggctgttgttacgatgaacaacttccaacaatatcgtcatatcgcttcacctggctggtcaatgggatggacatgggcgaaaaag

SEQ ID NO: 53045 - DNA, 273 bp, Glycine max
  unsure (1)..(273): unsure at all n locations; Clone ID: 701142451H1
ctttcnttgtcgccgttcgttcacagcgtagccttctgnctctcgaatatggcacctcccagaggtggtggtgggttcaggggtggtaggggtgacagangtagaggaaggggtngcggtggaggaagaggaggagacaggggtacgccgttcaaagctagaggcggtggccgtggtggccgcggangacgcangggtggtngccgtngcngnggcagaggtggaatgaagggaggtancaaggttntggttcagccccataggcatgatggc

SEQ ID NO: 53046 - DNA, 280 bp, Glycine max
  unsure (1)..(280): unsure at all n locations; Clone ID: 701142452H1
aatggcacttcgttgcttggtgatgtccctttctgttctcttcactcttggtcttgcgaganaaagccatgccagagacgaagattttnggcatgctgtttggccaaacactcccattccaagttcattgcgaganccntctaaagcctggncctgcaagtgatgaaatcgatgatcancctatgcaaattgaagaaacacagtacccgaaaacctcttctataaagaagaccttcatccaggcaaaacaatgaaagtnnaattcagcaagcctcccttt

SEQ ID NO: 53047 - DNA, 277 bp, Glycine max
  Clone ID: 701142455H1
caaaatttgaggaacatttgtctctcatcaatggctgccacgagaccggtgcagtgtttgttacgaagggtttgcagaggaagtaggactattggggttgccacagaagttaatgcttcttcttcttctcagaaaatcatcgacaaggaatatgaacacagtgctcacaattaccatcctcttccgattgtatttgctcaagcaaagggaacctctgtttgggatccagagggaaacaaatatcttgattttctatcaggttactctgctgttaatc

SEQ ID NO: 53048 - DNA, 125 bp, Glycine max
  Clone ID: 701142456H1
ccctgctattcattccgtctgagtataattattctgtacagaataaaatgagcacatcaaattcctgctgtaattattttgtactttactattgtttaaggggaagtcagatatgatgaacactt

SEQ ID NO: 53049 - DNA, 281 bp, Glycine max
  unsure (1)..(281): unsure at all n locations; Clone ID: 701142459H1
ctcgcagaggaanatcccaatcccacacaaatggcatgctcagccaccctctgcttctctcttctccgcaaaccccacacctgctcttctctcccaaatcctccctctccctccctaacaactctctccacctcaaccctctccccacgcgcccttctctctccctcacgcgcccctcgcacactcgccgctccttcgtcgtcaaagcctcctccagcgagcttccgctagttggaaacaccgcaccggatttcgaagcagaggctgtgtttgaccaggag

SEQ ID NO: 53050 - DNA, 285 bp, Glycine max
  unsure (1)..(285): unsure at all n locations; Clone ID: 701142464H1
gcagcagttgaatttggaaaacaagatgtctcaccgcaagttcgagcacccgagacacggttcccttggctttctcccaaggaagcgagcttctcgtcatcgcggaaaggtgaaggctttcccaaaagacaatcctagtcaaccatgcaggttgactgcctttgtgggctacaaagctggaatgacccacattgttagagaggttgagaaacctggatcaaagcttcacaagaaagagacatgtgaagctgttactatcattgnnactcctccattggttgttgt

SEQ ID NO: 53051 - DNA, 286 bp, Glycine max
  unsure (1)..(286): unsure at all n locations; Clone ID: 701142465H1
ggagatccaatccaaatgcatcgaatgccaatcacctgaaattccgccagatctctccctcttatacgctcttgataaaccgaaacgaagcaatagctatagcatcacacacacacaccaccgctagggttagggttagggttgggggtgttccgaagtaacaacaatggcggtctccgacggcgtcgtgaagaaaatcgttntttcctacacctacgtcgcgatatggatcttcctcagcttcacggtcatcgtgtacaacaagtacattctggatcgcaagatg

SEQ ID NO: 53052 - DNA, 276 bp, Glycine max
  Clone ID: 701142468H1
ggcgttctatatattattgaattgacaatgaggcctgctcttgctttgcttcctcttctatttgctttcttgttagctgccactacagaatcaagaaaagatacaggggaatattggaaaatgatcatgaaagatcaggaaatgccagaaggacttcaaggtcttgtttcatttcaatctgaaaataaccctaagactcaagagcagcttggtaaaggttccaaaaaccatgtgaagagtctctagttacaaatacacaagttaatagtgacttcg

SEQ ID NO: 53053 - DNA, 274 bp, Glycine max
  unsure (1)..(274): unsure at all n locations; Clone ID: 701142469H1
ttgtaattggtcatagtgccacatcagggggtatctnagacagagctattgaagcagaagataggaagcatggagatttcctgagactggatcatgttgaaggataccttgaattgtcagcaaagacaaagacatactttgccactgctgttaacttatgggatgctgacttctatatcaaagttgatgacgatgttcatgtaaatatagcgacactgggacaaactctactgagacatcgatcaaaaccgcgggtgtacataggatgctgaaa

SEQ ID NO: 53054 - DNA, 255 bp, Glycine max
  unsure (1)..(255): unsure at all n locations; Clone ID: 701142470H1
ttggagtggcccaccacaatgtcnctctacgacgaagacaccgcccaagaggatgtcgaacacgcttacagtcggagatcgttgttctggcggcggatgaagtactacatctcctacggtgctctttctgctaaccgaattccttgcccgcctcgttctggtagatcttactacacccacaactgctacagggcacgaggccccgttcacccttactccagaggatgctctgccatcacgcgctgccggagatga

SEQ ID NO: 53055 - DNA, 251 bp, Glycine max
  Clone ID: 701142471H1
aagacaccgtcttattcttagctgaaaaccattcattcattgacaaaacaaaacaatggcttctttcaatctctcttattcttcctcaccagccctctcacgtccccgggcaagcaaacacttcaaattcttcaatgatgtgccttttgtccgaatgaattctaaatttccctcaagtgataatgcttttggtagaatcaaagctatgttgatctctggagggggtgaactactttcccatccaaatggca

SEQ ID NO: 53056 - DNA, 275 bp, Glycine max
  unsure (1)..(275): unsure at all n locations; Clone ID: 701142472H1
agtcaaccatgaactctcgatcactctttgccttcctcttcgcaatttgcgcgcactccgtcgccgttgccgacacctcctccgcgtatccttccatccccggcacggaaaccggtgagtgctccctccgcggcgtgggcgtgggcgacggtgttctggttcctccacggcgagaagtatacgaggaggggcgaatcttcgacatcactcacagatatgtccccgagatgccggtgtgggactcgacggaggggctcgggcaacacttcctgtng

SEQ ID NO: 53057 - DNA, 275 bp, Glycine max
  Clone ID: 701142473H1
cacaatcggtggtctgagaaatcttgtttgtgttgggtttgttatggctcggagagcagaggaagagtacgattacctgttcaaggttgtactgatcggtgattccggtgttggaaaatccaatcttctgtcccgattcactcgcaacgagttttgcctcgaatccaagtccaccattggagtcgaattcgccactcgcactcttcaggtggagggaagaactgtgaaagctcaaatatgggataccgccggacaggaacgatacagagcaatta

SEQ ID NO: 53058 - DNA, 271 bp, Glycine max
  unsure (1)..(271): unsure at all n locations; Clone ID: 701142475H1
ctgataacatagcttgtgttgttgttggtttattagtgttactattatagaaggtnctattttcattggagaggtttgaatttgattcagctaacannnnnnnnnnnnnnnnnnnnnccttgtttggtgagagtgcttcactaagtgcttttttggccatgtgaatatctgtttgaagccttctttcccactggcctctagacattggttgagaaactgatgaaaacccaatattattatgtcctcctcccaacaagcttcctgatcagaa

SEQ ID NO: 53059 - DNA, 277 bp, Glycine max
  unsure (1)..(277): unsure at all n locations; Clone ID: 701142476H1
ggcaggcgaggtggtgaagaagnaagactctctcaacctgaaagtcactaacaagagtncatgttgcaacctgaggagaaaattggaaggaaagagtaccagctggtcacttttgatcttccctacttggccttctactacaaccagaannaaccngttttacaagggtgaagattttgagggtatggtccaaaaactcaaagttgggacttggtgtggtgctgaaggagtttcaccancttgctggtaagttanggaaagatgaaganggggtgtt

SEQ ID NO: 53060 - DNA, 276 bp, Glycine max
  unsure (1)..(276): unsure at all n locations; Clone ID: 701142477H1
ggcgggtacggtttcgacttgtttcttctgtcgtgtgncttctttctctccttcttctcnttcagatnctccgctgaggaatcctcggagaaggagttcgtactcacattggatcactctaactttcacgacactgtcagcaagcacgatttcatcgtcgtcgagttctacgccccatggtgtgntcactgtaagaagcttgctccggagtatgagaaagctgcttctatcttgagtagtcatgatcctcctattgtnttggctaaagtagatgcc

SEQ ID NO: 53061 - DNA, 270 bp, Glycine max
  unsure (1)..(270): unsure at all n locations; Clone ID: 701142478H1
acaagtttggtgacgactcacttctgcaccgagccacctccaactacactttnctttattattattctctgccggcgtggctttctttcttcttttataaaagtcatatcataatcataataatattaatcgagttttccgcagagaaaaaaaggggtcgaacgagtgaatcagaacataagtgaagactgcgaatataggaacccaatcctaattctattgaatttttatttttagcggtggaaattcatcatcgatcgcatctattcc

SEQ ID NO: 53062 - DNA, 280 bp, Glycine max
  unsure (1)..(280): unsure at all n locations; Clone ID: 701142479H1
gggtacacctgagaggaatcaccactacacattacttgatggggagatgattattgacacagatccgcatacacataagcaagagagaagatacctcatttatgatttgatggctatcaatcaagtttctttgacagagctgcccttctatgaaaggtggaaattgctggagaaagaagtaattgaacctcgtaacatggaacgcgagggcctctcaaagagtataaatccttattatngatatgacttgnccccatttagtgtgaggaggaagggtntt

SEQ ID NO: 53063 - DNA, 284 bp, Glycine max
  unsure (1)..(284): unsure at all n locations; Clone ID: 701142481H1
gctcccctattttctaaattcttccctccctgaaaaagagttcaataggattatcaaggaattgcatcaggattcattaggtcagccagaactcaggactagcaagtctgggagggatgtcaccaagtatcctgttcctgagtgcatgtgcaatgatgactctcatcatcattcttcctaaattgcacatttgataccaaagctnttggtgtgaagattacacgaaaatggataaacaaacacggaagcgatgctacgagtatgattttgatcccttgcgaatt

SEQ ID NO: 53064 - DNA, 280 bp, Glycine max
  unsure (1)..(280): unsure at all n locations; Clone ID: 701142482H1
gcgcttagaatctgcggtgtcgcgcttggngtcgctatccgccggattccacccctccgccacacaatccggcggcgccgaacgctcccgatgcggcgctcgatccctccatcgtcgccttcgccgatctgatcgaccagtacgtcggtagggtttccggcgctgccgaggatatcggtggtcaagtcttggatgtcaccaaactggtgcaggaagctttcaatgttcagaaagagcttctgattaagctcagacagactcagaagcctaaccttgctgg

SEQ ID NO: 53065 - DNA, 276 bp, Glycine max
  Clone ID: 701142483H1
ggatagtggcctaccatggtggtgacgggtgacggagaattagggttcgattccggagagggagcctgagaaacggctaccacatccaaggaaggcagcaggcgcgcaaattacccaatcctgacacggggaggtagtgacaataaataacaataccgggctcattgagtctggtaattggaatgagtacaatctaaatcccttaacgaggatccattggagggcaagtctggtgccagcagccgcggtaattccagctccaatagcgtatattta

SEQ ID NO: 53066 - DNA, 277 bp, Glycine max
  Clone ID: 701142484H1
gatctcaccatctttcacgcactcttccatcagattcaccctttcgtttaacgcaaactcataacttgaaggttaatggctgctccaccggcaagggctcgtgccgattacgattatctcataaagcttctcttgatcggtgacagcggtgttgggaaaagttgcctccttctgcgtttctccgatggttctttcaccactagtttcatcacaactataggcattgattttaagataagaaccattgagcttgatggcaaacggatcaagctccaaa

SEQ ID NO: 53067 - DNA, 276 bp, Glycine max
  unsure (1)..(276): unsure at all n locations; Clone ID: 701142485H1
ctctcctcttccagacaccaacatggcnncaatgaccatgatatacaccttactctttctttctttcactttgtcatatgctattaagacctccaccatcatcaactacaccgacaatgaggtcatggccatgtacgaggagtggttggtgaagcaccaaaaggtgtacaatgagttgggaaagaaggacaagagattccaagttttcaaggacaacttagggttcatacaagagcacaacaacaatctaaacaacacttacaaacttgggttgaa

SEQ ID NO: 53068 - DNA, 277 bp, Glycine max
  unsure (1)..(277): unsure at all n locations; Clone ID: 701142486H1
gcttccttnagctccttagtgctgctccttgcagctctaattctatcccctcaagttcttgcaaactatgagantncccccagtgtacaagcctcccactgagaaaccaccagtttntaagcccccagttgagangcctcctgtttacaagcctccagttganaagccnccngtttanaagnctccagtngngaagccaccagtgtacaagcccccngttgngaannccccagtgtacaagccgccagttgagganccnccagtgtacnagccncca

SEQ ID NO: 53069 - DNA, 112 bp, Glycine max
  unsure (1)..(112): unsure at all n locations; Clone ID: 701142487H1
attctccnntgtcggtcacacacagcgatagangcntaatagagaagagaagcattcataagngncaattgtgagtgagagagaagttnctgtntttnctacttntccatnt

SEQ ID NO: 53070 - DNA, 275 bp, Glycine max
  Clone ID: 701142488H1
gggaagagagggagagtctagagagagaaagcaaagcccaaacaccccttttcaccattgcaatcttcgttcggtttcagagaaccccttttgaatttgtttgaattttctgggaaactgggcattttgtgatcatcatctgggttctctcgatctccatcttttttttctggctttcggttttttctcctcagatcctcttctgtttttgttttctcagtttttttattcgaattttttaagttgtctcgcaattctgcctcgtgggtgtgtgt

SEQ ID NO: 53071 - DNA, 273 bp, Glycine max
  Clone ID: 701142489H1
ctgttttgtaaggggatgtgatgcatcagtccttctgaactcaacaaccaatcaagctgaaaagaatgctcctccaaatctcacagtaagaggctttgacttcattgacagaataaagagccttgttgaggcagaatgccctggtgtggtctcttgtgctgatatcctcactttgtctgccagagacactattgtagccacaggtggaccattttggaaagttccaacaggtcgaagagatggggtcatctctaacttgacggaagccagaga

SEQ ID NO: 53072 - DNA, 264 bp, Glycine max
  Clone ID: 701142490H1
aggaaagacaacgttcgtgaaaaggcatcttaccggtgaattcgagaaaaaatacgaaccgaccattggagtggaggttcacccattggatttcttcacaaactgcggaaagattcgcttctactgttgggatactgctggacaagagaagtttggtggcctcagagatggatattatatccatgggcaatgtgcgattataatgtttgatgttactgcccgtctaacatacaaaaatgtccctacctggcaccgggatctttg

SEQ ID NO: 53073 - DNA, 274 bp, Glycine max
  Clone ID: 701142493H1
ttgctttcatctgctgctcttgagaatccttgcattaagcatgccgtggagttagaacaatcttttatggaaggggcttacaatcgtgtcttgagtgcacggcagacagtgccacatgatacatacgtttatttcatggatcttttggcaaagactgtcagagatgaaatagcaggttgcagtgagaaggcctatgactatctttcaattaaggatgccaagcaaatgttgctgttctcctcagaccagggactcctggaatatattaaagagg

SEQ ID NO: 53074 - DNA, 279 bp, Glycine max
  Clone ID: 701142494H1
gcagcttttgcctacaactcccttcaccatggctgaacaaaccgagaaagcttttctgaagcaaccaaaagtgtttctcagcacaaagaagactgggaagggaaagagacctggaaaaggtgggaaccgcttttggaagtccattgggcttggatttaagactcccagggaagccatcgaaggaacctatattgacaagaagtgccccttcactggcaatgtttccatccgtggccgtatcttggctggaacatgtcacagtgctaagatgaacaggat

SEQ ID NO: 53075 - DNA, 122 bp, Glycine max
  unsure (1)..(122): unsure at all n locations; Clone ID: 701142495H1
tttaaaataatcgtcatttantattaatgagtcatgagcattttattttctgaggttgctactgatatgctaagttttttgtttgtcaaatatattccncacaacatacgnctnntnnnnng

SEQ ID NO: 53076 - DNA, 280 bp, Glycine max
  unsure (1)..(280): unsure at all n locations; Clone ID: 701142496H1
atctatctaatatactatacaaaaagttcttatcagtgacagagtaaaggaggcataccgatgacgatggcgatgacggcgtcgcagttgcggtgcggttgggggtggaggccaacgccgaatcagcagcagcaacgacgtcgtatggttccggtggtgtgttccatcgctatanagaacgcgaagaacaaagagagagcgaaactgaagaagctcttcgatgaagcgtacgagaggtgccgcactgctcccaccgaaggcgtttccttcatctccaaca

SEQ ID NO: 53077 - DNA, 277 bp, Glycine max
  Clone ID: 701142502H1
gaaattttaccagacaataaatgagtgagtattcagaaaccaaaaaccaatagcaatacatttccgatttccagacagaggaactactcagcttagcttgagtattttcaagaggggatcaaagggaagaagaagggaaggatcaaacttgcacacgcaacctttggttcctttcccaacactcaccatggtggcagattctaagtccaattccgacctctccttcggaaaaatctttgccagcagtgctttctctgcatgtttcgctgaggtgtgt

SEQ ID NO: 53078 - DNA, 277 bp, Glycine max
  unsure (1)..(277): unsure at all n locations; Clone ID: 701142503H1
ctttgttgctgcagtagttttggtagcatggccatgccatggcncaggctaccaaaggttccctctccgaatgaaaactggctatggtgagcgttcttcggaggtaaaatgcgcaagttttaggcttgcngtggaagcacacaacatccgagcctttaaaaccattcctgaagagtgcgttgaaccaacaaaggactacattaatggcgaacaatttagatcagactctaaaacagttaaccaacaagctttcttttatgctagtgaacgcgaagtc

SEQ ID NO: 53079 - DNA, 211 bp, Glycine max
  unsure (1)..(211): unsure at all n locations; Clone ID: 701142504H1
ggccttcnccccctttctaaacctcacntaattaattcacaaccnattaaagagacacacataccgtaaatcaacacaacacaaacccagaatcaaacgtagtaactctgttgggttttttcctttctccgggaaacagatagagagaaagaaggaaaaagttcctttttgttgtatcgtatgtntgtttcttctgggaatcttattcctc

SEQ ID NO: 53080 - DNA, 319 bp, Glycine max
  unsure (1)..(319): unsure at all n locations; Clone ID: 701142505H1
ccaacacctacatctgttttgggtcttccaattgggcaacacataagttgcaggggtaaagatgctcaaggtgaagaggttatcaaaccatatactcctactactttggattccgatgttggacattttgaaactagttattaagatgtaacccacaaggaagggatgttcacaccattttcccgtgnagatggcgtgtttggtggactaaccttttcccgttgaaaagggacctnaaggggnacgtttttcaaagttacccaaacctggggcggaaggtttnagggggcttttttggggggatngcctttgncttggg

SEQ ID NO: 53081 - DNA, 271 bp, Glycine max
  Clone ID: 701142507H1
ccgtcatcaatagtggtccccgtgaagatgcaactagaattggttctgctggagtggtgaggagacaggctgttgatatctcaccccttcgacgtgttaatcaggctatatatcttctaacaacaggtgctcgggaagcgctttcagaaacatcaagacaattgctgaatgcttggccgatgaacttattaatgcagccaaaggttcatccaatagttatgctatcaagaaaaaggatgaaattgagagagttgccaaggctaatcgttaa

SEQ ID NO: 53082 - DNA, 272 bp, Glycine max
  Clone ID: 701142508H1
gtcgaccgtaccaggacagctcatctgggagatcgtgaagaagaacaactcctttttggtgaaagagttcggaaggggcactcagagcgtgcagttcagcagagagcccaacaatctctacaacctcaacactttcaagtatccggtttggcgaaccagaaaactgtcactgttcaacctgctggtaaagaccagtccgtgttgctcgcaacaaccaagacaaagaagcaaaacaagcctgctgctttgcttcacaaatctgtcatgaaaaa

SEQ ID NO: 53083 - DNA, 273 bp, Glycine max
  unsure (1)..(273): unsure at all n locations; Clone ID: 701142509H1
cacaaccttagggaggctgtgcctgaanctatgggaggctgatataaaatcagaagttgcataccctggaaagctagctgtggagacatctgtcactgcttgagattattattaagtgcatganattaattaagtcccttcaaaattgttcatttaatcaaaattgaaaatccaaacagccaaacccacgagatcttaattgatctaaaggcaaggcgcattgtctccgacaatattcactccgggaatggcttccctaccctttccgttgat

SEQ ID NO: 53084 - DNA, 269 bp, Glycine max
  unsure (1)..(269): unsure at all n locations; Clone ID: 701142510H1
aaaagtcgtatcccacgagcttcagtccaaggngcttcccagcacaagaatccaacccgatcgtcgatggttcgggaacacgcgtgttgtgaatcagaaagagcttgagtttttccgagaagagctacagagccgcatgtctagtaattacaatgtaattctgaaggagaagaaacttccgctttcgctactcaacgatcaccagaagcaagctagagttcacctgcttgatagagagcctttccaggatgcgtttggaccgaagacta

SEQ ID NO: 53085 - DNA, 267 bp, Glycine max
  unsure (1)..(267): unsure at all n locations; Clone ID: 701142511H1
cttgcctcttcgatctccgccctaagaagaccagggctattcgcangaggcttactangcaccaggtattgttgttatcattattgtcgctactgttattcttctttatttgagtgattatctgatttagttttgtgtaatatgcctgaatgtgngtcatctttaatatgctgctccagagaaacttttatcggttatttatttaagttatctacccattttactcggatcaatttgtgtgctngtttctgtgcgttttacgaaata

SEQ ID NO: 53086 - DNA, 266 bp, Glycine max
  Clone ID: 701142513H1
cggtgtgtgtgctgatgtgttaggtttgattaatgtgcaacttgggaagccaccaaagaccccatgctgcaacctaattcagggtcttgctgatcttgaagctgcagtgtgcctttgcactgctctcaaggctaatggttgggcatcaacctcaatgttccagtgaacttgagcttgcttctaaactactgtggaaagggtgttcccaagggattcgtctgctattaaatcaaacacttataatgtgtagcttcctattgctatat

SEQ ID NO: 53087 - DNA, 268 bp, Glycine max
  Clone ID: 701142514H1
gcggttgcagaagaagattgcaagatgaagttcaacatcgcgaatcccaccactggatgccagaagaagctcgagatcgacgacgatctgaaactgcgagcattttgggacaagaggatctcacaggaggtcatcggagatgcactcggtgaggaatttaagggctatgtcttcaaaattaccggaggttgtgacaaacaaggatttccaatgaagcagggagtgctgactcctggtcgtgttagacttttgcttcacaggggaactc

SEQ ID NO: 53088 - DNA, 272 bp, Glycine max
  Clone ID: 701142515H1
cttcctcttcgcacaaagcagcaagcatccttgagatggaaactttcctcttcacctcagaatctgtaaacgaaggccatcccgacaagctgtgtgaccaggtttcagatgccatcctagatgcatgcttggagcaagacccagaaagcaaggttgcttgcgagacctgtacaaaaactaacatggttatggtctttggtgagattacaaccaaggccagcgtgaactacgagaaaatagttcgagacacttgcaaaggcattgggtttgtg

SEQ ID NO: 53089 - DNA, 274 bp, Glycine max
  unsure (1)..(274): unsure at all n locations; Clone ID: 701142516H1
ctgatcataaatcacatagctagttgtttaaagtgagaganaaagaaagaagaaaatggcaaactttccagttgttgacatggggaaacttaacaccgaagagagagcagcagccatggagattataaaagatgcctgtgagaactggggtttctttgagttggtgaaccatgggatatccattgagttgatggacactgtggagaggctcacaaaagagcactacaagaagactatggagcaaaggttcaaagaaatggtggccagcaaaggt

SEQ ID NO: 53090 - DNA, 274 bp, Glycine max
  unsure (1)..(274): unsure at all n locations; Clone ID: 701142517H1
ccgaaagcgaagaaagagctttcgatccctgtaaccgcgttcgacgatttagggtttttttcggagacaatggcggatgaatcnnagcacacggcggcgcngcgagcggtgaatcgctgcttgacaagattgccgagaagattcacggccaccacgactcttcctcttcctccgattccgattcggagaaaaaggaaacttcgtcaattaaggaaaaggttttccgcctctttggaagggagaagccagttcactccgtcctcggcggtggaaa

SEQ ID NO: 53091 - DNA, 272 bp, Glycine max
  unsure (1)..(272): unsure at all n locations; Clone ID: 701142518H1
gtttcataacactctaagttcatntcaanaccaaagcttctgctttgnnatggaactagagagctgagaggcctaaacctctgtntgctctctctccttttntggtgcagatctngaacttgagctgcattgtcatagaaatctgcaccaagaaatganacataccatgtnacctgncattggatctgttgtccctcgnggtgcctttgcagcagtcttgctcctgttactgtgttctttctccactttctcttctacagaagcctatgatc

SEQ ID NO: 53092 - DNA, 272 bp, Glycine max
  Clone ID: 701142519H1
ggcctagcagctaagttctctaattatttatgcagaagaaaagttggggtcaatccgcgatctcgtaatttttcatcatataatagcaaagatgagctaaccattgaggaagaagctgagaggaaagtcggatggctattgaagacgatattttttgtgactgcaggggtagcaggataccatttctttccttatatgggagataatttgatgcaacagtctgtttcacttttgcgtgtcaaggatccctgttcaaaaggatgggagctcta

SEQ ID NO: 53093 - DNA, 270 bp, Glycine max
  unsure (1)..(270): unsure at all n locations; Clone ID: 701142520H1
cagcattnncgcctcttctttgccttgactacaaaaccactactacttggattgnctggagctgctccagagccagtgattgatacatcaggcaagaagctgagagctgatgcaaattaccatatcatccctgcagtgccctcaccatatgtggcttgttggctgtttcactggtggaggcctttcactaaacagcatagatgaatctgccctcttgatataataatcgagaaagccaatgaangcctaccatgagatctcaccagttaa

SEQ ID NO: 53094 - DNA, 272 bp, Glycine max
  Clone ID: 701142521H1
gggtatgatgacatcccaaaagagctcccagatcctgaagccaagaagcctgaagattgggatgatgaggaagatggtgagtggacaccccctaccattgccaaccctgattacaagggcccatggaaggcaaagaaatcaagaaccccaactataaaggaaaatggaaggcaccattgattgataacccagatttcaaggatgaccccgacctatatgttttccccaacttgaagtacgtgggcattgaattgtggcaggtgaaatctggt

SEQ ID NO: 53095 - DNA, 271 bp, Glycine max
  unsure (1)..(271): unsure at all n locations; Clone ID: 701142522H1
cggaaatttcgtcaaggctacttttgactgtttgccgaaaacctacggttttctaacacctgaattctggaaggagactcggttctccaaatcaccattccaagagtacactgatctattggcaaagccaacagggaaggcccanatcctcgaggaggaaagggtggaggcttgagttnnnnnnnnnnnnnnnnnttttgatgttatcggatgattgtgcctcgtcttaagcatgctaggacccagtaattatatgttttgctacctttgt

SEQ ID NO: 53096 - DNA, 272 bp, Glycine max
  unsure (1)..(272): unsure at all n locations; Clone ID: 701142523H1
gctcccttcttgagtgacatatgcaaattctatagggactttcatgtaaaatctgaccgtgtccatggaattttcctccatgatcctgtcagttttgtggcagttgtgcgtccagatcttttcacatacaagaagggggtagtgagggtagagacacaaggcntctgtgttgggcacacacttctggaccaaggattgaaaaagtntgtccaaatttaaaactattattattcactctaatttttccttataatttagtgctcaacataatt

SEQ ID NO: 53097 - DNA, 271 bp, Glycine max
  unsure (1)..(271): unsure at all n locations; Clone ID: 701142524H1
caacgttacatttgaggactttccttattacttgagtgaaagaactcaagttttgttgacaagtgctgcatatgttcatttaaaacatcttcacttttccaagcacaccagganctccnccaccagcaagcagggcncatttgctatctggtccagcagaaccttaccagcaaatgcttgccaaagctttagcacattactttgaatcaaagttgctgttgttagatattactgactttnctgtgaagttgcagaanaaatttggatgttc

SEQ ID NO: 53098 - DNA, 243 bp, Glycine max
  unsure (1)..(243): unsure at all n locations; Clone ID: 701142526H1
tgggtgcctacaagtatgtttcacngctatggcgcaagacgcagtctgatgttatgaacttcttgcagcgggtgaggtgctgggagtatcgccagcaaccttctattgtccgtttgacaaggtctactcgcccagataaggctcgtcgcttgggtttcaaggctaagcagggttacgtgatttaccgtgttcgcgtacgaagggtggccgtaagagaccagttccaaagggtattgnntatgg

SEQ ID NO: 53099 - DNA, 180 bp, Glycine max
  Clone ID: 701142527H1
gagcttgtttaagcttttcttccattaacatattatcacaatgtgtggtattcttgctgttcttggttgttctgatgactctcgagccaaaagggtccgcgtgcttgagctctctcgcagattgaagcaccgtggccctgactggagtgggctccatcaacatggtgactgctttttggc

SEQ ID NO: 53100 - DNA, 258 bp, Glycine max
  Clone ID: 701142529H1
cacacacacactcaccgccgtatcgttcacactgaaccaatccaaaccccactctctctctctccgccgcaaacgacccttctccggggcggcgccaccgtacaacccccgatttaactaaaggagcacagaaggagctgcttggttacaaatggcggccaccgcaagcaacaatgacgtcgccgccgccaacgacggtcccgtgatgagccttatcaacaagcgcctccgcgctctccgcaagaagctgaaccgcat

SEQ ID NO: 53101 - DNA, 268 bp, Glycine max
  unsure (1)..(268): unsure at all n locations; Clone ID: 701142530H1
cttttgtgtttgcgccgctctcaagcctcagactcgcgactccancaccactgctcagactgctcgccggcctctaatttatcaaagcttctgcgcctcccacgttattttcaatactctcttggggttcgcatagtgagatggggaagaaggcgaagaaagctatgaataatttgaaaagggcttcctttaataataagccatctgagggtgctgatttcttgccctggaaggtggtcctgctcgtaagctcgccgcctcccagcag

SEQ ID NO: 53102 - DNA, 268 bp, Glycine max
  Clone ID: 701142531H1
tttaggatggccatgcttgcttatgaggcagcaataattgcagcattcttctgcttcttatacttcttccatcggagacaatgttgcagacaccctctcttcactgactttcccatccttggcatgctgccacaattactcttcaatttgtggcgagcccatgattattcaactcaggtgttgaaacaacgtgggggcaccgctgagttcactggaccttggtttaccaaaatgaactgtttggtcactggtgaccccatcaagtgca

SEQ ID NO: 53103 - DNA, 272 bp, Glycine max
  unsure (1)..(272): unsure at all n locations; Clone ID: 701142532H1
aactcagaaccaaactcagaaccaaactcgccaaaactagggttttgcattgatggcactgtgcaaccgcgtcagatcgggaatctctctcttcaccaaatccacgttccttacttcccagcgatccagtctccaacgatccctcgttgcccctttcatttccctcgcctccagaaattacgccaacgtgccggggcaaaaggaaaccaaagttaaggnccctcnggctttgttnggaggttcaggaactannctctgtttntatatngaac

SEQ ID NO: 53104 - DNA, 272 bp, Glycine max
  Clone ID: 701142533H1
gtttttggttgggctgctcgggactcatctgggcttctctccccattcaacttctccagaagagaaacgggggagaaagatttggtattcaaagtgcaatactgtggaatatgccactcagatctacatatgttaaagaacgagtggggcaacacaacctatcctctggttcctgggcacgagattgctggtgtggtaacagaagttggaagcaaggtgcaaaagttcaaagttggagaccgggtaggtgtggggtgcatgattggatcctg

SEQ ID NO: 53105 - DNA, 251 bp, Glycine max
  unsure (1)..(251): unsure at all n locations; Clone ID: 701142534H1
gctcatgttcactctgctcagagancttggtcaactatatacancattttgttaaagaatttcccattgtgtcaattgaggatccgtttgntcaagatgattggggttcgngggcttcttgctcgcttcagttgatattcaacttgtaggagatgatttnttagttacaaatcctaagagaatagctgaggccatcaaaaagaaggcttgtaatggtttgcttctaaaggttaaccagattggtacagtga

SEQ ID NO: 53106 - DNA, 270 bp, Glycine max
  unsure (1)..(270): unsure at all n locations; Clone ID: 701142535H1
aactcctatcttgttccctctcttctttcttctttgtgccttcacctcatatctaccttcagccaccgctgatgatgatcatgtgtacgncactgacggcgataagcttcaatacggtgtcaattatttcgtgttgccagtgataagaggaaatggcggtggaatacaagtagcaaaagcaggaaacgaaacttgccctctgactgtggtgcaatctggcaacgagctctctgaggggttaccgataaagattgcatctcgatcagcagg

SEQ ID NO: 53107 - DNA, 263 bp, Glycine max
  unsure (1)..(263): unsure at all n locations; Clone ID: 701142536H1
attatttctaattctctcttatcaggtccattgaatatgtctccgtcgttgncatcttcctcccaagggtggcttnagttttgatctatgccgaagaaacgcaatgcttcaaaacaagggcctcaaagcccaacctttctcaaaactggcaccactattgtcggtttagttttccaggatggtgtcattcttggtgctgatactagggcaactgaaggncctanagtggctgataaaaactgtgagaaaattcattatatggc

SEQ ID NO: 53108 - DNA, 268 bp, Glycine max
  Clone ID: 701142537H1
aaaaactctgtaaacatgttggtttaccaggacctccttacaggtgatgagcttctctctgactccttccgttacaaggaaattgagaatggaatgctgtgggaagttgaggggaagtgggttgttaaaggagcagtgatgtagacattggtgcaaacccttctgctgagggtggaggagaagatgagggagttgatgatgcagctgttaaggttgttgacattgttgacacattcagacttcaggagcaacccgcattcgataagaa

SEQ ID NO: 53109 - DNA, 268 bp, Glycine max
  unsure (1)..(268): unsure at all n locations; Clone ID: 701142538H1
aaggatgaggatactgaagttgatcttgaaagtgggttggttttgacagatgatgagtcaaaggatgtctctactgaaggtaacagaaaacaaggaaagatattacttaataagatttcttgtgggtttgttggagttgtataaaaggtgaagataggtatagtggattctgcaaggagtcaaaattaactgtagtttcaatggacatggtgaaagtgacaaacaagttgtactcagtagaatatgcagagaataataccccaganaa

SEQ ID NO: 53110 - DNA, 268 bp, Glycine max
  unsure (1)..(268): unsure at all n locations; Clone ID: 701142539H1
gttccgccaccaccgactcatactccttcccaattttcgtacaatacaaacactttctctcggatttcgtttcatggaatcgccgcattcatagcacaactcttcaaaatgtattccttcaaagacaaagttacaagaaactctcccatctctttcnnnnnnnnnnnnnnnnnnnnnnncaggatagtccatattcgcaagaggataaacctttgtcttcatatttatcttacattatccctccatcagctttgatggatcgaagtca

SEQ ID NO: 53111 - DNA, 267 bp, Glycine max
  Clone ID: 701142541H1
aaattcttctaaatggaaaacctccaagttactcattcaaccagtcttccgaaggaaccaaagtcagggaagaaaaagataaatggaaaggaaattcagatgataaaccaaatgacttcccaacagtggatacagacgatagtgttccaggagttttgtatgatttgctgcagaaagaggtcttagccttgaggaaagttggtcatgagaaagatcaaagcctaaaagataaagatgatgccattgaaatgctggcaaagaaagtag

SEQ ID NO: 53112 - DNA, 261 bp, Glycine max
  unsure (1)..(261): unsure at all n locations; Clone ID: 701142542H1
cctgggtggtctggagaaganaagaaatcattatgttgaaggaggtgatgctggcaacagggaggattacataaatgagcttattagaaggatgaattagttttttttccccataccgttagtgttaattttgacgctaaaacactctttgtttatgcttttattattttgaatgatgtatgtgctgattgagatattaattcgttgcttgccattcaatgaaatgttacttatctcgagcatccaactgtgctagtgtta

SEQ ID NO: 53113 - DNA, 261 bp, Glycine max
  unsure (1)..(261): unsure at all n locations; Clone ID: 701142543H1
gtttttgtatcctctatatatagttctctggcaattaaggtctcagctaaatacgcacaaatgggtagccagagttgcttcaaggctttgattatttgccttatagcattaattggatcaactcaagctcaattgcagcttggtttctatgccaaaagttgtccnaaggccgagaaaataattttgaagtatgttgtagagcatatccgcaatgctccatcactagcagctgctctcataagaatgcacttccatgattgt

SEQ ID NO: 53114 - DNA, 262 bp, Glycine max
  unsure (1)..(262): unsure at all n locations; Clone ID: 701142544H1
gaatcttcagttgaaagggaagaacacacaagaacaaagagaggaagaaacgngaatgaagggagaattagagttgccaccagggttcagatttcaccccactgatgaagaattggtgaatcactacttgtgtaggaagtgcgcgggtcaaccaatcgcggttcccatcatcaaagaggtcgatttgtacaagtttgatccatggcagcttccagaaattggctactacggcgagaaagaatggtacttcttttctcctcgg

SEQ ID NO: 53115 - DNA, 262 bp, Glycine max
  Clone ID: 701142546H1
tcaatgggcaagcagaggtatgcggtcaacggtgtctcatacaatgaaccagataccccattgaaacttgccgactacttcaacatccctggagttttctacgttggaagcattcctacctatcctaacgggggaacaatgcctacctccaaacttctgtcatgggggctaatttccatgaattggtggagattgtattccaaaattgggaggattctgtgcagtcatggcacattgacggctattcctctttgttgtaggg

SEQ ID NO: 53116 - DNA, 269 bp, Glycine max
  Clone ID: 701142548H1
ggcaatctaaaaagtatgagggaggtcattgggtaccaattggatgggcaagaatttcagaacttgtccaagcagttcaggttgatgctgactggtcttctcatcaattggaatttgaggattctgaagatgattttacagtagcagatttggcagctccttattgggagcatccggctgggcctatatggtggtgccatgtttttgcaggtcaccccactgttgaggcttggctcagcaatgctcaatggctacaccctgctgttagt

SEQ ID NO: 53117 - DNA, 268 bp, Glycine max
  unsure (1)..(268): unsure at all n locations; Clone ID: 701142549H1
aagagtggtgtgtctctcaaggactccaccttgttcggtctttcattttcagaacctatcaaagctaacttcagctcttctgcattgaggtgnaagagggaattcgaacaaaagctctgtgctgtgagggccgaaacagtggctacagcctctccagcagttaccaagtctacaccagaagggaagaaaacattgaggaagggcagtgttgtgataactggggcttcatctggactaggcctggccactgctaaggctttggctgaga

SEQ ID NO: 53118 - DNA, 268 bp, Glycine max
  Clone ID: 701142551H1
gggagaggaccaagcatatgggacacctacactagacagcatactgaaaagatttgggatcatagcaccggtgacatgggagctgatttttatcatcgatacaagggtgacataaaaatagcgaaagaaattgggtggactctttcagattctctatctcatggtcaagaatattcccaaagggcaagggagcagttaacccccttggggttaaattctacaacaatgtcatcgatgagatcctagcaaatggtttaaaaccttttgt

SEQ ID NO: 53119 - DNA, 267 bp, Glycine max
  unsure (1)..(267): unsure at all n locations; Clone ID: 701142552H1
gacaatgctgctgtgctgggtctagaacatttgtacacgaacgtgtgtacgatgaatttattgagaaagcaaaggcacgtgctttgaagcgtgctgttggtgatccattcaaggggggaatagagcaaggtcctcagattnattcagaacaatttcagaaaatactgaagtatattaggtccggtgttgaaagtggagctactcttgaaactggnggagatagatttggcaactcaggcttctatattcagcctactgtctctcaaa

SEQ ID NO: 53120 - DNA, 269 bp, Glycine max
  unsure (1)..(269): unsure at all n locations; Clone ID: 701142553H1
gaaaaagangagccaccgctgcgacgccgttcgtgccatttttgangtgccgctgtcatgtttgggcgtggtggancaaggaggagtgataactccaaatattatgatattctcgggatttccaaaaatgccagtnaanatgaaatcaagaaggcctatagaaaggcggctatgaaganccatccagataagggaggagatcctgaaaagtttaaggagttaggtcaagcatatgaagttttaagtgatcctgagaagaaagaatgtat

SEQ ID NO: 53121 - DNA, 264 bp, Glycine max
  Clone ID: 701142554H1
ctcgatccatggctagttgtatggtttatgcgtgttacatttatattgttctgggaatattagtgttgaaaggtgcagaggcacagcgtgcgttctttgtgtttggggattctcttgtggataatgggaacaaaactttttggcaactacagctcgagcagatgctcctccttatggcattgatttcccaaccggaagacccactggccgtttctctaatggctacaacattcctgacttcatcagtcaatcattggggccgaa

SEQ ID NO: 53122 - DNA, 258 bp, Glycine max
  unsure (1)..(258): unsure at all n locations; Clone ID: 701142556H1
accaagcaaacaatgggtactgacaagtcaaaccgggtcgggttagtgatatccagaactgacccgattcgggatttcctttccgacgcatcaaaagactccnactctctccgacgaacttcaacgaacatcctccgatctgctcctccagtcggagataccctacgtgccatttcgcactgtgtggatggcctctgacccatcaaccagacccgacttgacccgactcttttcgggcacccgcttcatcttctccag

SEQ ID NO: 53123 - DNA, 264 bp, Glycine max
  unsure (1)..(264): unsure at all n locations; Clone ID: 701142557H1
cntntagtaagctacactttatttgangttggagaaatatgggctaaagatgttgaggttcaagagcaaggaggagagtactctgcaaaagactaccatgaccctcctccagcacccttgttcgacccagaggagtcacacagtggtcctttatagagccctaatcgctgagttcatagcaacccttctcttccttatgtcaccgtgctcaccattattggctacaaaaggcagactgatgccacgctaggtggcaccgagtgt

SEQ ID NO: 53124 - DNA, 248 bp, Glycine max
  unsure (1)..(248): unsure at all n locations; Clone ID: 701142558H1
ccggcattgcccttgttaacccattcatcatanaaggnttcattaaattcctccaccccatatccatgcgtntctagtatgggatattagagagtacggtgtatctatgccgaatataaatatgtcgtgtgatggactcgcgttcactagcataaaagaaagcttgttggtnaactgtcttagagtctgatctaattgttcgccattaatgtagtcccttgtggcgcgcctntntgnttntntttntt

SEQ ID NO: 53125 - DNA, 258 bp, Glycine max
  unsure (1)..(258): unsure at all n locations; Clone ID: 701142559H1
gcagtacaagcagatatttcaatgctgcaagtgcagctgatcgtcctacatcttcagaattgtggccagagaagcccaatatggattctctatatatgccttgggatcatgttaatatgacacccacatttagaggtagaggcctttctatacggggcgagggtcctttaaggaatgtgaggagccgttctgcacttgatttggaatccaanctggctagggcccattatcaaatactcatccacacaactcatactc

SEQ ID NO: 53126 - DNA, 266 bp, Glycine max
  unsure (1)..(266): unsure at all n locations; Clone ID: 701142560H1
ctcncagccnaactaaaaccccactcantcttccagtgaaaanagaaagnccanccgatggaagcagacttcgacatccccggcggcgaggaaatggatcctcggcgaagacaaggtcggcgaggagcgggagatcggctcccgcggcctcaagaagaagctcctcaaagaaggtcaaggctgggaaacccccgaagtcggcgacgaagtccaagttcattacacggggactttgctcgacggaactaagtttgattcgagccgcg

SEQ ID NO: 53127 - DNA, 260 bp, Glycine max
  Clone ID: 701142561H1
cttgctctcaggccactgtgctgcttttgtcacatttgagttctggatccaaatcgaacgtggagggcttctcacaacttctccgtcttctttgttggtgtcctgcttacatttccactcatgatgcaatgcaaactggtgttttcatatggacatggttggtttctgctgcacctgaacttggagctcttgtccttgctgagcttgtcgatgcatggttatggacaattgataccaagcggggtctttttgcatctgaa

SEQ ID NO: 53128 - DNA, 262 bp, Glycine max
  unsure (1)..(262): unsure at all n locations; Clone ID: 701142562H1
gagaatatgaagttgtttgtnttctttgttgctgcagtagttttggtancatggccatgccatggcgcaggctaccaaaggttccctctccgaatgaaaactggctatggtgagcgttcttcggaggtaaaagcgcaagttttaggcttgctgtggaagcacacaacatccgagagcttaaaaccattcctgaagagtgcgttgaaccaacaaaggactacattaatggcgaacaatttagatcagactctaaaacagttaa

SEQ ID NO: 53129 - DNA, 263 bp, Glycine max
  Clone ID: 701142563H1
gatttaacacctaatgcaagttcattgtggactgctgccatgaagaaaattactttttccaagaagcagctggtgccattttttgtaaatgtccagcgtgagggcctggaatatctacttcaattagtgaaggacgggaaactgaagtctgttattgactccaagtttcctttgagcaaagctgaagatgcttgggctaagagcattgatggccatgctaccggaaaaatcattgtggagccataggtacagtttgctggaat

SEQ ID NO: 53130 - DNA, 271 bp, Glycine max
  unsure (1)..(271): unsure at all n locations; Clone ID: 701142564H1
ctaacactcattaattgcaagaatggcacttcgttgcttggtgatgtccctttctgttctcttcactcttggtcttgcgagagaaagccatgccagagacgaagatttttggcatgctgtttggccaaacactcccatccaagttcattgcgagatcttctaaagcctggccctgcaagtgttgaaatcgatgatcaccctatgncaaattgaagaaacacagtacccgaaaaccttcttctataaagaagaccttcntccaggcaaaaca

SEQ ID NO: 53131 - DNA, 228 bp, Glycine max
  unsure (1)..(228): unsure at all n locations; Clone ID: 701142565H1
atagtanacttcgaacccatacanngtgttaacgnaatatgatgatttggaatacnagtcacgcattatcaagaacgatgattttgaatcgagacaagtgttaccaagcatgatgattttgaactcaagtcaagcgttaccaagaacaatgattttgaaccgagaccaagtgttacaaagtatgataactttgaacccagaccaagtgttaccaaatatgatgatttt

SEQ ID NO: 53132 - DNA, 268 bp, Glycine max
  Clone ID: 701142566H1
ggtctctcttcctccgctgcttctacacacaatgaaggttcaaagttatatcacgctccgtggatgagttcacccgagagcgaagtcaagaccttcagagggtgttccggaattacgatcccagccttcgtcctcaagagaaggcggtggagtatgtgcgtgctgttaatgcggtgaagttggacaagatatttgcaagaccatttattggagcattggatgggcatgtagatgctgtttcgtgtatgacgaggaaccctagccagtt

SEQ ID NO: 53133 - DNA, 267 bp, Glycine max
  Clone ID: 701142567H1
ctctgccctatcatcttatacattactactattttttactataacttcaataaattcaaagaagatatttttcttcctaataatataccaattcatttcaaagagtgatggattctccacaaaaaaaataatcagttttgaagaaagaaatcttcactcactatgctcctctgctgcaatagtacggtaaaatgaatcactgtgttccagatttcgaaacccaaatggacgacgacttagaattctcaattcccgtctcaaagaaac

SEQ ID NO: 53134 - DNA, 239 bp, Glycine max
  Clone ID: 701142568H1
caccatgtcacttgctgggaaaatcaccactgaaatcggggttcatgcaaccgctacaaagtggttcaacctcttcgcaacacaactccatcatgttcaaaacctaactgatagagtgcatggaaccaagctgcatcaaggtgaagactggcatcacaacgagacagtcaagcactggacttataccatagatggtaaggttacaacatgtctggagagtattgaatccattgatgaac

SEQ ID NO: 53135 - DNA, 264 bp, Glycine max
  unsure (1)..(264): unsure at all n locations; Clone ID: 701142570H1
cttgcgtctgcaaattctatgttgtttganttgcgtgagtgaattgcggaagatgctgtgtctgggtcgattcggcggggtctcttacggttggagttggaatcggaggagggacaacaccattaacaggccagatggcgtttgatggcccaggaatcaccctctctcgactcagacaaaaccgccactgctggattctgcatcattgaaggccccgaaactgtacaggattttgccaagatggagcttcaagaaattcaggac

SEQ ID NO: 53136 - DNA, 210 bp, Glycine max
  Clone ID: 701142571H1
atctgtgacgagcatcatggcctcgagagcagtgctattgttggctatgtgtgtgcttccggccatggttgtggccattcgcccagcaaagaaccctttttgcgtgaagggtcgcgtctactgtgacccttgccgtgctggttttgagacctcagcaaccacctacattgccggtgctgagattatgttgcaatgcaagagcagggttag

SEQ ID NO: 53137 - DNA, 264 bp, Glycine max
  unsure (1)..(264): unsure at all n locations; Clone ID: 701142572H1
cacatcactagtgtttactgtgaggnggagtgaggcagagctgatagctccggcgaanncaacccctcgtgaagtgaagctactctcagacatagatgaccaagatgggttacgtttccaaattccggtgatacagttctatcgccacgacccatcaatggcagggaaagaccctgtcgatgtgataagaaaggctgtggccacnacgcttgtgttttactatccttttgcaggtaggcttagggaaggacttggtcggaaact

SEQ ID NO: 53138 - DNA, 264 bp, Glycine max
  unsure (1)..(264): unsure at all n locations; Clone ID: 701142573H1
gaaaaaaaccaacaaccaccaaccatctagggttttttctttttctcatggctagtttgtcaactaggattttcttcatcatgtcccttgtgtgcctggctctcggtccaatggcacaaggggaaatgacatgtggccaggttgtgagcaacctgaccccatgcatctcctatgtggtgtatggtggaaccaatgttcctgaacagtgctgcaatgggataagaaatctctatggcatggctcagancaaaccagaccgccaag

SEQ ID NO: 53139 - DNA, 185 bp, Glycine max
  unsure (1)..(185): unsure at all n locations; Clone ID: 701142574H1
tttggagttcttcggattctgaaatcggtnaagcgttggactggttggattcgaagangaagctgaaggctcctccttttccctcactttgtggcgccccaacgctcacggcggtcaccaccaccattcctccactctccaacctctcgccaatcgcaaccagaagttctcccatcacattcgtg

SEQ ID NO: 53140 - DNA, 240 bp, Glycine max
  unsure (1)..(240): unsure at all n locations; Clone ID: 701142575H1
gcaattcccatctcatggccatctacaaacaataatcatcangctccttctccttgtttcancaggaataggtcacataatccctgccctagaacttgccaagcgtttagtcactcacaaaatcatttccaaactcaccttcttttatggttcaatcaaaatctctactccatcaaaagctgagacacaaattctccaatcagccataaaggaaaaccttttcgatctaattcaactccc

SEQ ID NO: 53141 - DNA, 259 bp, Glycine max
  Clone ID: 701142576H1
ccgaggcgaagagaagagaaaaattaagatggaggggaaggagcaggatgtgtcgctgggagcgaacaagttcccggagagacagccgattgggacggcggcgcagagccaagacgacggcaaggactaccaggagccggcgccggcgccactggttgacccgacggagtttacgtcatggtccttttacagagcagggatagcagagtttgtggccacttttctgtttctatacatcactgtcttaaccgtcatggga

SEQ ID NO: 53142 - DNA, 258 bp, Glycine max
  unsure (1)..(258): unsure at all n locations; Clone ID: 701142577H1
gttgcatcaatatcacttagtccanatgttccagcacaaatatttatgggagttatgctccatccacctcaacctggagatatttcttatgacaaatttgtnagggagagcaccggaatacttgaatcactgagaagangagcaaggcnaatgactganggnttcaacagtngcagnnatgtggtntgtnattttactgaaggtgccatgtattcattccctcaaatacgtttgccgccaagagctttagaggctgct

SEQ ID NO: 53143 - DNA, 260 bp, Glycine max
  Clone ID: 701142579H1
cccttatatattgccatggaaagcatgtaatacatagggatattaaaccagagaaccttcttattggttcacagggtgagttgaaaatagcagactttgggtggtcagtgcacacattcaatcgcaggcggaccatgtgtggcacactggattaccttcctcctgagatggtggagagtgtagaacatgatgcgagtgtggatatatggagcctggtgtcttgtgctatgagtttctttatggagtccctccttttgagg

SEQ ID NO: 53144 - DNA, 264 bp, Glycine max
  Clone ID: 701142581H1
aaaaagttagggttttgcattttggatcagtcagactcagacatgggaggaggcaatgcccagaagtcaaagatggctcgcgagaagaatctcgagaagcagaaagcagcggctaaggggagccagttggattcaaacaagaaagctatgtctattcagtgtaaggtgtgcatgcaaacatttatatgcaccacatcagaagtgaagtgtaaggagcatgctgaagccaaacaccccaaatctgatctctatgtttgttttcct

SEQ ID NO: 53145 - DNA, 263 bp, Glycine max
  Clone ID: 701142582H1
gccagtagtcatatgcttgtctcaaagattaagccatgcatgtgtaagtatgaactaattcagactgtgaaactgcgaatggctcattaaatcagttatagtttgtttgatggtatctactactcggataaccgtagtaattctagagctaatacgtgcaacaaaccccgacttctggaagggatgcatttattagataaaaggtcaacacaggctctgccgttgctttgatgattcatgataactcgtcggatcgcacggcc

SEQ ID NO: 53146 - DNA, 263 bp, Glycine max
  Clone ID: 701142583H1
cttgttggttatgctgttgtggagttacttctctgttgtttttaccgatccgggcagtgtccctccaaactggaagcctatgattgatgaggaaagaggagaggctgatccgttggttgggacagagtttagtaatgtgctgtctgatcccaatcaacgggttcggtactgtcggaaatgcaatcaactcaagccgcctcgatgccatcattgttcagtttgtgggcgctgtgttttgaagatggaccaccattgtgtgtggg

SEQ ID NO: 53147 - DNA, 263 bp, Glycine max
  Clone ID: 701142584H1
ctgtttccttcttcaccgcatcaatggagttggacggcgttctcctcggcatgtgcaaccctctcctcgacatctctgccgtcgtcgacgacgctttcttgcaaaaatacggtatcaagttgaacgatgcattctcgctgaggataagcacaaacctatgtatgaagaattggctaacaatcctaatgtggagtacattgctggaggtgctactcagaattcaatcagggttgctcagtggatgcttcaagcaccaggtgcca

SEQ ID NO: 53148 - DNA, 261 bp, Glycine max
  Clone ID: 701142585H1
tctcccctatctaccctgataattccttaaaacatggctggatgttctcaacaaaggctggttgttatgtttttatgtctcattgggatagtttcagctacagatttaacttcttcagctgtgagtttagctgattatgagttaagcaccactttttatcttttaaagtgtcccctgggcctctttaccattaataacctagtaaccactgctgtgcggaatgagtctcgcatgggtgcatccttgctccgtcttcattcc

SEQ ID NO: 53149 - DNA, 262 bp, Glycine max
  Clone ID: 701142587H1
ctttctttctggcttcagtttttgcagtgaaaatggcggtgactttaacatcaaccctctttatggctttgctatttgctgcttcagcttttgctgctcttcagcctagagtacctgaagcttaccttcaaaatggaaactttgaggagcagccaaaccccaaaaacctccagaaaacaaagctcatggggaaatattctttgcccaaatgggaagtcaatggtctggttgagtatgtctctgggggtccccaacctggagg

SEQ ID NO: 53150 - DNA, 254 bp, Glycine max
  unsure (1)..(254): unsure at all n locations; Clone ID: 701142588H1
tttgaatttagtgcctctcctctctgtttacccttccagatattgcagatacagcangatcatgagtgggacttcggaaaagaaacttgtaagaatcgatgttagttctgatactgtatgcccatggtgctttgttggcaaaaaaaatctagacaaggccatagctgcctccaaggataaatacaactttgagataatatggcatccctttcaacttagccctgatgcccctaaagaaggcattgacaagaggg

SEQ ID NO: 53151 - DNA, 256 bp, Glycine max
  Clone ID: 701142590H1
gtaagaactgttgttaccgtgggcaactacgataacatcattgattgggagtttaaaacaagtggctcaatcaaaccctcgattgctctctcgggtatattggaaattaagggagtggatattaagcacaagagtgagatcaagagcgatcaacatggtatcttggtgtcggcaaacagcattggtgtttaccacgaccacttctacatttaccatcttgaccttgacattgatggtgttgccaactcttttgaga

SEQ ID NO: 53152 - DNA, 258 bp, Glycine max
  unsure (1)..(258): unsure at all n locations; Clone ID: 701142591H1
cgcagaacgaggagcagcctcaggaggagaaggatgtctcacaggancgttcgagcacccaaggcacggttcactgggatttcttcccaggaagcgtgctgctcgtcacaggggaaaagtgaaggcattccccaaggatgacccatccaaggcacccaagctcactgcattcttgggttacaaggccggtatgactcacattgttagagaggtcgagaagccaggatcaaagcttcacaagaaggaaacttgtgagcc

SEQ ID NO: 53153 - DNA, 255 bp, Glycine max
  unsure (1)..(255): unsure at all n locations; Clone ID: 701142592H1
ctgcactgctcaaagtgtaaggtatgatggtgagtcacggcattcttgccgctatgcactttgaagataaatgttagtgctaaatatggaagttttaagataaatgttattgctaaatatggaatttatatgttctttnttcttttattggaaaaattgacaatgtggatactgttttgtacactaaatttctctcttttttggtcacttctgtatgttgggataatgtgataggtgagagaaacatgtattcta

SEQ ID NO: 53154 - DNA, 257 bp, Glycine max
  Clone ID: 701142593H1
gatgtagagaccatcaaggaactgattgagcaaggaaatgcaacaagaagtactggcaccacaggtgcaaatgaggagtcttcacggtcacatgcaatacttcagcttgctatcaagagatcagttgatggaaatgtatccaagcctcctcgtgttgttgggaagctctccttcatagatcttgctggaagtgaacgtggagcggataccacagataatgacaaacagacaagaatagaaggtgctgagatcaataa

SEQ ID NO: 53155 - DNA, 253 bp, Glycine max
  Clone ID: 701142595H1
caaccctaaggagttgttgagtttggtacatgggcggagaagtgttgacgatggcggacgtcacggccaacttgcaagcagcaaccaccgcatccaccccttacgcgcttcccaccaatctccctctcctctccgcttttctctccttcgctctcgctcagttcctcaagatcttcacctcctggtataaggagaagagatgggattctaaaaggttgcttgattcgggtggaatgccttcgtcacattctgc

SEQ ID NO: 53156 - DNA, 263 bp, Glycine max
  unsure (1)..(263): unsure at all n locations; Clone ID: 701142596H1
tgagatctcatatatcatggctacctccatggtgaagcttatgttttctctgctctcatactcttgtccttgcaagcagttgtgtctgtaacaccactgcattttcaacatccactagaccctttaaccaaacaagagataagtcttgtccaaaccatagtccaaaacaagtacccaagctcaagtaacaggttgagcttccactacattggactcgncgaacctganaaggatgccatcctcaangggaatccatcaaacca

SEQ ID NO: 53157 - DNA, 269 bp, Glycine max
  Clone ID: 701142601H1
acactgcacagatctgagtggtgactctttcacttctcatcactattattattaggtctgaaggctcattgccattatcatgtcaaggaggccagtaaatccttcgcgtcggctaggtgatggtggaagtataccatttgttgcatctatccagtccaaatctcaaaactctcccctactatctattgggcttgtcattgtgggtgcaatcctcctgattggttattgttacagcaattcaggtggagctagcggtggtattaaggatg

SEQ ID NO: 53158 - DNA, 262 bp, Glycine max
  unsure (1)..(262): unsure at all n locations; Clone ID: 701142602H1
ggaagtctttcctttgtgttagctaaatttgatggattacttgggcttggnnttcaggagatctcagttgaaaatgctgtgccagtatggtacaatatggtgaagcaaaatcttgtaagcgaacaggtgttctctttttggctcaatggtgatccaaaagtgaaaaatggtggtgaactagtttttggaggtgttgatcctaaacacttcaaaggagaacatatctatgttccagttactaaaaagggttactggcagattg

SEQ ID NO: 53159 - DNA, 259 bp, Glycine max
  unsure (1)..(259): unsure at all n locations; Clone ID: 701142603H1
gccagactcacttgcaagcttcgacttttactcgaaggtnttgcatattgccacttgccaaagttttggtgcataaggcctcacaatcggtatgatgatgattttatcattgtttgaagtattactttgatttgggcccagcatttacttcctttgataaatttatnttcttgattttatcttacttcattttgatttattcttctatgccttgctacaatattttcatctttgcttcttcatagtaacttctattaga

SEQ ID NO: 53160 - DNA, 252 bp, Glycine max
  unsure (1)..(252): unsure at all n locations; Clone ID: 701142604H1
aaaaatataaacttcaaacgttcaaattcactcgggaaaataacattgcantgttgacaaataaacatactaccaacacgagctatataggggcacctaagaaacaggactaacaaacggtaaaaagtttaataatttcggtaagattaaaaatgcaataaacattaaatacccgatgccagagggctggaaagttgaagtctcaaataacttacaagcatctaaaagtattcacttgggaccacctccaag

SEQ ID NO: 53161 - DNA, 259 bp, Glycine max
  Clone ID: 701142605H1
gcggtttcagagtttgtgacgcacgcatccatggccaccaccaccaacgccgccgcagccccgccgcgccagttctcccagaaggaagccgacatccagatgatgttagccgccgacgtccacctcggcaccaaaaactgcgacttccaaatggaacgttacatcttcaagcgccgcaacgacgggatttacattattaaccttgggaagacatgggagaagcttcagttagcagctagggttattgttgcaattgaga

SEQ ID NO: 53162 - DNA, 255 bp, Glycine max
  unsure (1)..(255): unsure at all n locations; Clone ID: 701142606H1
ctcccattctctcgcatctcaatacccttttgatttgtgaaaggaaagcaaacatgcttgatcaggtccaacaccctacaatcatggacaaggttgctggccagctccatctccgttctggtgtttctggtattaggagttatgnaggagcctactgccaccccacaatgtaccaaagaccctcttttgggaattactcgaatgctgcattgcagtatcctgtgatgccctcatgcaaagctactatggattgtc

SEQ ID NO: 53163 - DNA, 256 bp, Glycine max
  Clone ID: 701142607H1
cagggttcttctatagcactagttcctcaaggaggaggccaagaaactaccccgttgacatctattactcagcttgttcaccatggattgatctttgtccccattggatacacatttggcggtggcatgtttgagttggagaaggtgaaaggtggctccccatatggtgcaggaacttatgctggagatggctcaaggcagcctagtgaattggaattggctcaagctttccatcagggaaagtactttgcgggca

SEQ ID NO: 53164 - DNA, 254 bp, Glycine max
  Clone ID: 701142608H1
tggtagcatggccatgccatggcgcaggctaccaaaggttccctctccgaatgaaaactggctatggtgagcgttcttcggaggtaaaatgcgcaagttttaggcttgctgtggaagcacacaacatccgagcctttaaaaccattcctgaagagtgcgttgaaccaacaaaggactacattaatggcgaacaatttagatcagactctaaaacagttaaccaacaagctttcttttatgctagtgaacgcgaa

SEQ ID NO: 53165 - DNA, 258 bp, Glycine max
  Clone ID: 701142609H1
ctctctgtttccttcttcaccgcatcaatggagttggacggcgttctcctcggcatgtgcaaccctctcctcgacatctctgccgtcgtcgacgacgctttcttgcaaaaatacggtatcaagttgaacgatgcgattctcgctgaggataagcacaaacctatgtatgaagaattggctaacaatcctaatgtggagtacattgctggaggtgctactcagaattcaatcaggttgctcagtggatgcttcaagcac

SEQ ID NO: 53166 - DNA, 257 bp, Glycine max
  unsure (1)..(257): unsure at all n locations; Clone ID: 701142610H1
gtgatggctaaggccaatgttgttatcaaccttattggaagggattatgagacaagaaactacagctttgaagaagtgcactatcacatggctgagcaactagcaaagatttccaaagagcatggtggtatcctgagatttattcaagtttcttgtttaggtgcatctccttcatctccatctaggatgctcagaactaaatcagctgctgnnnnnatgattttaagggaatacctgaggccacaatcttgaaactg

SEQ ID NO: 53167 - DNA, 256 bp, Glycine max
  Clone ID: 701142611H1
ggaaaaggtactaaatctaaagttggacgaaatgtggatccaaggattcagtttttggatcaaaggtttctctttgctggccttaatatctgtaatttccgctctggaacccgaactgggatcgacccgcgtcgtctttcagacaaagtatggagatattgaatttggtttctatccaactgttgcacctaaaactgtggaccacatttataagctgtgcgacttggaggctataacactaaccattctttcgggg

SEQ ID NO: 53168 - DNA, 259 bp, Glycine max
  unsure (1)..(259): unsure at all n locations; Clone ID: 701142612H1
tacagcgtgaagggaatacctggctttatgaacccaacctgaatacacttagagagaagctgcagctgcccattggttcatgtgaactgacagttcctttgaaagctaaagaaaatttttattcanaaaggccacaccgagaagcttatgcaaccatcctgcactctgcacagatgtatgtttgtggagccattactgcagctcagagtattcgcatgtcgggttcaacacgagatcttgtgattcttgttgatgaaac

SEQ ID NO: 53169 - DNA, 252 bp, Glycine max
  unsure (1)..(252): unsure at all n locations; Clone ID: 701142613H1
ctccagtggacagcatgttgactatgatcaacgccctgatatgtttagaggaactgttcgatatgctagtgttcatgctcatttggggagaactgctagtaganganntgatcttnaatccctngnatacaccctggtntnccttcanaagggccgattaccatggcaaggttatcagggtgatagnnaatcttcctngtttncaaaanaagnngggacatctccganacacttgcgntggnncncccccct

SEQ ID NO: 53170 - DNA, 251 bp, Glycine max
  unsure (1)..(251): unsure at all n locations; Clone ID: 701142614H1
cgactttggagtctttgaggtcaggtcacacctactacccgtttacttcacccagtcagtcagtctatgggcaactgctgctccgacgtcgctggcggccaatctgccatcggcggcaccgcgcgggcnacctcaatccggccaacgctcccaacgacgcngtcgatcgcttcctcaggtctcgnggntacaagnctttttnnaaaaangggntttnnnctnncnnnnngnaaccccncangnnnccctcc

SEQ ID NO: 53171 - DNA, 260 bp, Glycine max
  unsure (1)..(260): unsure at all n locations; Clone ID: 701142615H1
acctaacgcagcatcgctattctcttcattccatggctttgcccaaccagcaaaccgtggattaccctagtttcaaactcgttatcgtcggcgatggtggcacaggaaagacaacctttgtgaaaaggcatctcaccggagaatncgagaagaaatatgagccaaccatcggtgtggaggttcacccattggattttttcacaaactgtggaaagattcgattttactgctgggatactgctggacaggagaatttggtg

SEQ ID NO: 53172 - DNA, 258 bp, Glycine max
  unsure (1)..(258): unsure at all n locations; Clone ID: 701142616H1
ggtcaacatgccctaaagcatgtagacatgggaatgggtgctactgggactggttttgatgcaaggttccagaatgttgcaaccacccaacacctagtgtactatcagtaaaatgtgttggtgtgcaactctctgcgataaacaagggaggattaaagtatgtaagaatggttctacaataccgattatttcttccttccctgtccatctgctatgctacttnanccncccattttttcctccgngctgttaagaaaa

SEQ ID NO: 53173 - DNA, 255 bp, Glycine max
  unsure (1)..(255): unsure at all n locations; Clone ID: 701142618H1
gctgcttcaacataacaactgtgtttagccactctcagactgttgtggtttgcggaaactgccagactgtgttgtgccaaccaacaggcggacgggcaaggttaaccgaaggtgctcttgtggaaggctgagagagatattgtctanaattnancanaattaatataccatancggactcgnntccantcancnnctannaancgnnaatcttcatcattgacatcttaagtctggttnacaaaccattaaactc

SEQ ID NO: 53174 - DNA, 262 bp, Glycine max
  Clone ID: 701142619H1
catcccagtgccagttcttgcagcttccagttcatcccaaaataaacaagatagttagactgacttacaccaatgcgggaaatggcattttggcattgacatcaaatggtgatcatcttctttggaaatggcctcgtgataaccttaacttggatggcaaggcgactgcacaagtttcccctcacatctggcaatcaaggagtggcttgcaattgatgagcaataaactaacaagttcttacagtggagtcccagtttcctg

SEQ ID NO: 53175 - DNA, 258 bp, Glycine max
  Clone ID: 701142620H1
ctccttccttcaccttcttcccatacacccaaaggaaaaatcttccatctccactttcttttcaatggccactctctttaacttcaactccacccttcgcccctcttgttatcatccctcctcaccctcctcatcttatccccacttcttcaagacactctccacaactttcttgggccacaccgtaaccctcaaatatgctgccacttccgcaagcatccctccccgttcactctccgctcacatgtcagggacggt

SEQ ID NO: 53176 - DNA, 257 bp, Glycine max
  Clone ID: 701142621H1
gttcaactttcaacgccagttcacactctctgcttcgcgtgtaccaacaagtgcaagttcgaatcaatggccagcgctcagctcacagcaatagcgtcatcgatctctacggcgtcgtttgaagggcttcgaccttccgctgttcagtttgcttccacgggcagaattagaattggcaatctctcccaaaggtccttccggggcttggttgtcaaagccgccaccgttgttgcccccaaatacactgcgataaagcc

SEQ ID NO: 53177 - DNA, 253 bp, Glycine max
  Clone ID: 701142623H1
cagaatttcccaaatttctccactaccctatctcctttgctcctgaaactcccacattcttcaccagcaatgcacgatcttcaatacgaatgcagtttcgatatttgatatcggagtatcggtgtttgagcggctgaattggaattggaaaatgcttgaggcaatggaaagttcggtcaatggtgggttcacccatttgcagagctgtggagatagcagcgaagaagagttatcggtgcttcctcgtcacacc

SEQ ID NO: 53178 - DNA, 256 bp, Glycine max
  unsure (1)..(256): unsure at all n locations; Clone ID: 701142624H1
tttcctctgtctcctcctcaatcttcattgtcctgttctttcccttggtgacaaaccaagactaacacacacagaacatagcttgtgttggtgaggtgagaagataaagaaagaatggcattnnacaggaacaacacagaagtgtatggcctgtgacaaaaccgtttatctggttgataagttgaccgcggataaccgagttttccacaaagcttgcttcagatgccatcactgcaaaggaaccctcaagctgagc

SEQ ID NO: 53179 - DNA, 212 bp, Glycine max
  unsure (1)..(212): unsure at all n locations; Clone ID: 701142625H1
cgttctcgccatgccaatgttgtcttcgagaggctcatcgcttatctcgtatctgctttctcttgtgctgttctgtctgcgctttttctcaccaaccacatccatcatgatgataacaagccaattactttgttagcctctcgtgtgtctgaaactcttaaagtttggccngactggagccaagttggagacttgtgttggcaaggttattg

SEQ ID NO: 53180 - DNA, 257 bp, Glycine max
  unsure (1)..(257): unsure at all n locations; Clone ID: 701142626H1
ggttactgtcaatggnganggcggggttgtatcggcgccttcttaccttgnnccnnnggggtcgagtttgcttcctcacaaggcaagcaactatttcttgaatccattcagaatgganccatgganggcttctaaaagttggtttcctatttccaaacgcaatccgaggnngccttttgcggcctcgccagcctgtccatggtctcaatgctcttgccattgatcctggcagaaaatggaaaggacttggagatggt

SEQ ID NO: 53181 - DNA, 230 bp, Glycine max
  unsure (1)..(230): unsure at all n locations; Clone ID: 701142627H1
aaccatgaganacatcttgcacgttcagggaggccaatgcggtaaccaaatcggttccaagttctgggaggtgatctgcgacgagcacggcatcgatcccaccggaaagtacaacgaggaaggcaacagcagcatccaactcgaaaggatcaatgtgtattacaacgaggcctctggcggaaggtacgttccccgtgccgtgcttatggntctcgacctggaaccatgga

SEQ ID NO: 53182 - DNA, 146 bp, Glycine max
  unsure (1)..(146): unsure at all n locations; Clone ID: 701142628H1
gggctanctnccatggtgaagcttatgcttttctctgctctcatactcttntccttgcaagcanttgtgtntgtaanaccactgnattttcaanatnnantagagtcnntaacnagacaagagataagtnttgtnaaaacnatagt

SEQ ID NO: 53183 - DNA, 261 bp, Glycine max
  unsure (1)..(261): unsure at all n locations; Clone ID: 701142629H1
tctctctctctcaacaccgattccagaatattccgaacgtccatgttccatccgccgttcagatccagagaattgagttgatggggggtaacaattctaaggaggataataacnattggaggcagaattcatctgtgcgttcaagttcctctgcgtcttcttggggttcatatcctgacccccaatcaggttatggtcacgggggttacgcgtatgagccacaacagccttcttatcctacacagaagcannncaagccaa

SEQ ID NO: 53184 - DNA, 260 bp, Glycine max
  unsure (1)..(260): unsure at all n locations; Clone ID: 701142630H1
ggctggtttctccgttttgaaattcccatctgtttgcntgcactaatcctgcatccctcgaagcgngtttgannctaaaaccataaacctctgtctcgtcagatctccttcttccgttcagtaaacctgtccttcgatccgatctgatctattttccgaatccaaaanggcgacgatgacaagcttgatcggtctnatcaataagatccaacgngcctgcaccgttgtgggcgatcacgtggcgaggtngtcgctttggg

SEQ ID NO: 53185 - DNA, 257 bp, Glycine max
  unsure (1)..(257): unsure at all n locations; Clone ID: 701142631H1
gagagaagcgtcttaataaacgctcttctctgaaaaacctgatttcttctcttcttctcttctctttcgtttcgatcttcgatctctgaaaatgagagagtgcatttcaatccacatcggtcaggccggtattcaggtcggaaacgcctgctgggagctctactgcctcgaanacggcattcagcctgntgggcagatgnnaagtgatangantggnggtganggtgtncnaaccttcttnngtgaatggggggnag

SEQ ID NO: 53186 - DNA, 259 bp, Glycine max
  unsure (1)..(259): unsure at all n locations; Clone ID: 701142632H1
anggtacccccttcatctcagtttgatgaacttgatgattttncaatgggcagaagtcgtggtaatnataatganagtncaantngttttcttcctgatgnagaattagngatgaactctgctgctgcggctatnaaggaggcaatggatagagccgaagccaagttcaggcatgcaaaggaagttagggagagagagtattcaaaggctgctangagtaagaagctgtgcaatggaaaangtgagagactgtgcaaag

SEQ ID NO: 53187 - DNA, 263 bp, Glycine max
  Clone ID: 701142633H1
agagggtctcgttctccgcggaaccatgcgcgcccacaccgacgtcgtgacggcgattgccactcccatcgacaactccgacatgatcgtgacggcgtcgcgcgacaaatccatcattctctggcacctcaccaaggaggacaagacctacggtgtcccccgccgccgcctcaccggacattctcacttcgtccaggacgtcgtcctctcatccgacggtcagttcgccctctccggctcctgggaggcgagtccgctctggg

SEQ ID NO: 53188 - DNA, 259 bp, Glycine max
  unsure (1)..(259): unsure at all n locations; Clone ID: 701142634H1
cttgtctcaaagattaagccatgcatgtgtaagtatgaactaattcagantgtgaaactgcgaatggctcattaaatcagttatagtttgtttgatggtatctactactcggataaccgtagtaattctagagctaatacgtgcaacaaaccccgacttctggaagggatgcatttattagataaaaggtcaacacaggctctgccgttgctttgatgattcatgataactcgtcggatcgcaggcctttgtgccggcg

SEQ ID NO: 53189 - DNA, 257 bp, Glycine max
  unsure (1)..(257): unsure at all n locations; Clone ID: 701142637H1
gatcctgctaagcctccagccaaggcacaggtggtaggttggccacctgtgcggtccttccggaagaacatgttagctgtacaaaagagcgtcggagaagagaacgagaagaacagcagcagccctaatgcacnctttgtcaaagttagcatggatggagcaccttacctccgcaaagtggacttgaagatgtacaagagttaccgagagctctctgattctttaggcaaaatgttcagctccttcaccataggcaa

SEQ ID NO: 53190 - DNA, 254 bp, Glycine max
  unsure (1)..(254): unsure at all n locations; Clone ID: 701142638H1
aactgacgaggctcatttcggttctcttcttcttgctagtgatcacggtgggatcttctgcttctccacagcattggaganaaaaaagggttcgcgagccgtgcaagaagttggtgttttatttccacgacataatttacancggccacaattccaacaatgccacttccgcaattgttggaacacccgcatggggaaacaggaccatactagcggggcagaaccacttcggtgacttggttgtgttcgatgac

SEQ ID NO: 53191 - DNA, 212 bp, Glycine max
  unsure (1)..(212): unsure at all n locations; Clone ID: 701142639H1
cgccttctnctctccgacgatctcggattcgattttccggcgaagaagctgataagagaccttaacctttttccttctgaagatgtcaacatcgttcctcgccactccaattctcacgccaacaaaatcnccgagaaancgcttaggttcccaaacttagtgccttnagactcnggnatttccctcgacgacttggctcaccgcgctggcta

SEQ ID NO: 53192 - DNA, 251 bp, Glycine max
  Clone ID: 701142640H1
gcagaggttctaatggactttccccaacttacaatgacattacctgatggtcgtgaagaatctgtcatgaagcgcacaacactagtggctaacacttcaaacatgccagtggctgctcgtgaagcttcaatttatacaggaatcacattagctgagtattttagagatatgggttataatgtcagtatgatggcagattctacatctagatgggcagaagcattgcgtgaaatctctggacggctggcaga

SEQ ID NO: 53193 - DNA, 256 bp, Glycine max
  Clone ID: 701142641H1
gatagcaggaaccatattgctgaagtacttgcagcaaatgatgttgattgtgatgacttggaaaaagtaaaccatgctgatactatgctactcagtaattgcattgaagagattgtagcgtctgcaatttctcaccacctgatggagactaaacatccagaataccgaaatagaaaattagttatatcacacaagagtttgtcccatgtattgaatattttccaggaaagtgaaagtaatctggagaataaagatt

SEQ ID NO: 53194 - DNA, 256 bp, Glycine max
  unsure (1)..(256): unsure at all n locations; Clone ID: 701142644H1
cgtgaatcatcgttgttgtcaaagtttaatctctcattccgtgttttccccatcattttgggttgnctcggcattttaatggttctgtttctcgggtggctgaggaaagagaatttcttattttgatttcatggatgggtgtatatatattagttcgtcagatgatgacttggaggagatagatgatcaagggaggacacttccgcaatgggctactactactgtaaagagtttgataatggtggatggtctaggc

SEQ ID NO: 53195 - DNA, 255 bp, Glycine max
  unsure (1)..(255): unsure at all n locations; Clone ID: 701142645H1
ctggggaggtgagaatcaaactctcagagaagagcttcagagactttctgaagaatgcgagangcttacatccgaaaataattctatcaaggaagagttggagcggttgtgtggtccagaagcagttgctaacctggattaaacagcaacacatttcagttcctcagngnagtgtttgatggtacnggnaaatttnganngntccttaattangacgntctgcngcgggantttctccnnggcccgnccttctta

SEQ ID NO: 53196 - DNA, 260 bp, Glycine max
  unsure (1)..(260): unsure at all n locations; Clone ID: 701142646H1
cgccgctcgatgggaattgcgcttcaaggcgtctcgtagggctaatccgcctcacgagggtcaccaacggcacgtgcctttggngggccgaggccccctactgctggtcggcaaacggacggcgggcgcacgcgtcgcttctagcccggattctgacttagcacgaatatcttgttgtttggagcgatccgaangtaactctgtaaacatgttggtttaccaggacctccttacaggtgatgagcttctctctgactcct

SEQ ID NO: 53197 - DNA, 258 bp, Glycine max
  unsure (1)..(258): unsure at all n locations; Clone ID: 701142647H1
tgtgatgaaaatgaaggtccttgttttcttcgttgctacaattttngtagcatggcaatgccatgcgtacgatatgttccctctccgaatgaacactggctatggtgcccgtactccggaggtgaaatgcgcaagttggacgcttgctgtggaagcacacaacatctttggctttgagaccattcctgaagagtgcgttgaagcaacaaaggaatacatccatggcgaacaatatagatcanactccaaancagttaa

SEQ ID NO: 53198 - DNA, 258 bp, Glycine max
  unsure (1)..(258): unsure at all n locations; Clone ID: 701142648H1
gctcccaagggtttaacctttctggctgtgttaatatgcgtttcagcactgtcactgagtccttctgttgcgggggaagggnnaaataatggccttgttatgaacttctacaaggaatcatgccctcaggctgaagacatcatcacagaacaagtcaagcttctctacaagcgccacaagaacactgctttctcctggctcaggaacatcttccatgactgtgtgttcagagtgtgatgcttcacgttgtggatccac

SEQ ID NO: 53199 - DNA, 264 bp, Glycine max
  unsure (1)..(264): unsure at all n locations; Clone ID: 701142649H1
ctcctcttttccatccatttcattgttatcatgtcaagttccttacccacaaatagtgatgaagtgtttgcaaaacagtctccaatgtctccatccacaaaacccgtggaaaaaatcacccaactacacttctatttccataacaacgtaacggngaaaaacccaactgctatgagaattgttgggcctcccaagggcttcattactcagtttgggactgttgtgatgatggatgaccctctaactgaaggaccaagtccaagt

SEQ ID NO: 53200 - DNA, 259 bp, Glycine max
  unsure (1)..(259): unsure at all n locations; Clone ID: 701142650H1
ttctggatcccagccttcctcggtggaaagtgctaaaccaactgaagtgagaagaatatttaccatggggctcccatttacatctcaacatggaggtcaaatactctttggacccgatgatgggtatttatacttaatgatgggatatggaggaggtgctggtgatccttacaattttncacaaaacaagaaatccttgcttggaaagattatgagacttgatgtagacaacatcccaagtgcagcagatattagtaac

SEQ ID NO: 53201 - DNA, 257 bp, Glycine max
  Clone ID: 701142651H1
tttactatagagatatgttatgtgatttcttttcttttggaagattgcttaatcattcggtcctcctattaattcatgatttatttttttgatttcaaatgtccttttcctttgattgtgtgattgatagattgtaagtcatatttgggccccgtattgatatttttacttccaaatgagtgaggtgattgaaaagattacaagcactatagcgctgtggatgacaatcctctgcagttctctgcagagtgatcaaa

SEQ ID NO: 53202 - DNA, 254 bp, Glycine max
  unsure (1)..(254): unsure at all n locations; Clone ID: 701142652H1
gangttattattgggagcttgaatccaaatgataccaggggaaagaccgttacttgcaaagctgccgtggcatatggtcctggagagccctttgtggtggaacgtgttctngttcatcctcctcagaaaatggaggttcgaatcaagatcctcttcacttcaatctgccacaccgatctcagtgcttggcaaggcgagaatgaggctcaacgtgcatatcctcggattttcggccatgaagcttccgggatgtg

SEQ ID NO: 53203 - DNA, 257 bp, Glycine max
  unsure (1)..(257): unsure at all n locations; Clone ID: 701142653H1
cgccatcgnccgagagaagcgtgaganacttctcgttnatgatgagagctaagatagtttagttgtcnagtcataaatcagtatcatcactttaaatttcattagnagctgtcaaaatgtcacggaagggtttgatggagcaagacctgagtaagtnggatgtaacaaagttgcatccactttctccagaagtcatatctcggcaggctactattaatatcggcactataggtcacgtggcccatggcangtcaaca

SEQ ID NO: 53204 - DNA, 247 bp, Glycine max
  unsure (1)..(247): unsure at all n locations; Clone ID: 701142654H1
caaatttctaatgcacagcctgatgatcttattgatttttaccatctgaanagcaggaagggtatgagccaacttgagctggaagatgaggttcaagacgatctcaaacgtgctactggggagtttacaaaggatgcagatgatgcaaataagctcaatcgcattcttcagctcactggattcagtgatcctgtttatgctgaagcatatgtcacagtgcatcactatgacattgtccttgatgtta

SEQ ID NO: 53205 - DNA, 191 bp, Glycine max
  unsure (1)..(191): unsure at all n locations; Clone ID: 701142655H1
gtatacttctcattttnctcaatacaatcattntnctttctgtcncaagtnatgnnacttttcgcttctgnaaccatagttcacatattatatnatcanatatnatagtnntatcatancacaatgtgtggcntacttgcngtgcttggntgctctgattcaacncaagncaaaagggtctgcgtcctgag

SEQ ID NO: 53206 - DNA, 148 bp, Glycine max
  unsure (1)..(148): unsure at all n locations; Clone ID: 701142656H1
gcaaanagcttcacttcacactctactcccaaaatggnggctgctacgangtcgtattcttccgcaatcgccgcatacgtcccgataccctagccaaacctgcttccacacaacatacgatnnnnananntntggnttttgnannant

SEQ ID NO: 53207 - DNA, 254 bp, Glycine max
  unsure (1)..(254): unsure at all n locations; Clone ID: 701142657H1
ggattcatacctgatagtttggcatcttcgaatttgaagcttgtgctattgaatggtaatttattggaaggacgagttccagagcaactttattcggttggtgtgcatggtggagctattgatctctctggcaacaagggattgtgcggcgtaccatctcttccatcatgtcctatgttttgggagcatggtagattatccactcgggnnnnaattgcaatagccttgtcatgtctctttgttttctgtgtggt

SEQ ID NO: 53208 - DNA, 255 bp, Glycine max
  unsure (1)..(255): unsure at all n locations; Clone ID: 701142658H1
gtgtccaactttgaacgcactttgatactgccactttctccacaanatatannannccanagagangaaaagcgaatcccctgtgatctctcacacaatnnnaattncctatggatnngngnctngatggntagatntcgaacatgagtactggggagcttctcancatcncaacctntcgaantcaagttannctttgagtgangaagcagatctcatgntggttcatngtcaataggacnganantatgtagc

SEQ ID NO: 53209 - DNA, 251 bp, Glycine max
  unsure (1)..(251): unsure at all n locations; Clone ID: 701142659H1
ccatacactctgctcgtagggtttctccacctagacggaaatggctcccaaacccgcctagtacgggtctgtttgttggactgaacaagggtcacgtcgtcaccaagaaggaattgcctccacgcccctcagatcgtaaggggaaaacaagcaaganggtgcactttgtgaggnacctcataagagaggtagccggttttgcaccctatgaaaagcgtataactgagttgctgaaggttgggaaggataag

SEQ ID NO: 53210 - DNA, 256 bp, Glycine max
  unsure (1)..(256): unsure at all n locations; Clone ID: 701142660H1
cgttttctgcgtcatctccgattccccgacaatggccacccaaatgagcaagaagagaaagttcgtagctgatggagtgttcttcgctgaactgaacgaggttctgacaagggagttagccgaggacggatactccggcgtggaagttagggttacgccgatgcgcaccgaaatcatcatcagagccaccagaacccnagccgttctcggtgagaagggaaggagaatcagggaattacctcggtggttcagaaga

SEQ ID NO: 53211 - DNA, 257 bp, Glycine max
  unsure (1)..(257): unsure at all n locations; Clone ID: 701142662H1
gcttctaancctctctctcgtggatcancaactgnggaatcanaggggcaagctgagaagtgtgccaagacaaagaggaagaaccagtatcgtggaatccgtcagcgtccatggggaaagtgggctgctgaganccgtgacccaagaaagggggtncgtntttggctggaactttcagcactgctgaagaagctgcaagagcttatgatgctgaagcaaggaggatccggggcaganncccaagntgatttccggtt

SEQ ID NO: 53212 - DNA, 258 bp, Glycine max
  unsure (1)..(258): unsure at all n locations; Clone ID: 701142663H1
ctgctctttgaagaaagangggtctttgcttgattttggagatgtctctgctctcagatctcatcaaccttaacctctccgataccaccgagaaggtgatcgcagagtacatatggatcggtggatcaggaatggncctgaggagcaaancanggnctcncccaggaccagttancgacccttcanagcttcncaagtngaagnatnatggcncgngcananctntgagncggtnatgnnttttaccccnaccncccc

SEQ ID NO: 53213 - DNA, 262 bp, Glycine max
  Clone ID: 701142664H1
gttcaattctttctctgtcgtcgctctttcttcaacttcaagcttaattcctcatgtcttcagaggcctcagccggccaaatgccacatcaggcatgggtgttgctgatcacagcaaaaacaccttcatggaattgaagcagaagaaggttcatcgttatgtgatcttaaggtcgatgagaagaaaagggagttgtggttgagaagactggtggcccggctgagagctatgacgattttgctgcatctttgccggagaatga

SEQ ID NO: 53214 - DNA, 266 bp, Glycine max
  unsure (1)..(266): unsure at all n locations; Clone ID: 701142665H1
ggcaccactgccataantcccttccctattgtaatttctgccagcctncaaaaaaagacttgctctgcctctgccactctctgagtaggactacactgccatggctgcctcagtctccactgttggagctgtcaacggagctccactgagcttgaacagctctggagctggagcttcagttcccagttcagccttctttggcaccagcttgaagaaggttattgcctcaagggtccctaacgtcaagatttcttctggaagtttca

SEQ ID NO: 53215 - DNA, 258 bp, Glycine max
  unsure (1)..(258): unsure at all n locations; Clone ID: 701142667H1
ttcacgagaganacacgaaaatctttcgattccncgacagaaaaaaacttgggacggtgaaattggagggttttccgggatcccaaggccgaatcttgattcaatttacgaaaagagaacaccatccgttgctgaatcttgaagccgaatcaaatcgtnnnnnnnnnnnnnnnnnnnnnnnnnngcgaatagcgtttagagagagaaaggtgaagtggggttgtctaaagtttgggtcttgtgtttgttgtgtgtggt

SEQ ID NO: 53216 - DNA, 255 bp, Glycine max
  unsure (1)..(255): unsure at all n locations; Clone ID: 701142668H1
cttcaggccagaatttttgaatagattggatgaaatgattgtcntcaggcagctcacaaaactggaggtgaaggagattgctgacataatgctcaaagaggtgtttgatagactgaaggtgaaagatattgaacttcaagtgacaganagattcagggacagagtggtggaggaaggttataaccctagttatggagctagacctctaagaagagccataatgcgacttttggaggacagcatggctgagaagat

SEQ ID NO: 53217 - DNA, 255 bp, Glycine max
  unsure (1)..(255): unsure at all n locations; Clone ID: 701142669H1
ggcatatttaggatggagagtacttgtggtacatgtaaggnaactggcaaaattgtatcgaatttctgcaagtncatgcaaaggtacaaaggttatcaaaggaacgaaatctgtcaaattggatattatggctgggattgacaacaatganactataaaggtttatagaagtggtggtgcagatcctgatggagataatcctggtgatctttatgttaccatcaaggtcagggaagatcctgtcttccgtagaga

SEQ ID NO: 53218 - DNA, 250 bp, Glycine max
  Clone ID: 701142671H1
ccgccttctctgaattgtaaaaatgtcgctcggagaaactgcttgttcatacgcagctctcatccttcatgaagatggaatcagtgtaactgccgacaagatcagcaccttgttggaaactgcaaaggttcaagtagatacctattggccaaccttatttgctaaacttgctgagaagaaaaatcttggcgatttgatagccaatgcagcaggcggtggtgcaccagttgctgttgcagctgcccctgtt

SEQ ID NO: 53219 - DNA, 247 bp, Glycine max
  unsure (1)..(247): unsure at all n locations; Clone ID: 701142673H1
gcgagatagagtttcttacggacgacgacgtatccattganatctcgacggtggctttcgatccgccaccgtccgatctcctcctccgtaactgacgacggtgtttcgatatcttanatctctctctagccacaggtgatttgaaacagttcttcctggtctaaaggngtactggngtgatntggangtcaacattggctaaggagcttacatntgcnggtgggtacgntcactgaactggtgngcc

SEQ ID NO: 53220 - DNA, 133 bp, Glycine max
  unsure (1)..(133): unsure at all n locations; Clone ID: 701142676H1
cgcagtcatcttcattcattcgttgnnaatgatagctngcaggnctctnatcggagnggagcgagttctcaagtnnnnccannacttatgtggcancaaggccttattgctttcanggtcagancgcttatca

SEQ ID NO: 53221 - DNA, 103 bp, Glycine max
  unsure (1)..(103): unsure at all n locations; Clone ID: 701142677H1
cgagntcgagcctcggannaggggatcgnagcgaagtccactatgccgaagcnaattcangagactanagacctttccncctcactgcaaggangnaggatnc

SEQ ID NO: 53222 - DNA, 255 bp, Glycine max
  unsure (1)..(255): unsure at all n locations; Clone ID: 701142678H1
gcgcagtcatcttcantcattcgtngggaatgntagcttgcaggtctctcatcggagtggagcgagttcctcaagtttaccaatacttatgtggcatcaaggtcttattgctttcagggtcagagcgcttatcattgcttaagctgcaattttatgatgagtggtaganagaagaaaatatgtcttgaagaccatagcatcaaacagnagaaatgatnatatctggagacaattgccacnatggctagttctggg

SEQ ID NO: 53223 - DNA, 57 bp, Glycine max
  unsure (1)..(57): unsure at all n locations; Clone ID: 701142680H1
aagaaanntcaatagagctatntaagggaaaatgtcnggganatacaaggatctgnt

SEQ ID NO: 53224 - DNA, 259 bp, Glycine max
  unsure (1)..(259): unsure at all n locations; Clone ID: 701142681H1
cattttctcactccccatcttctgagagtgatgggtgtttgctaccnctgttcccacacctcccannnnnnnnnnnnnnnnnnnnnnnnnttcttccgccacaagccttaganttatactattcccaccctccctctttcttcaacaacnaccgttgacttcactacagtcacgtggtctttctctgaggatccaaccatggcggctggaactgtcttctgcgctgctgctactgtgcttctaatttgacaacaaccac

SEQ ID NO: 53225 - DNA, 236 bp, Glycine max
  unsure (1)..(236): unsure at all n locations; Clone ID: 701142682H1
gcagtgcagtggtnctactactacngcttcttgctgcttacactctcagatggctcgtgangccacctacacagttggagattctgggggttggacctttaacactgttgcctggcccaaaggaaagctctttcgggctggtgacacacttgctttcaattatagccctgggactcacaatgtggtggccgtgaacaaggtggatatgatagctgcaagactccaagaggagccaa

SEQ ID NO: 53226 - DNA, 254 bp, Glycine max
  unsure (1)..(254): unsure at all n locations; Clone ID: 701142683H1
agtgcttctctcctctgtctttttctctctcttgctatccttttggctagtngcactgctgcaagtgcaactccaagaagcgcagtgccaagccaccatgtttcaacattcaacagaagcctttttccttccacttttctctttgganttggttcttctgcttaccaggcagaaggagcagcaagtgtagatgggagaggaccaagcatatgggacacctacactagacagcatactgaaaagatttgggatca

SEQ ID NO: 53227 - DNA, 219 bp, Glycine max
  Clone ID: 701142684H1
tattcacattagatcagactatggatcgcccaacactatcatcattattttcattcctactaacacttcatctatcattatcaggggtaatttcaacaacattcactctagttaacaaatgtgactacaccgtgtggccgggaattctttccaatgcgggtgttcctcctctttcaaccaccggcttggttctccaaaccggcgcctccaccacaatcg

SEQ ID NO: 53228 - DNA, 253 bp, Glycine max
  unsure (1)..(253): unsure at all n locations; Clone ID: 701142685H1
cagtaatctgagagagaaacaaaaacaatgaaggtttccattgccaagttccactcccttcccctatnttttttccttctcttggccttcaacacaaaacccctccnagcagcagaaccagagccagtggttgataagcaagggaaccctttggagccaggagtagggtactacgtgtggccactttgggctgatgaaggaggcctcacactaggccaaacaaggaacaagacatgccctctttatgttatcc

SEQ ID NO: 53229 - DNA, 70 bp, Glycine max
  unsure (1)..(70): unsure at all n locations; Clone ID: 701142686H1
ggaaaaaaaaaaaggatgnagatgangcaaataagctcnaatcgnattcttcagctcactggattcagtg

SEQ ID NO: 53230 - DNA, 241 bp, Glycine max
  unsure (1)..(241): unsure at all n locations; Clone ID: 701142687H1
ttgcggctgaggattccgaacgagtgaccttcttcgtttctcgcaaagttnaagtaatcatgggtaaggaaaaggttcacatcaacattgtcgtcattggacatgtcgactctgggaagtcaactaccactggtcacttgatctacaagcttggaggtattgacaagcgtgtgattgagaggttcgagaaggaggctgccgagatgaacaagaggtcattcaagtatgcctgggtgctcga

SEQ ID NO: 53231 - DNA, 251 bp, Glycine max
  unsure (1)..(251): unsure at all n locations; Clone ID: 701142688H1
caaggatttccaatgaagcagggagtgctgactcctggtcgtgttagacttttgcttcacaggggaactccttgcttccgtggatatggaaggcgtaatggagagcgtaggagaaagcgcgttcgtgggtgcattgtcancccagacctctctgtttngaacttggtaattgtgaagaaaggtgagaatgatttaccaggattgactgatgttgagaagccaaggatgagaggcccaaagagagcatccaa

SEQ ID NO: 53232 - DNA, 254 bp, Glycine max
  unsure (1)..(254): unsure at all n locations; Clone ID: 701142690H1
cgcacactgaattcaaaaacatcgaaagagagaggcatggccgagcaaaccncnctcatgatcaagccagatggcgttcaaagaggccttattggcgagattattagcagatttgagaggaagggtttttacttgaaagggttgaaactcgttactgtggaccgtccttttgctgagaagcactatgctgatttgtctgcaaagcctttctttagtggtttggnggataacattgtctctggccctgttgttgc

SEQ ID NO: 53233 - DNA, 226 bp, Glycine max
  unsure (1)..(226): unsure at all n locations; Clone ID: 701142691H1
tgaagccatcgatgctcagatctctccactccgccgccacccgcggcgcctctcatctcttccgccgtgggtacgcctccgagccggtgccggagcgcaaggtagccgttctcggcgccgcngcgggatcgggcagcctctctcccttctcatgaagctcaatcccctcgtttcgagcctctccctttacgatatcgccggaactcccggcgtcgccgccgatata

SEQ ID NO: 53234 - DNA, 241 bp, Glycine max
  unsure (1)..(241): unsure at all n locations; Clone ID: 701142692H1
ctcactttaactattttcacaaaccatagaaaaatcaataattttntttttacttgtaacatgtcttcctcagagggtgtctttgaacagggaattgagttctcagaagccaacaatgttcttctcatgtctctaatggcngangagcaggtggaagagtacatggcgatgatagactngtgagcatgattcaatcatgggaggcnggatccctgacangaatgggncaatgttganangg

SEQ ID NO: 53235 - DNA, 256 bp, Glycine max
  unsure (1)..(256): unsure at all n locations; Clone ID: 701142693H1
gcaagaccattggaggaaggtcttgccgaggccattgacgatggcaagattggaccaagggatgaccccaagattcgctccaagancttgtcagaagagtttggttgggacaaggatctcgccaagaaaatcttgtgctttggccctgagacccttggacccaacatggtggttgatatgtgtaagggagtccagtatttgaatgaaatcaaggattctgtggttgctggancccagtgggcatcaanannngctt

SEQ ID NO: 53236 - DNA, 256 bp, Glycine max
  unsure (1)..(256): unsure at all n locations; Clone ID: 701142694H1
taaagccgtgggtctattaatgaataaggctgagcagcccatccatctgaaagtttctgcttccatgcctcttttgctatgacaganaattgatgttggattttgctggaccagcaggaacctgttaatattttatacgcctctgagcatcatctacatgagataaatgccatttatcttttgtcttttgtttacatttgttgaataaaggaagtgctgctttgtgttccacgggaacaatggagangtacaagtt

SEQ ID NO: 53237 - DNA, 254 bp, Glycine max
  unsure (1)..(254): unsure at all n locations; Clone ID: 701142695H1
gaacatgagcatctccggcactccggaaagcgtggtatcgctactgagataatattatccctccgctttttcatttatcaatatggccttgtttatcacctttcaatcactgataagactcaaagtgttttggtttatggtctttcttggatgataatctttgtaatattgggtttaatgaagggtgtatctgttggcaggcgccgnctcagtgctancacttctatttcgatggancggggtcnatttctaac

SEQ ID NO: 53238 - DNA, 260 bp, Glycine max
  unsure (1)..(260): unsure at all n locations; Clone ID: 701142696H1
tgatctttctcctcagttgcccaagaaagtttacggtgccaatggtggcncctactacgcatggtccccctccgaccttcccatgctccaccaaggcaacattggtgccgctaagcttgctctcaacaaaaacgcctttgctcttnctcgttactctgactcttccaaagtcgcttatgttcttcaaggtagtggagtggctggaatagnnttgcctgaatcagaagagaaggttgttgcataaagaagggtgatgcttg

SEQ ID NO: 53239 - DNA, 262 bp, Glycine max
  Clone ID: 701142702H1
cttcctttctaattctttctttctctttcgttagttagggttttccaaatccatcgtcgttttcaacccttaacgacgccgtttcaagatgatgcccccgggactcgtttccaatctccaagaagtgcttctcaaccgaaaaggcgattccaattcgaattcgaattcaaataatgcagagcagcatgaacaatccagcgagaactcggagcctgttgaattcgacgcctcgaagccaattgtgttggtgacgaacagtgat

SEQ ID NO: 53240 - DNA, 260 bp, Glycine max
  unsure (1)..(260): unsure at all n locations; Clone ID: 701142704H1
atttcattcaattcaatgtaaaaaaacacagtagccacccaatacataaaatttgtttatgctttctacacgcacttcctccntcgtatccgtctcttccccaaccattggaatacattccttaacccaccgcaaatccaaatccaaattcaattcgagctgaacctagggtttgttccttcctattgccttcacggatctcgcattctcctcaaatttccgaaacgggaaaaagaaaatgcacgcgaaatcggcgcagt

SEQ ID NO: 53241 - DNA, 259 bp, Glycine max
  unsure (1)..(259): unsure at all n locations; Clone ID: 701142705H1
cttcctcacccctttctccatctaacgagtaaggaaaaatggcncgtaagaagatcagagagtatgactcaaagaggttgttgaaggagcactttaagagactttctggcaaggagttgccgatcaagtctgcacaaattactgcatcaactgatttcactgagctacaagagaaggaaccctggctttcatcttctaaattggttgtgaaacctgacatgttatttggaaagcgtggcaaaagtggtttggttgcctt

SEQ ID NO: 53242 - DNA, 260 bp, Glycine max
  unsure (1)..(260): unsure at all n locations; Clone ID: 701142706H1
ctgatatcttttacgtgcccatcaaacaaataagctctccactctatttcagttcaccaattcaccaatgactccttctttcactaacgtcaaaatcttctcttctctcgtcctagacggattcttcaacgctctcaccagacgcgggtacgngtggcatcacaaagcgcaacaaaggaaggagtgggctttatgagcggcaagatggcaccaaagtcaggggaagacaacaaaggggtgtctacgtacaaggtttcgtg

SEQ ID NO: 53243 - DNA, 259 bp, Glycine max
  unsure (1)..(259): unsure at all n locations; Clone ID: 701142707H1
attgctagcaatggcgaggatcaaggtttacgagctgaggcagaagacgaaggctgatcctgctgaatcaactgaaggacctgaaggcggagttgccttgcttcgtgttnctaaggtcaccggtggtgcccctaacaagctttccaagataaaggtggtgaggttgaacattgcccaggttttgacggtgatttctcngcagcagaaggctgcgttgagggatgcctacaagaataagaagtacttgcctctcgatctc

SEQ ID NO: 53244 - DNA, 257 bp, Glycine max
  unsure (1)..(257): unsure at all n locations; Clone ID: 701142708H1
ctcctctctctgcatcgctgcgttttccgaatcgaaaggtgangttagtaagtaacaatggtggagaaggccaagggtaggaaggaggaggttgtcactcgagagtacaccatcaacctccacaaacgcttgcatggctgcacatttaagaagaaggctcctaaagcaattaaggagataaggaagtttgctcagaaagcgatggggacgatgatgtaagagtggatgtgaagctcaacaaggctgtgtggagccag

SEQ ID NO: 53245 - DNA, 258 bp, Glycine max
  Clone ID: 701142709H1
ttctatctcactttcatactcacccttattgcagtattttgacctcaatggcaccaagttcggcagtgccagatgaacaggttgttgttggagaggagatagagcatgtaagagtgatcactttgaacaggccaaggcaattgaatgccatctcaccagaattggtttctctgctagcaacatatttggaaaagtgggagaaggatgaggaagcagagctagttatcataaagggatctggtagggctttttgcgctg

SEQ ID NO: 53246 - DNA, 257 bp, Glycine max
  Clone ID: 701142710H1
gaagaagggaaagtagaaaagtaaaacaagttacaataataatttaccagaaataaaaatgaaaatcctaagaaaaatgcgatataacttttatatttgtgttattatagattatggatagactattatacattagttagatagattctaaatacctccaattttgaaatatagtcgccagtgaagcgaggccacaatgtcattgtcccctacttcagcactggtgggttaaaggggtcttgaaattggcctctcac

SEQ ID NO: 53247 - DNA, 237 bp, Glycine max
  unsure (1)..(237): unsure at all n locations; Clone ID: 701142711H1
ggnctgttctagtgtcactgtacgctgtgattttgctnccannattttgatcttttntatttcggaagaaattttagatgcatgagacttaagtgatcctttgcnttcagcttctgaanagttttaaatcttgagtttgtggaaatcggtctcctggnttccagatttgctgtgtttncgatctgtttatcnatccaacttcatcganattagcatctagagagagataaaatttcc

SEQ ID NO: 53248 - DNA, 256 bp, Glycine max
  unsure (1)..(256): unsure at all n locations; Clone ID: 701142712H1
atccctagctctgtcgttccgtcgttgacgatggcgtttcgggtgcgaancctggacctcccgctctctctttcttctctctctcttgtccatcgcttccgccaatgtcttcttccaagagcgttttgatgacgggtgggaaaatcgatgggttaaatcagattggaaaaaagatgagaacgtggctggggagtggaaccacacctctggtcantggaatggagacgctaatgacaaaggtattcaaaccagtgag

SEQ ID NO: 53249 - DNA, 214 bp, Glycine max
  unsure (1)..(214): unsure at all n locations; Clone ID: 701142714H1
aggccgcacggtggcatatttggacaccaccggaagccctagaggcccattagacatgaagatgatgcaatgcatgcatccaagaggcttaaaaaactatgatgcttggtggtgttggtcttggaattgtagtgggctcttgatnaaattccaacgaggttggctggcacgtgnaagttttggccccaaaaccacggccgttttggcaaccttc

SEQ ID NO: 53250 - DNA, 252 bp, Glycine max
  unsure (1)..(252): unsure at all n locations; Clone ID: 701142715H1
gggggcttctgcttctggttttgttagttccgagttgccttttgagggaactcaagtagtcaagttcaagcttcctactacttctttgtctcacgttttggggttgccagttactgttganatcataatggattccccacaatctgttgtgtcacccttcaggagctcagtgttgggtgagagtgagaagcacaagtctgatgttttcccaggaaactctagtcctttttccaaggacattgaagtgaatgg

SEQ ID NO: 53251 - DNA, 251 bp, Glycine max
  unsure (1)..(251): unsure at all n locations; Clone ID: 701142716H1
aagtttcacttcagccttatccggtttagggtttcggtttttgacccaacctttgacgtatcgaaaccttaagtttcggatncaggtctgagcaatctggttggtagaacctttggtcttagagagtcaagttttatgtctgaattagacgatcaaattcctactgccttcgatcctttgctgatgcaaatgctgatgactcgggtgctgggtcaaaggagtatgtgcatattcgcgtacagcagcgaaat

SEQ ID NO: 53252 - DNA, 258 bp, Glycine max
  Clone ID: 701142717H1
gagcgatccgagaaaaactctgtaaacatgttggtttaccaggacctccttacaggtgatgagcttctctctgactccttccgttacaaggaaattgagaatggaatgctgtgggaagttgaggggaagtgggttgttaaaggagcagttgatgtagacattggtgcaaacccttctgctgagggtggaggagaagatgagggagttgatgatgcagctgctaaggttgttgacattgttgacacattcagacttcag

SEQ ID NO: 53253 - DNA, 256 bp, Glycine max
  Clone ID: 701142720H1
tccagttccaggattgaagtagaagagttgtttccacattcacatggttacggctacactgatttgaactacttttgatgaatgcctaattgtctataattcttattccatgagatcaactaggctatttgagggaactgaaacagtttagtgtataacacaaggtaggcaatacagtgagtgagcaattgccagccacaatgatgatcgagacattctgttatcctcactttcaaacaagctgcagagtttgtgg

SEQ ID NO: 53254 - DNA, 256 bp, Glycine max
  Clone ID: 701142723H1
gggagaagcttctcacatcccttcgtcaacacctctccgactcttctcgttctctccatggcttcgtcctccttcaaggtggcgaggagcaaacgcgttacgacaccgatcacttggagctcttcaggcaagagagttacttcgcttacttgtttggagtcatagagcctggattctatgcagcttgacgttgcaactgggaattctatcctatttgctcctaggttaccttctgagtatgctgtttggttggggg

SEQ ID NO: 53255 - DNA, 255 bp, Glycine max
  unsure (1)..(255): unsure at all n locations; Clone ID: 701142724H1
ataagtccctccttcctctgccttataattcttgtgacccttttngctggtagcattgaaagtgcaccagcaaacgtgaagccaagccattatgctgcacccttcaataggagtgtttttccttctggttttctatttggaataggctctgcagcttaccagatagaaggagcagcagctatagatggcagaggaccaagtatatgggacactatactaaacagcaaccagggaagatttgggatcatagtgatg

SEQ ID NO: 53256 - DNA, 256 bp, Glycine max
  unsure (1)..(256): unsure at all n locations; Clone ID: 701142725H1
ggaatttcgatgctcagtcatctcttttaccattctcttctctcttgctcttgcaggagagagccatgtccatgcatcgctacctgaggaagattattgggaagctgtttggccaaacactcccattcccactgcactgcgagagcttctaaancctctccctgcaggtgttgaaatcgatgaactccctaagcaaattgatgatacacagtacccaaaaacattcttctataaagnagaccttcatccaggcaaa

SEQ ID NO: 53257 - DNA, 122 bp, Glycine max
  unsure (1)..(122): unsure at all n locations; Clone ID: 701142726H1
anngctggggatttgatacgtaagtggattgtccatccattatcattnatcaatctgcacctctgcactntgcactgagaanagaagnagtgatggnaagggcggcactggttcgtnntctg

SEQ ID NO: 53258 - DNA, 256 bp, Glycine max
  unsure (1)..(256): unsure at all n locations; Clone ID: 701142727H1
cctcagtttctttcttcaacgtttccatcatacacagatccnaatcctctctcaagccctaatntcccctcatttccatggccacagaaganggnactgtcgcggtggaacccgctcccgaacctgcctccgccgatcctcccccggaggagaaggaggagaccaaacctgaagccaaggctaagaaaaccaaggagcccaaacctaaaaaggtttccagacctcgcaaccctcccactcatccttcctacgaaga

SEQ ID NO: 53259 - DNA, 253 bp, Glycine max
  Clone ID: 701142728H1
acctttctggctgtgttaatatgcgtttcagcactgtcactgagtccttctgttgcgggggaagggcaaaataatggccttgttatgaacttctacaaggaatcatgccctcaggctgaagacatcatcacagaacaagtcaagcttctctacaagcgccacaagaacactgctttctcctggctcaggaacatcttccatgactgtgctgttcagagttgtgatgcttcactgttgctggactccacaagaa

SEQ ID NO: 53260 - DNA, 253 bp, Glycine max
  Clone ID: 701142729H1
ggaaccccttgagcagtcaacgtttcaaaccattcgaatggaagccttgaggttggcgtatctcctaccttccctggtggttggtgttttcgacagcagaatcggcgtgcaaggagggctgtggagtggcactaggctcctactacttatggcggggctccaacctcacctacatctcctccatcatggcctccagccttctgacaactccggacgacatagtcaactacaacaaggacaccgtgcccagcaa

SEQ ID NO: 53261 - DNA, 250 bp, Glycine max
  unsure (1)..(250): unsure at all n locations; Clone ID: 701142730H1
ccctgatcttctgtgaagggttcnagtgagagcatacctgtccgggacccgaaagatggtgaactatgcctgagcggggcgaacagaggaaactctggtggaggcccgcagcgatactgacgtgcaaatcgttcgtctgacttgggtataggggcgaaagactaatcgaaccgtctagtagctggttccctccgaagtttccctcaggatagctggagcccgcgggcgagttctatcgggtaaagccaat

SEQ ID NO: 53262 - DNA, 250 bp, Glycine max
  unsure (1)..(250): unsure at all n locations; Clone ID: 701142731H1
gggaacaggtggccaagacaagagantttggctttgttgaagatacggtcggatatggacgtggcttttagagacgcaagtgtaaagggtcccttgtgggaagaggtttctaggaaacangcagaccttggctaccacagaaatgccaagaagtgcaaagagaagtttgagaacgtttacaagtaccacaagagaaccaaancaggtcgaagtgggaaatcagaaggcaaaacttatcgcttcttgatca

SEQ ID NO: 53263 - DNA, 254 bp, Glycine max
  unsure (1)..(254): unsure at all n locations; Clone ID: 701142732H1
gcagncagcagcagcaacaacaagagaagaagatggctctgcaactatgggagacattgaaggaggccatagttgcctacacggggctctccccgcccaccttcttcacccttctggccctgatcctagccctatactacgtcgtttctgggctcttcccctcttccnaccaccgccacaacaccgcctcgcgcgacttggagccccagatggagcctctgcgaccccccgttcagatcggcgaggtcaccgag

SEQ ID NO: 53264 - DNA, 255 bp, Glycine max
  Clone ID: 701142734H1
cggaaagtgagggaaagacaaaatcggttttatgaatcggattgattgtttaattttcctttgataatctcaattacttagtacctgtaatgagcaggcttgtatggaccctcaacaggcacactgatgtaatcagcctgggccgggctaagcttggtgagcttagctccaagtttgccaaggtgaagtgcagccaccttctcatcaaggtgcttgggcaaaacgtaaactttcttctcgtacttgccggtactc

SEQ ID NO: 53265 - DNA, 248 bp, Glycine max
  unsure (1)..(248): unsure at all n locations; Clone ID: 701142735H1
caacacacacactgtgtttgtgaaactctctctcacacacaagttcacannaacaacttgtgttgttccaatggcatcagcaacaccccttttgaaagatgagctcgacatcgtgatccccacgatcaggaatctggatttcttggagatgtggaggccattctttgagccttaccatctcataattgtgcaagatggtgacccttcaaagaccatcaaggtccctgaaggcnnnnnctatgagctct

SEQ ID NO: 53266 - DNA, 245 bp, Glycine max
  Clone ID: 701142736H1
cccgcagcgatactgacgtgcaaatcgttcgtctgacttgggtataggggcgaaagactaatcgaaccgtctagtagctggttccctccgaagtttccctcaggatagctggagcccgcgggcgagttctatcgggtaaagccaatgattagaggcatcgggggcgcaacgccctcgacctattctcaaactttaaataggtaggacggtgcggctgctctgttgagccgcgccatggaatcgag

SEQ ID NO: 53267 - DNA, 254 bp, Glycine max
  Clone ID: 701142737H1
agcgcagtttcgttccacgttgttgttcgctctgtgtctctcactctctctatatttgcatcattcatcggaaatggctctcgaggttgctgttaaggctgctgttggggctccaaatgttctcggagattgtccattttcccaaagggtcctcttaactttggaggagaagaaaatcccttacaaactccacctcatcgatctcagtaacaaacccgaatggtttttgggtgtgaatcctgaagggaaggtgc

SEQ ID NO: 53268 - DNA, 254 bp, Glycine max
  Clone ID: 701142738H1
cagaaactcaaaaccaaaataaaattattatggatcacattcataggttacgttgttttgggacaatacccaaaattccttttctattgctactttccctgcttctcttcagtttcgttaacgcatccttcgacctcgctactatacccttcaacgacggctattctccgctcttcggagctagcaacgttgttcgctccgaggatggatacggcgtacaactccgcctcgatcgctacacaggttcgggtttc

SEQ ID NO: 53269 - DNA, 257 bp, Glycine max
  unsure (1)..(257): unsure at all n locations; Clone ID: 701142740H1
ggcggatcgaggaggaaccggcgagcntcgcggagagcctcgctctganactgagcgattgcggatttccgacgaagaggagggcgtcgagctcgggagtgacggaaaacgtgaggaagtggaaggagttggtgaagaagaaggaggaattggtcgttaagagtcgaagccgcgtcgcgttcgcttggaacattggtctcattgtgctancggntcgcacgcntcgcatattttccactccttggggattcncatng

SEQ ID NO: 53270 - DNA, 252 bp, Glycine max
  Clone ID: 701142741H1
ttcttgccaagggaagctgctcagaggatgacttaggaggagtttcttatattttgttgttttgcgaatgctatttagtctgtgttttttaatgttactctcttttaattattgtctttataaaaacatttgttattcacatgagctagagtatttcgttaaaatctcatgccgtctgtcccaattcctgaaccctaagatttatttctttttggttgcagactttttcggatacttatgaagggactgcat

SEQ ID NO: 53271 - DNA, 230 bp, Glycine max
  Clone ID: 701142742H1
caccatgtcacttgctgggaaaatcaccactgaaatcggggttcatgcaaccgctacaaagtggttcaacctcttcgcaacacaactccatcatgttcaaaacctaactgatagagtgcatggaaccaagctgcatcaaggtgaagactggcatcacaacgagacagtcaagcactggacttataccatagatggtaaggttacaacatgtctggagagtattgaatcca

SEQ ID NO: 53272 - DNA, 202 bp, Glycine max
  unsure (1)..(202): unsure at all n locations; Clone ID: 701142744H1
caggtaccncatctctctatnttctcganngaagcagagaggaatgtatgcaatgtgcatgtgggttgtccagttgctactggttcttagcaatatggnttcagtgtttatctacatccctgnatattatctggaagctttggttgattgctttcatgtgttgcggaaaagtgatcctccctttgttccatccanaatacnc

SEQ ID NO: 53273 - DNA, 250 bp, Glycine max
  unsure (1)..(250): unsure at all n locations; Clone ID: 701142745H1
aaatacttcgagatggcccgtacaaagcaaactgctcgtaagtcaactggaggaaaagctcccaggaagcagcttgcaaccaaggctgcacgtaagtctgcaccaacaactggtggtgtgaagaagcctcatcgttatcgccctggaactgttgctcttcgtgagattaggaaatannagaagagcactgagctcctaatcaggaagcttcctttccagaggttggttcgtgaaattgcccaggatttca

SEQ ID NO: 53274 - DNA, 86 bp, Glycine max
  unsure (1)..(86): unsure at all n locations; Clone ID: 701142746H1
tcggaggcngatccggatgaattgaacccanntanccgtggtntctcttcatgcgattgccatttacagttanaggnnnanggatt

SEQ ID NO: 53275 - DNA, 249 bp, Glycine max
  unsure (1)..(249): unsure at all n locations; Clone ID: 701142747H1
gtgctgcaatggcttcaagtcaggaggaggtgacccttttgggagctactggaagcccatttgtgtgcagggttcatattgccctcaagttgaagggagttcaatacaaatatgtcnaagaaaatttgaggaacaagagtgaactgcttctcaaatccaacccagttcacaagaaggttccagtgtttattcacaatgagaagcccatagcagagtctcttgtgattgttgaatacattgatgagacat

SEQ ID NO: 53276 - DNA, 240 bp, Glycine max
  unsure (1)..(240): unsure at all n locations; Clone ID: 701142748H1
caaatcccaagtctcctaaaaccctaattcgcagtgaaaatgagagaaatcttgcacatccagggagggcaatgcggtaaccagatcggagcgaagttctgggaggtgatatgcgacgngcacggcatcgaccacaccggaaagtacagcngcgactccgagctccaattggagcgcatcaatgtttattacaatgaagccagcggcggaaggtacgttccacgcgccgtcctcatggat

SEQ ID NO: 53277 - DNA, 254 bp, Glycine max
  unsure (1)..(254): unsure at all n locations; Clone ID: 701142749H1
agcgtaggggattgaaaatgagtatgtacggtagggatccgtggggagggccgttggagatccacgccacagactccgccaccgacgacgagcgcaccggaatctccaggagctggaccgaggcgctttagacgagacacaacagagctggctcttgggcgccggagaacnnnnnnnnnnnnnnnnnnnnnncgtagatcttggctgcatcatcgtcagccgcaagctcttcatctggacactcggcactctcg

SEQ ID NO: 53278 - DNA, 244 bp, Glycine max
  Clone ID: 701142751H1
gtggatacactaaagcaatcaacaagactgttcaaatattggatgaactagttgaggatggttctgacaatatggatgttcgtgataaggaacaagttatttcaagaatgaaagcagccgttgccagcaagcaatttggtcaagaagatatcatatgttcgcttgttgctgatgcatgcatccaagtgtgccccaaaaaccctgcaaactttaatgtggacaacgttcgtgttgcaaagctctt

SEQ ID NO: 53279 - DNA, 257 bp, Glycine max
  unsure (1)..(257): unsure at all n locations; Clone ID: 701142755H1
ctcgagcctcnactttctcgctccccaaangcccctctctcctcctccaatggccgaccatntnaccgacgaccagatcgccgagntcaaggaggccttcagcctcttcgacaaggacggcgatggttgcattactaccaaggaacttgggactgttatgaggncacttggtcaaaacccaactgaggncagaactgcaggatatgataaacgaggttgatggctgatggcaacggaaccatcgatttcccagagtt

SEQ ID NO: 53280 - DNA, 249 bp, Glycine max
  unsure (1)..(249): unsure at all n locations; Clone ID: 701142756H1
attattcctgaacccttcaaaaccctcttatctctcttctatcgcttggcctgatattctttttggctgagagatcanncaaaaatgagcgtggttggatttgattttggtaatgagagntgcattgttgctgtcgcaagacaaagggggatcgacgttgtgctcaatgatgagtcaaagcgtgaaacacctgcaattgtatgcttggtgacaaacagcggttcctggggacagctggggtgcttctac

SEQ ID NO: 53281 - DNA, 248 bp, Glycine max
  unsure (1)..(248): unsure at all n locations; Clone ID: 701142758H1
gggaaaagaagataatatggtggtagtttaagataatggtaatctatggcccaagtttatcggtgtactgtgggtcgtgggtacgagatggtgagagcaattggcaagataggtgcagccctcagaaattgagtgggtctgggagaagaagcatcacctgcaaattcgagagtgtgagactcagtagagcatgcagtgtggcactgactaccttgctcacaaccgctgcngtgatagctctgtggcag

SEQ ID NO: 53282 - DNA, 223 bp, Glycine max
  unsure (1)..(223): unsure at all n locations; Clone ID: 701142759H1
cgcaatcttcactacattcaccgagcatttacnattcacaactgaatatggctgagactacncaatctactgctgagttgttggagtggcctaagaaagataagcgccgctttcctgcatgttgtgtatcgtgttggtgatcttgatcgcaccattaagttttatactgaatgttttgggatgaagctttgaggaaaagagatattccagaggagaaatatgc

SEQ ID NO: 53283 - DNA, 252 bp, Glycine max
  unsure (1)..(252): unsure at all n locations; Clone ID: 701142760H1
ctccgagngataagncccctnccttcctctnccttataattcntgtncacccttttnnctggnnccattgaaagtgcaccagcaaacgtgaagccaagccnttatgntgcacccttcaataggagtgtttttccttctggttttctatttggaataggctctgcagcttaccagatagaaggagcagcagctatagatggcagaggaccaagtatatgggncacctatactaaacagcaaccagggnagatt

SEQ ID NO: 53284 - DNA, 249 bp, Glycine max
  unsure (1)..(249): unsure at all n locations; Clone ID: 701142761H1
agaaaatacacattacattactaagtctttgttcatttgagtagtagtgatggctagcctcaaggttgcatgtgtggttgctgtgatgtgcatggttgtngtggccatgagtgctgcacccatggcacaggccgcaatcacgtgcgggcaggtcgccggcgacatgtctccgtgcttcagttatcttcgaagcggcggaaaaccgtcgcaggcctgctgcaacggagtgaagtccctcagcagcgcggc

SEQ ID NO: 53285 - DNA, 247 bp, Glycine max
  Clone ID: 701142762H1
ggctggggctgttagtggtggtgatgatgggatgttgtgggtctgcgactgctgcggatgacttggcaaccaagtgttcggcggtgattcagaaggtaataccgtgtctgaacttcgcgacggggaaggaagaaatgcccaaaaaggaatgttgcgacgccgccacggccataaaggagagcaacccagagtgcttgtgctacatcattcaagagacccacaagggtagcccacaggtcaaaagctt

SEQ ID NO: 53286 - DNA, 196 bp, Glycine max
  Clone ID: 701142763H1
ttccttcactctccgctctctctgccactgagccaagaagatggcctcacaggtttgcaaattctgcttccagagccgcgaggtcccttctatcctctcgttttcactctcaaggacgtgcgcttggggctgctgcggctgtttcattgagcagcaaagtgcctcttttttacggaaagaacggttctggaaatgg

SEQ ID NO: 53287 - DNA, 229 bp, Glycine max
  unsure (1)..(229): unsure at all n locations; Clone ID: 701142764H1
gggtagcatatgaatgccatggcaccagactaccagaagtnccctctccaaatgaaaactnggtttggtgggcaatacagcaatgaggtggcatgtgccagttggaggcttggcgtggaagcaaacaacgtagttcaagtggcaaactgttcctgcagcttgcggagagtacatagctgactacgttctaggagaccaatatagatcagattccaaaacagttaaccaa

SEQ ID NO: 53288 - DNA, 256 bp, Glycine max
  unsure (1)..(256): unsure at all n locations; Clone ID: 701142765H1
gaatagcggatgcaagaggagatgattcaaagttggatttggaggaaacagtgagtgaganccatgattcatgaaggcactaggatagctcccgacccagttcgattttctcatgcaaaaggctcagagctaccagaattaccaagtttctcagggaagaaccccgaaggctggatcttcaaggcagagaaatatttttccccacaccatattggcngancattttctcctgttataccctttccccacaccaggc

SEQ ID NO: 53289 - DNA, 255 bp, Glycine max
  unsure (1)..(255): unsure at all n locations; Clone ID: 701142766H1
gatccacgtcgncggaattgtnatatcnctngtataccatttatgatttggagaagcacaantctcgtagagtgtnatacaaaggttacatttctganctgtgtgtgaccataccaagacccaacagatgatttttactataagactttctttgatgctggagagtttgggtttngtctctccacggncctcattggtgcccaaccgtgattgcccatcgaatgctcagttcctagatacatatgttcacgctgc

SEQ ID NO: 53290 - DNA, 252 bp, Glycine max
  Clone ID: 701142768H1
atccagcagcaatggtgtacgtcaaggctcagaaatcaaaagcctacttcaagagatatcaagtcaagttcaagagaagaagagagggaaaaaccgattaccgtgccaggattcggttgattaatcaggacaagaacaaatataacactccgaaataccgatttgtggttcgctttagcaacaaggacattgttgcacaaataatatctgctagcattgccggcgatttagttcttgctacagcatattcac

SEQ ID NO: 53291 - DNA, 249 bp, Glycine max
  Clone ID: 701142769H1
agaattttaaggttgagtgtcctaatgtgaagtacaccgagactgagattcagtccgtgtacaactacgaaaccaccgaacttgttcacgagaacaggaatggcacctatcagtggattgtcaaacccaaatctgtcaaatacgaatttaaaaccaacatccatgttcctaaattaggggtaatgcttgtgggttggggtggaaacaacggctcaaccctcaccggtggtgttattgctaaccgagagg

SEQ ID NO: 53292 - DNA, 254 bp, Glycine max
  unsure (1)..(254): unsure at all n locations; Clone ID: 701142770H1
ccaacctacccctttttcttctcccaccaacttcaccgtcantcttcctcgatcatgtctcacttcaagggcaagtaccatgatgagcttattgccaatgctgcttacattggcactcctggaaagggtattcttgctgctgatgagtcaacagggacaattggcaagcgtttggccagcatcagtgtagagaatgttgaatccaacaggcgtgctcttagggagctgctttnccaccgctcccggtgctctta

SEQ ID NO: 53293 - DNA, 253 bp, Glycine max
  unsure (1)..(253): unsure at all n locations; Clone ID: 701142771H1
aagggtntaacctttntggctgtgttaatatgcgtttcagcactgtcactgagtccttctgttgcgggggaagggcaaaataatggccctgttatgaacttntacaaggaatcatgccctcaggctgaagacatcatcacagaacaagtcaagcttctctacaagcgccacaagaacactgctttctcctttactcaggaacatcttccatgactgtgctgttcagagttgtgatgcttcactgttggctgga

SEQ ID NO: 53294 - DNA, 232 bp, Glycine max
  unsure (1)..(232): unsure at all n locations; Clone ID: 701142772H1
cgctcttcctcctctccctctgcatcgtctctcgccggaancgccgccgcttccgtcgccactccccggctacaaggtcaccggagacgccgacgcggcgaaggacatccacacgatcgtgcaccttcccgggccccacatgctccggccggtggcgccggagatccacgtggagatggggaagaagacggagcaccgggtggtggtgcatgcgatggggtttcgagcgagg

SEQ ID NO: 53295 - DNA, 252 bp, Glycine max
  Clone ID: 701142773H1
cactctctctaatggaacaaaccttcctctttctctttccccccacacattagcaacctacgaccacttctgcttcacaattccaaaatgggttgctgcgtcagtagtaccaacagatctcattcttcaccctcaagcaagccttttgaccgaccaagatctaccgcgaaaggttcagaaaacagagcaccgccaccggaggaagaaacggtgaaggaagtgttgtctgaaacacccaaatggaagccaaaa

SEQ ID NO: 53296 - DNA, 250 bp, Glycine max
  Clone ID: 701142774H1
agaacaacagaacaacagagcaaaaagctccaccaatggcgggttacagagccgacgacgactacgactacctcttcaaggtggtcctcatcggcgactccggcgtgggcaagtccaacctcctctcgcgcttcaccaagaacgagttcaacctggagtccaagtccaccattggcgtcgagttcgccacccgcaccttgaacgtcgattccaaagtcatcaaggcccagatctgggataccgcaggcca

SEQ ID NO: 53297 - DNA, 232 bp, Glycine max
  unsure (1)..(232): unsure at all n locations; Clone ID: 701142775H1
cgattctcttctctgcaactatgcctaaccctaaggtcttcttcncccatgaccatcggcggtcaacctgccggccgcatcgtgatggagctctacgccgacgtgactccgagcaccgccgagaacttccgcgcgctctgcaccggcgagaagggcgccgggcggagggcaagcccctccactacaaaggctcgtccttccaccgcgtgatcccgaacttcatgtgccaggg

SEQ ID NO: 53298 - DNA, 229 bp, Glycine max
  unsure (1)..(229): unsure at all n locations; Clone ID: 701142777H1
gttctgggaggtggtgtgcgcgganaccgggatcgattcaacngggaggtaccaaggggacaacgagttgcaactcgagcgagtcaacgtctactacaatgaagcgagttgcggaaggttcgtgcctagggcgttgctcatggatctggagccagggaccatggacagcgtcagatctggtccctacggtcagattttccggccagataacttcgtctttggacagtcc

SEQ ID NO: 53299 - DNA, 242 bp, Glycine max
  unsure (1)..(242): unsure at all n locations; Clone ID: 701142778H1
taggcattgacccctttgcacaaaggaaaagaggggtggtgttgtgttaaaaaaaatattgaacttggttggttctaagtagaaacaaaaattgtcattttcccatttctgcatttttggtttgggagaggagaaaccaagaattaagaaatgggttgctccgtaaganttgttgtgtctatttttggtgttgttggtggcatgtgttagaggggaggacccttatagattctacacttgga

SEQ ID NO: 53300 - DNA, 245 bp, Glycine max
  unsure (1)..(245): unsure at all n locations; Clone ID: 701142779H1
gcgaaagtagaatctgaaaaacaatggcggcgaagtagacacccacgccgtggcttccgatctgatcgacttcctcaacgcttctccaanggctttccacgcngtanacgagnnnaagaggcgtttgcgtaggcggggtaccaccaactctctgagagngaagtgtgggaactgcaaccgggcaacaagtacttcttcaccagaaatcactccaccatcgtcgccttcgccatcggcaaaaagta

SEQ ID NO: 53301 - DNA, 247 bp, Glycine max
  Clone ID: 701142780H1
ccaatatctctaccctaatccaccctttctgaacaaaaataaaaaaataaaaaaaaacccatcgatttcttggacctccatgacttctttgtctacccatcacacctatagccgaaagcaaaaatctctcggcctcctctgcaccaattttctgagtttgtacaacaaagaaggtgtgcgcctggtcggtctcgatgacgcagcttcgcggttaggtgtagaaagacgtcggatctacgacatcgtt

SEQ ID NO: 53302 - DNA, 251 bp, Glycine max
  Clone ID: 701142781H1
ctagctcctagcataagtagaagaactacctcactacctgtatcaaccgccacttcctcttataatcctcaccctctctctcactctattcaaacatcatagttcagcacttgagttattagtatcaaccacgaatgtccacaagttgagaaagaaaagcaaaagatggaagctgttaagttggtgtctagtgatccaagtgagagaccagacacataccgagtcgcttacataattcatttcttgcttgg

SEQ ID NO: 53303 - DNA, 250 bp, Glycine max
  unsure (1)..(250): unsure at all n locations; Clone ID: 701142782H1
ctccgccctctggaactgccccaaatgcagatccgaataccccaaatctcacattcccaaaacctatttctgcttctgcggcaaaatagagaaccctcctaacgatccatggattttacctcactcttgcggcgaggtttgtggaagaccgttgaagcacagttgcggccaccattgtttgctactctgccaccccgggccgtgcccctcttgccccaaactagttaaagttcgatgctttnncnnnnnc

SEQ ID NO: 53304 - DNA, 247 bp, Glycine max
  Clone ID: 701142784H1
cgaaatcaaattgttagagaaacgcgagttaatccagaaatcaaagaaagcgttacttgacgttcgtttgaacattaacaacattaacacaaatggcaacacgaactggtcgcttgtttcaaaatcaaaacctgaatgtccacgttaatggaggaggaactgtttctgagaaggctgatttaacaggacagaggaaagttagggctgggggaagaaaaccacttggagatctatccaatgcagggaa

SEQ ID NO: 53305 - DNA, 249 bp, Glycine max
  unsure (1)..(249): unsure at all n locations; Clone ID: 701142786H1
gcttcttctagatttaaggaagatgggtaaggaaaaggttcacatcagtattgtggtcattggccatgtcgactctgggaaatccactaccactggtcacctgatttacaagcttggaggcattgacaagcgtgttattgagaggtttgagaaggaagctgctgagatgaacaagaggtctttcaagtntgcctgggtgctggacaaacttaaggctgagcgtgnaggaangaatcaccattgatattg

SEQ ID NO: 53306 - DNA, 247 bp, Glycine max
  unsure (1)..(247): unsure at all n locations; Clone ID: 701142787H1
aggncgagtttcacagcagcaatggtgcgtttcggatccctcttctatcgtctctgtagcatactttgttattttgcagaatctgaattttagttatccattttttattcaagctatgttcccatgttttgcattcatatagaatttgagcgttaagtttttttggtagttttaatggaaggaaaggttctcacttatggtggggtttgtttcttgctgttacttccatgagtggccccttttagca

SEQ ID NO: 53307 - DNA, 248 bp, Glycine max
  Clone ID: 701142788H1
ggaagttaccgtgcaactgatcaattatacaaagagtgaagttctggaacctgtttcatttgcaacctatgcgtgaccagaagggagaagtgcagtattttattggtgttcaacttgatggtagtcaacatgtagagcctcttcacaactgcatcgcagaagatactgcaaaggagggagaacagttggtcaaacaaacggcagaaaatgttgatgaggcggtaagagatttccggatgctaacaaga

SEQ ID NO: 53308 - DNA, 246 bp, Glycine max
  unsure (1)..(246): unsure at all n locations; Clone ID: 701142789H1
ccctttgttctctcctcttccagacaccaacatggcntcaatgaccatgatatacaccttactctttctttctttcactttgtcatatgctattaagacctccaccatcatcaactacaccgacaatgaggtcatggccatgtacgaggagtggttggtgaagcaccaaaaggtgtacaatgagttgggaaagaaggacaagagattccaagttttcaaggacaacttagggttcatacaagagca

SEQ ID NO: 53309 - DNA, 248 bp, Glycine max
  Clone ID: 701142790H1
gaaaccctagccactctcccggcgtcacgatgcagatcttcgtgaaaaccctaacgggtaaaacgattcacgttggaggtggagtcttcggacaccatcgacaacgtgaaggccaagatccaggacaaggaaggcatccctccggaccagcagcgcctcatcttcgccgggaagcagctggaggacggccgcaccctcgccgactacaacatccagaaggagtccacgcttcacctcgtcctccgcct

SEQ ID NO: 53310 - DNA, 247 bp, Glycine max
  unsure (1)..(247): unsure at all n locations; Clone ID: 701142791H1
gcgaaaccgagagagcgaaggggcaaacacaattttttttatcttcttttttattttttgtnnnnnnnnnnnnnnnnnnnatgttggggatcttcagcagttcagtggtgtcgccgccggaggagctggtggccgctggcagcagaacgccgtcgccgaagacgacggcggggaagctgctgaaccggttcgtggagagcaaggcgtcggcggtgtcgctgcaggtgggggaacacgtgcagttggc

SEQ ID NO: 53311 - DNA, 243 bp, Glycine max
  unsure (1)..(243): unsure at all n locations; Clone ID: 701142792H1
cagatctcaattgcatcgctgtccatggctaccatcgttagcatcaaggcccgccagatcttcgacagtcgtggcaatccaactgtcgaggtggatttgacttgctccgatggtacttttgccagagctgctgttccaagtggtgcatccactgggatttatgaggcccttgaattgagagatggaggatctgactaccttggnaagggtntatcaaaggctgttgacaatgtgaacaccgtc

SEQ ID NO: 53312 - DNA, 245 bp, Glycine max
  Clone ID: 701142793H1
cgacaacatagtctcggaacacggtgagaaggctcccaatgttgtctacaaaggaaggactgaagatgataggttggttgctgtgaagcgcttcaacaagtctgcttggcctgatcctcgacagttcctagaggaagcaagggcagtggggcagctgaggaatgagcggttggctaacttggttggttgttgctgtgaaggggaagagagattgcttgttgctgagtttatgccaaatgaaactc

SEQ ID NO: 53313 - DNA, 77 bp, Glycine max
  unsure (1)..(77): unsure at all n locations; Clone ID: 701142794H1
cagaaggttctagaagccgccaatttttatttctttnaatttgnctgngtcanagacgttcgngattgtaacnatgg

SEQ ID NO: 53314 - DNA, 245 bp, Glycine max
  unsure (1)..(245): unsure at all n locations; Clone ID: 701142795H1
ctatcctacctgatgcagggaggaacaccttcaacactttgctgcagcggagtcaagaacattcttggctctgctgttcaccaccgtngacaaacaaactgtgtgcaactgtctcaaggcggatgctgctaggtacaacatcaatgaccagtatgctcaggcactccctggtttcngcaaggtcaatgtcccttacaagatcagccgctccactaactgtgcaagcatcaggttctgaacaagcc

SEQ ID NO: 53315 - DNA, 243 bp, Glycine max
  Clone ID: 701142796H1
ggacttaaaaaattgcaggagagagtgaagaaacaacaagagaaagtaggaaagaaggtaacaacgttgatcatgaaatatcctattagctattatcatttgctttgaatttgcatcggcaactgttggcacacgagtctttgagaaaggttaccttagttcagagagcatatccactaaccattgatttgaactaaagcattttgtaagcataacttacttaaatcaatggtaggtagggca

SEQ ID NO: 53316 - DNA, 266 bp, Glycine max
  unsure (1)..(266): unsure at all n locations; Clone ID: 701142801H1
cttcctttctctgctctttgccttctctgacacatttggtgccttgtagagcntgttttggcaggaaggtggtatggcgaaggacgttgaggttgctgagcgtggctccttctctgggaaggactaccaggaccctccaccagcaccactcattgatgctgaggagctcacaaagtggtccttttacagggctctcattgctgaattcattgccactttgctcttcctctacattactgtgctcacagtcatagggtacaagcacc

SEQ ID NO: 53317 - DNA, 271 bp, Glycine max
  Clone ID: 701142803H1
gcaactttaaacgccgaagaaagttcatccaatctccgaagcccttcaccgcattgcaaccatgtcgagaagaaaggttagagagccaaaggaagaaaacgtgactctgggcccagctgttagagatggcgaacatgtctttggcgtcgctcgcatctttgcctccttcaatgataccttcattcatgtcactgatctgtccgggagggaaacacttgtccgcatcacaggtggaatgaaggttaaggctgacagagatgaatcgtctccc

SEQ ID NO: 53318 - DNA, 260 bp, Glycine max
  unsure (1)..(260): unsure at all n locations; Clone ID: 701142804H1
ctcaaccttctttcttcttatatatcgaacatggctaagtatcattcaagtgggaaaagctcttccatgactgctatagccttcctgtttatccttctaatcacttatacaggcacaacagatgcacaatccggggtatgttatggaagacttggcaacaacttaccaacccctcaagaagttgtggccctctacaatcaagccaacattcgcaggatgcgaatctacggtccangcccagaagtcctcgaagcactaag

SEQ ID NO: 53319 - DNA, 266 bp, Glycine max
  Clone ID: 701142805H1
ttctctaagaatcaaatactttctattcaatttctttgaaattcacaccaaaatagaattaattaagcgcaatcggtttcagtttgcgtggtgttcaaagacgtgtggatgtcccaaagggctgtgtagcagtgtatgtgggagaaaatcaaaagaagcgctttgtgattcccatatcatacttgaaccaaccttcatttattgagttgttgaatcaaagcaagaatttggatttgatcatccaatgggtggcctcacgattcctg

SEQ ID NO: 53320 - DNA, 270 bp, Glycine max
  unsure (1)..(270): unsure at all n locations; Clone ID: 701142807H1
ctttancaccatnctagatatcaganaactttgcagctctcttaggtttttaaaaaacaccacgcaaacagcaagatggccacttccgacagtaacatgctactaaattatgttccagtttatgtgatgctcccactcggagttgtcaatgttgacaatgtttttgaagacccagatggccttaaagaacagctcttgcagcttcgagctgcgggtgttgacggggttatggttgatgtgtggtgggggatcatagaactgaaggggcct

SEQ ID NO: 53321 - DNA, 271 bp, Glycine max
  Clone ID: 701142808H1
gccaatcatgggttgcacttcactgccatcttttattcagatgtcatctgctacacactccagcttcagtgaaaaactccgcaaccctcaaaagaagtctcaaattgtgatacctacaactacaagagagacacacacaacaatttcttggtctttttcttctcaatgcaaagctcttcacaaatcagttcctttggctgcttcacttgcaattcttctctggtcaacccctggcacatgctggtttcatgtcaggaatttctggaataga

SEQ ID NO: 53322 - DNA, 268 bp, Glycine max
  Clone ID: 701142809H1
gctgcagtagttttggtagcatggccatgccatggcgcaggctaccaaaggttccctctccgaatgaaaactggctatggtgagcgttcttcggaggtaaaatgcgcaagttttacgcttgctgtggaagcacacaacatccgagcctttaaaaccattcctgaagagtgcgttgaaccaacaaaggactacattaatggcgaacaatttagatcagactctaaaacagttaaccaacaagctttcttttatgctagtgaacgcgaat

SEQ ID NO: 53323 - DNA, 268 bp, Glycine max
  Clone ID: 701142810H1
gttctatatattattgaattgacaatgaggcctgctcttgctttgcttcctcttctatttgctttcttgttagctgccactacggaatcaagaaaagatccaggggaatattggaaaatgatcatgaaagatcaggaaatgccagaaggacttcaaggtcttgtttcatttcaatctgaaaataaccctaagactcaagagcagcttggtaaaggttccaaaaaccattgtgaagagtctctagttacaaatacacaagttaacagtg

SEQ ID NO: 53324 - DNA, 266 bp, Glycine max
  unsure (1)..(266): unsure at all n locations; Clone ID: 701142812H1
gaatacatagtttccaatctcgatatgttaccacctatgtcagatttanctacctgtacagtttggtacaggtagaggttgaaactaaaacagctaaatcatcatccagttgtaccaatggacttctttggctgacaagagcaatggatttcttggtggcttgttccgaaacttaactcgagcatgaagattggccaatgtcacaagcatgtacagattcgtataacaagactctgaagaagtggcaggttggctgctagttccaa

SEQ ID NO: 53325 - DNA, 218 bp, Glycine max
  unsure (1)..(218): unsure at all n locations; Clone ID: 701142813H1
tgccactcttcttcctttctctttgagagactgcacacaaatttctactgtttccagagcgacaatggacnccggcggccatgatgaacgccgccgccaacacggcgtcatatcacctgtgcagagatctggcacttcccgcctcccaacgcgccagacgcgctgggcctcaggagggcccattcgccccgggtccgacccganatgccgtnccgggt

SEQ ID NO: 53326 - DNA, 273 bp, Glycine max
  unsure (1)..(273): unsure at all n locations; Clone ID: 701142814H1
gcgattcgttccatggacccctaaatagttaagggatcccccgtttgattcatattccgatncaaaaactttatttcttacttaaagggaatcctttataccctcaatgaatgatttgcggtataatatacattatcgtaatttgtatacaagaagaatcaattctaaattgacaacttgagttctaaaatnatgaaacataagtttttggaattggatctataatccgaatttttttgagtatgacgaaangatctatggagagtatataga

SEQ ID NO: 53327 - DNA, 276 bp, Glycine max
  Clone ID: 701142815H1
taaagttatagttcaaaatgaggaacaggtggagctttcatttgcaagaatgtgggatcattcactagagggaaagtttgtccccttaaatattgacaaaagattcataatgctccgtggttcatcaggcttctactcttatggaatttatgagcacctaaatggatggccagattttgatattagtgaaacaaggatcactttcaaagctaggaaagacaagtaaattctcattttgaccaaacagtcgatgcccctctctattctgtgattcta

SEQ ID NO: 53328 - DNA, 278 bp, Glycine max
  Clone ID: 701142816H1
tttggggccatcctggttatcccatgtgggcatcctacagaaagttgggcactggaagcctatccgggggtatctattcggacggaattcttgatgcagtttgctttgtggtctgttaggtagaaattgtagatgcagtttaatttttactaacttgatgtttcaggtgcatgtggatgcttggggatgcccgttggtgccactcctcaagctccttgttttccctacaatccaaatacacctggattgcacaatcctaaagcagttgactatagatt

SEQ ID NO: 53329 - DNA, 272 bp, Glycine max
  unsure (1)..(272): unsure at all n locations; Clone ID: 701142817H1
acttaatcgatcatcacttcacttcactaatacatcatggcagacgagacccagaacaagtatgagagctctgaggttgaggtccaggatcgtggtgtttttgactttctcggtaagaaaaaggatgaagaagacaagcctcatcctcaggaggnggtcatcgccaccgagtttcaaaaagtcactgtctcagaccaaggagagaacaagcacagcctcttagaaaagcttcaccgatctgacagcagctctagctcttcaagtgaggagga

SEQ ID NO: 53330 - DNA, 266 bp, Glycine max
  unsure (1)..(266): unsure at all n locations; Clone ID: 701142818H1
ggntgcttacgtgggtgatgaagctcaatcaaaaaggggtatactcaccttgaagtatcctatagagcatggcatagtcagcaactgggatgatatggagaagatttggcatcacacattttacaatgagcttcgtgttgcccctgaagaacaccctgtacttcttaccgaggcacccctcaatcccaaggccaacagagagaagatgacccaaattatgtttgagacttcaatgtgcctgccatgtatgttgcaattcaggctgt

SEQ ID NO: 53331 - DNA, 248 bp, Glycine max
  unsure (1)..(248): unsure at all n locations; Clone ID: 701142819H1
ctcactnctcttcgcagcggcaacctcggtggctttcatacttctcggggtgagttgtccngatgtacacatcgaggaagaaaattcacaaggataaggatgctgagccaactgaatttgaggaatcagttggacaggcattgtttgatctagaaaataccaacaatgagctgaaaagtgatctgaaagatttatacataaactcagctgtccaaattgatgtttctggcaaccgaaaggctgtggtt

SEQ ID NO: 53332 - DNA, 264 bp, Glycine max
  Clone ID: 701142820H1
ggccactgcaagaactgtgaaggacgtttctcctcatgagttcgtcaaagcttactcttctcacctcaagcgatctggcaagatggagctgccagagtggactgatattgtgaaaactgcaagatttaaggagttggctcctatgatcctgactggtactatgtcagagctgcttccatggcaagaaagatctacttgagaggaggacttggtgttggtgccttcagaggatttatggtgggagcaagaggaatggtagccgcc

SEQ ID NO: 53333 - DNA, 267 bp, Glycine max
  Clone ID: 701142821H1
cttctgctgcaagacctcgctgaaaattagggtttcgattcggaggtagacgaagatgttcggaagggctccgaagaaaagcgacagcaccaggtactacgaaatcctcggcgtttccaagaacgcttcgccggatgacttaaagaaggcttacaagaaagccgccattaagaaccatcctgacaaaggcggggatcccgagaagtttaaagagcttgctcaagcctatgaggttctgagtgaccctgagaagcgcgagatttatga

SEQ ID NO: 53334 - DNA, 266 bp, Glycine max
  unsure (1)..(266): unsure at all n locations; Clone ID: 701142822H1
gggtgccctgagatcacattgaacaatggtgaaggctgtggccgttcttggcagcagtgagggtgtcactggaactattcacttcgttcaggagggaagtggtccaaccaccgtaactggatctcttgctggtcttaagcctggtctccatggtttccatgtccatgccttgggggacactaccaatggttgcctctcaactggatcacatttcaatcctaataacaangagcatggtgcccctgaggatgagaatcgtcatgctg

SEQ ID NO: 53335 - DNA, 266 bp, Glycine max
  unsure (1)..(266): unsure at all n locations; Clone ID: 701142823H1
ttccggtgggccatggcaaagcgctcacgccactttctacggtggcagcgacgcctcaggaactatgggaggggcgtgtgggtacgggaacctatattcccaaggctacggcgtgaacactgcggcactaagcactgctctattcaacaatggtttcagctntggagcgtgcttcgaaatcaaatgcaccgatgacccgaaatggtgtcatccaggtaacccttccatctttgtcaccgccacaaacttctgccctccaaactacg

SEQ ID NO: 53336 - DNA, 266 bp, Glycine max
  Clone ID: 701142825H1
aggggaaggagcaggatgtgtcgttgggagcgaacaagttccccgagagacagccgattgggacggcggcgcagagccaagacgacggcaaggactaccaggagccggcgccggcgccgctggttgacccgacggagtttacgtcatggtcgttttacagagcagggatagcagagtttgtggccacttttctgtttctctacatcaccgtcttaaccgttatgggagtcgccggggctaagtctaagtgtagtaccgttgggatt

SEQ ID NO: 53337 - DNA, 272 bp, Glycine max
  Clone ID: 701142830H1
gggcactggtttcgaaccctcgttgtggttaggtcttcttcacctttcgaattttggaatccatgggtcagggaactccgggcggcatgaaccggcagggcgaccggaagccggacggcggcgacaagaaggagaagaagttcgagccgtcggtccgccggcgcgcgtggggcggaaacagcggaagcagaaaagttccggaggcggcggcgccggtttcccgacagtgactccggtgacgaatgcaaactgcggcttctgaaactggagcg

SEQ ID NO: 53338 - DNA, 255 bp, Glycine max
  unsure (1)..(255): unsure at all n locations; Clone ID: 701142832H1
ggtgcttcggcgactcctacganacaccaggggttcaccnngggccagcctgtttcgaacgctctgggtgcgaanttcatagaatccgctggcttcccctactgcatcaccagtggcttctccatcgccgcttccaggttggctctgcccgacaccggcttcatctcctacggcgaaatgctggagcagggccaactcatcacccaagccgtttccatcccgtcattggcgacgcgacaaggctacggcaatgcc

SEQ ID NO: 53339 - DNA, 269 bp, Glycine max
  Clone ID: 701142833H1
aaaaaacgtgattcgctcttctcttcgaataaaccacaaaaccaacaaacgagaagaggagtgagagaagatggggttgtcgttcacgaagctgttcagcaggttgtttgcgaagaaggaaatgaggattctgatggtaggtctcgatgctgctggtaagacaaccatcttgtacaagctcaagcttggagaaatcgtcaccaccatccccaccatcggatttaatgttgagactgtggagtacaagaacatcagcttcactgtgtggg

SEQ ID NO: 53340 - DNA, 86 bp, Glycine max
  unsure (1)..(86): unsure at all n locations; Clone ID: 701142834H1
gatcgatgnanggcttctanatcntgtgctatcctctttcncnctnctccanttnctctggcacctacttacncatttccatttgt

SEQ ID NO: 53341 - DNA, 233 bp, Glycine max; identical to SEQ ID NO: 27385
  Clone ID: 701142835H1

SEQ ID NO: 53342 - DNA, 267 bp, Glycine max
  unsure (1)..(267): unsure at all n locations; Clone ID: 701142837H1
gggaaggcccttgagcttttctttctttctctgctctcttttcttttaggtttccacnctnanacannanagaaanatntntttctnngnaanaanctctcttctcttcttcantctnntnaactcctgcnaaanccccatttccgcagttcttaaatnngttgtcnttgtctccgcnantgctggttaccgaagatgaagggcagtnccatgnctcgatggtagcatctgcatcttcaccatcnctganctgtttctncctaaatg

SEQ ID NO: 53343 - DNA, 267 bp, Glycine max
  unsure (1)..(267): unsure at all n locations; Clone ID: 701142838H1
caccttcactcttttagattntgatggatgcagcaaagggattggnagcntctggggngacccttcgtgcagangtgnaaacctttttncgatntgctcctcctttgcagaaacagtgatgagataactcagaagttgaatcagttcattcaacggcaattcttcagctcggagaattgtttgtgtgacttctggtggcaccaccgcgccattggaacnacgatgcgttcgctatgttgacaattcagttcaggtgnacagaggggg

SEQ ID NO: 53344 - DNA, 247 bp, Glycine max
  unsure (1)..(247): unsure at all n locations; Clone ID: 701142839H1
gaaaacccaaagtgcttctctcacctgtcctttttctctanccttgctatccttttggctagtngcactgctgcaagtgcaactccaagaagcgcagtgccaagccaccatgtttcaacattcaacagaagcctttttccttccacttttctctttgganttggttcttctgctttccaggcagaaggagcagcaagtgtagatgggagaggaccaagcatatgggacacctncactagacagcata

SEQ ID NO: 53345 - DNA, 265 bp, Glycine max
  unsure (1)..(265): unsure at all n locations; Clone ID: 701142840H1
ccactctctctctgtcccggagatgttgccgatcctctctccgtcgacaacaacgccaaggacagcaacaccaacaacaagagcaagttgtccgggggcgccatagcgggaattgttgtcggatcggtggtntttcttctcttgcttgtgttcctcttcattttcctgtgcaggaacaagagtgccaagaataccagcgccgtcgacattgccactgtcaaacatcctgagacggagtccaaagttcttgccgacaagggggtct

SEQ ID NO: 53346 - DNA, 262 bp, Glycine max
  unsure (1)..(262): unsure at all n locations; Clone ID: 701142843H1
ctgtaatgattggtacagaggatcggattttgaatccatgggcncattttgctaaaaagtatggctttcttccgttgtttggagatgggagcacaaagatccaacctgtttatgttattgatgttgctgctgcactcacttcactcttgaaggatgatggcactagcatgggaaaaatttatgaactgggtggtccagagatctttactntgcatgaattggcagacgttatgtttgatacaattcgagaatggcctcgata

SEQ ID NO: 53347 - DNA, 60 bp, Glycine max
  unsure (1)..(60): unsure at all n locations; Clone ID: 701142845H1
ctagttcgcgttctcgtcacacacgaatgcttctttgaccatggcttccacanaanatac

SEQ ID NO: 53348 - DNA, 273 bp, Glycine max
  Clone ID: 701142847H1
cagttttacatttttttttgttcctgagttccaatggctcttcaggctgcttccttggtttctgcttctttttctattgctaaagagggaaagtctggtgtatctctcagggacaccacaatgtttggtgtttcattgtcggatactctcaaatctgacttcagctctccctcatcgacttgcaaaagggaattccaacaaaaatttgggccctttgagggttcagtcagtggcaacaacaatccaggagtcaccaaggcttcaccagaaggc

SEQ ID NO: 53349 - DNA, 275 bp, Glycine max
  unsure (1)..(275): unsure at all n locations; Clone ID: 701142848H1
gattacatagggttggcagagaatccgtcaatggacggaagctctgacaaactgtcttctgaggatggtaaaacctcatcactgaacttgaaggagacagagctgaggcttggcctcccnggttgcgagtctccagagagaaaatcaggttctgcactctgtctttttggcaaagagttgcagaacaataacaatgtttgctcagttgtaagccctttgaaggctggggccaagaggggcttctctgatgtcactgagggatctcaaggagctgc

SEQ ID NO: 53350 - DNA, 264 bp, Glycine max
  Clone ID: 701142849H1
tgaaagtgtttgacaaagcagactactatgcacatcctgagcattacaatcccactttccatgaaaaaatagcaccatatgcatctgttattgtcaattgcatgtattgggagaaaagatttcctcaattgctgagctataagcagatgcaagacttaatgggccgggggagcccccttgttggaatagctgacataacgtgtgatatagggggttcaattgagtttgttaaccgcagtacttcaattgattcacccttcttca

SEQ ID NO: 53351 - DNA, 199 bp, Glycine max
  unsure (1)..(199): unsure at all n locations; Clone ID: 701142850H1
anaganggaagtcccttcctttctaaatggatcagctaacaacttgctccaatttccaaagctagacaaggcnagaatgaagaanagttaagctcagaatctggaaccatcacttgccttgattttgcaccaaaatatacccatgaaggtgcagttctctattgttgcacttgttctattaggctccacactgtgtctt

SEQ ID NO: 53352 - DNA, 262 bp, Glycine max
  unsure (1)..(262): unsure at all n locations; Clone ID: 701142852H1
cttgcttgcaccatgacccatgtcatgccttgggtgaccttgtnggaattaagaagcatttcaggaggaagcacagcaatcataagcaatgggtctgtgaaagatgctccanaggctatgcagtgcagtctgattacaaagcacatctcaaaacgtgtggcacccggggccactcttgtgattgtggccgcgttttctcaagggttgagagtttcantgagcaccaagatgcttgcaacatggggaggctcaggcctgagtc

SEQ ID NO: 53353 - DNA, 231 bp, Glycine max
  unsure (1)..(231): unsure at all n locations; Clone ID: 701142854H1
ggttgtgctaatggagttgttgactggattaatggcacttgatgaggatagacctgaggaaagccaatacttggcagcatggttctggcatataaaatcagataagaagaaactaatggctgctatcgatccctgcccttgatgtaaaagaagaaacatttgagagcgtctccatcattgctgagctagcaggggnactgcactgcaagagaaaccangcccaagggcaag

SEQ ID NO: 53354 - DNA, 158 bp, Glycine max
  unsure (1)..(158): unsure at all n locations; Clone ID: 701142855H1
tcttaactgtagaaaagaaancaccgaagatgagcttgttgaatgaggagagaaaaccgcacgctgtggttactccatatccagttcaaggacatgtgaaccctttgtttaaactagcgaantggcttcatctcagaggctttcacataacctttgtt

SEQ ID NO: 53355 - DNA, 263 bp, Glycine max
  Clone ID: 701142856H1
caagttgtgaaagcacatcacaagaaaattcgcaagcgatggatccgaagctaaaagaggtttctcagctcttcgatcgctttaaggcttcgtttatcaggaacgactttgatacctgttccaatctcctttctcagctaaaggtgttacttacaggtttcagaagccttccaccgttgtttgcagatacacctaatgcagttcatgaattaacaatagcaagggatatatacgagcatgctgttgtcctagtgtgaaaaatg

SEQ ID NO: 53356 - DNA, 261 bp, Glycine max
  unsure (1)..(261): unsure at all n locations; Clone ID: 701142857H1
cttgcccgatgccactaagggttctgaccatttgagagatgtgnntggcaaagctatggggcttactgaccaagatatcgttgctctatctgggggtcacactattggagctgcacacaaggagcgttctggatttgagggtccctggacctctaatcctcttattttcgacaactcatacttcacggagttgttgagtggtgagaaggaaggtctccttcagctaccttctgacaaggctcttttgtctgaccctgtatt

SEQ ID NO: 53357 - DNA, 259 bp, Glycine max
  unsure (1)..(259): unsure at all n locations; Clone ID: 701142858H1
cagttttatgtcaatgttgacaaggaagagtggaagctggagacattatgcgacctttatgagactctggctatcacccagagtgtcatttttgtgaataccaggcgcaaggtggactggctcactgacaagatgcgaacaatgatcacacagtctctgccacccacggtgacatggaccaaaatacccgtgatatcatcntgcgtgaattccggtccggctcttccgagttctcataccactgaccttcttgcccgtg

SEQ ID NO: 53358 - DNA, 264 bp, Glycine max
  unsure (1)..(264): unsure at all n locations; Clone ID: 701142859H1
gnagaattagggttcgattccggagagggagcctgagaaacggctancacatccaaggaaggcagcaggcgcgcaaattacncaatcctgacacggggaggtagtgacaataaataacaataccgggctcattgagtctggtaattggaatgagtacaatctanatcccttaacgaggatccattggaggggcaagttctggtgccagcagccgcgtaattccagctccaatagcgtatatttaagttgttgcagttaaaaagc

SEQ ID NO: 53359 - DNA, 263 bp, Glycine max
  unsure (1)..(263): unsure at all n locations; Clone ID: 701142860H1
ggaacacaaacaacaacctcaacttaacgcattgtgtgcatgatggaggagatgaaagtttctcggcgggtggagtggtggcagaacatgatgttccccgttcggagggtttggtttgtcgttgccaagcgcctcggcattcgcaaaactgggttactgaagctaagtaatgatgtgagggcatgcgaatatgaggacattcaagtgatgtgggngatactaaacagaaacgaatcagattttggtcgttcttctaagcanta

SEQ ID NO: 53360 - DNA, 264 bp, Glycine max
  unsure (1)..(264): unsure at all n locations; Clone ID: 701142861H1
cagctagggtggttgcttgctgtggttcagagtcttttgatagtagcatctncgcaaacattacacggttgacgtacttgttgcctggtacactgttaatttggtggtgttttttattgacaagaaattgccagaattaccagacaggtcaattgcagctgcaaccttgctaccttgagcaccaaagacaaagacagcaggaccaaagaggagaaccacaagctattgatgggaattctggagancctgtagattggaggcaga

SEQ ID NO: 53361 - DNA, 218 bp, Glycine max
  unsure (1)..(218): unsure at all n locations; Clone ID: 701142862H1
cattcaccttctgttctatnggancctctttgagaatgtgatgtctttgcaccgtancaaggcancatttataggtctcttagantatgggagggctaatgaatgggttgtgactganaaacttngtgactctgtnnnnnnnnnnnnnnnnnnnnnnatcaggagatgctggccaagaagaataatgccatcaaggccanccccaaaaagaactcgac

SEQ ID NO: 53362 - DNA, 139 bp, Glycine max
  unsure (1)..(139): unsure at all n locations; Clone ID: 701142864H1
gaagtacggattgnagctgctgggaaagtgaccaagttttgccggatattaaatccagatctttcaattcagcatattcttccttgcgtgaaggaattgtcaacggattctttgcagcatgtttcgctctggcttggct

SEQ ID NO: 53363 - DNA, 264 bp, Glycine max
  unsure (1)..(264): unsure at all n locations; Clone ID: 701142865H1
cccattcatacgtggtgttgttactgctgctcttttctcttttcttttctctttagttctctcttcccctnnnnnnnnnnnnnnnnnnnnnnnnngagcttgtttaagcttttcttccattaacatattatcacaatgtgtggtattcttgctgttcttggttgttctgatgactctcgagccaaaagggtccgcgtgcttgagctctctcgcagattgaagcaccgtggccctgactggagtgggctccatcaacatggtgac

SEQ ID NO: 53364 - DNA, 263 bp, Glycine max
  unsure (1)..(263): unsure at all n locations; Clone ID: 701142866H1
gaatctgatgaccgagctgccaccgttggatctgatggtattttcngctcgtgatttctctggccccaactgggncaggataaaatggacaagacaatattgccncaggttatgcaagttaagcactttggtcgtagtggaagaaccaagtggacccatcttgtcaatgaggatactactgattggaataacccgtggacttacaatgacccacttcgtgcaaagtctaatgacaaaatggcagcaatgantgcacctatagt

SEQ ID NO: 53365 - DNA, 262 bp, Glycine max
  unsure (1)..(262): unsure at all n locations; Clone ID: 701142867H1
ctacctctgtcatcaatgggaatgattccctaactggtcacatcatatctacaannattggccgcaaaaatggggaacccaaacagactattagctacatggcagaacgggttgtaggaactggatcatttggaatcgttttccaggcaaaatgcttggncaactggggaggcagtggcaattaaaaaggttttacaagacagaagatacaagaatcgtgaactgcagttaatgcgtntnttngatcatccaaatgtgatct

SEQ ID NO: 53366 - DNA, 259 bp, Glycine max
  unsure (1)..(259): unsure at all n locations; Clone ID: 701142868H1
ttcacataaaacatcgacaganatcgacgaggaaaagctaagcctaacaatgtggagctccaaaacgacattgatgtttggcgtcgcagccattgctctgatgatgtttctctcatctgcttcagcggacgacgtcgttgcactcacagaggaaaccttcgaaaacgaggttggcaaggatcgtgccgctctcgtcgagttttacgctccctggtgtggacactgtaaaaggcttgcaccggagtacgaacagctcgga

SEQ ID NO: 53367 - DNA, 259 bp, Glycine max
  unsure (1)..(259): unsure at all n locations; Clone ID: 701142869H1
gccaagcttaagggagggttttatgttgaacccgaagctaagctcttgttcatcatcaggatccgcggtatcaatgccatggatcccaaaacaaggaagattctgcagcttctgcgtttgagacagatttttaatggcgtctttcttaaagtgnacaaagctacagtgaatatgctccatagggtagagcctatgttacctatgggtaccctaatttgaagagtgttagagaattgatctacaagaggggctatggaaa

SEQ ID NO: 53368 - DNA, 260 bp, Glycine max
  Clone ID: 701142870H1
caaaaaactaaccaactaataattaacattattcaataaaaaaaaaatcagacttagagactgcttactgtttcaaatttcagtaaattgtgtgataatgagttgggatctatttgatagggaaaaggaaaaggtattggaatcttgtcatatctttctctcatggagggaagttattccatttagatgagcatgtaacattttttgccattttctcacgagtaatttagcaagtatatttgctgttgtattaatggatt

SEQ ID NO: 53369 - DNA, 115 bp, Glycine max
  Clone ID: 701142872H1
ctctgcgtgttgacaaatacgaagttttgcttatttttggactccaattgaatgttggaaccatgcacggaagtttatttaaacttgattatgccattagatctggtttcatacc

SEQ ID NO: 53370 - DNA, 257 bp, Glycine max
  Clone ID: 701142874H1
tgaagatgtccctaatggtgggggcgttttgctttctgaattgtgggctggacctacctactcaaactcaccacctcccagttccttaccaattcccaagttttccgtccggccgaagaggaccgtgtctcttgatcttcctggttcctcctcccctgggattgaaatgcgcctggtggctaagtctgcgccctcttcccctagcagggagcgtttggatctgcctttacaagggatctctttgatgataatgctga

SEQ ID NO: 53371 - DNA, 257 bp, Glycine max
  Clone ID: 701142875H1
gtacgttgaatggtggtgccaactttgttgcccctggttacaccaagggtgatggtcttggtgctgagattgttggcactttcgtccttgtttacaccgttttctccgccaccgatgccaaacgtaacgccagagactctcacgtccccattttggcaccttgcctattgggttcgcggtgttcttggttcacttggcaaccatccctatcaccggcatggtatcaaccctggttcgtagtcttggtgctgctatca

SEQ ID NO: 53372 - DNA, 258 bp, Glycine max
  unsure (1)..(258): unsure at all n locations; Clone ID: 701142876H1
atccccacaatagtgtttccaaactcctctgcccaacagaggatgccagtngttggaatgggatctgcccctgacttcacatgcaaganagacacaaaggaggctatcattgaggccgtgaaacagggttacagacacttcgacactgctgctgcttatggctctgaacaggctctcggtgaagctctcaaggaagctatccatcttggctcgtctcccgccaagacctctttgtcacttccaagctttgggtcacga

SEQ ID NO: 53373 - DNA, 266 bp, Glycine max
  unsure (1)..(266): unsure at all n locations; Clone ID: 701142878H1
gcattctcctgattacaccatatttgttggtgacttggctgcagatgttactgattatcttcttcaggagacattcagggctcgttacaactcggtgaagggtgcaaaagttgtcattgataggctaactggccgtaccaaggggtatggctttgtaaggttttcagaagagagtgagcaaatgagagctatgactgagatgcaagggggtcttgctcaaacaagacccatgangattngaccaacctctaataaaacccctgccc

SEQ ID NO: 53374 - DNA, 259 bp, Glycine max
  unsure (1)..(259): unsure at all n locations; Clone ID: 701142879H1
gctgaatacagcggtgcnnccaaagangaggaggtcttgcagtatgccagagnttgtaattgattgtgcaactgcaaaccctgatggccagaagagagctcttgtgataggaggaggcatagccaactttactgatgttgctgccacatttagtggtataattcggcattgaaggagaaggagtcgaaattgaaagcagcaaggatgcacatctttgtgaggagagggggtcccaactaccagaagggtctagctttga

SEQ ID NO: 53375 - DNA, 260 bp, Glycine max
  Clone ID: 701142881H1
gccatcacagaagggggaatggagttttctcaagatgattttgatcggttactgttattcgagcacacgcgaaagagcgctgaagcaaactacgcagagaatcctctagacgctgataatctgaccaagtgggggggagctttgatcgagttgtcatcgttccaagctcctaaggatgccaaggcgatgattgatgatgccctttcaaagctggaggaggctttgctgatcaatccaactaagcatgacactctttggtg

SEQ ID NO: 53376 - DNA, 256 bp, Glycine max
  unsure (1)..(256): unsure at all n locations; Clone ID: 701142882H1
cccttttgcttgatccgtcatttgtcaagataagattaagagggtacatatcttggtggtgatttgatacacaagangaatgttgggtcgggctgcattttcccgaactgggagtttcaggcctgagaatttaggtcagaatgccatggccatgattgggaacgtttgcctctcattttttgttattggggttttcgttttcaccattatggctgccacttatgaacctgaggatccctatttcacccttcaacca

SEQ ID NO: 53377 - DNA, 256 bp, Glycine max
  Clone ID: 701142884H1
gggttgtgcccctttgggccggggtcgtcattactgctcttgattgttttatttttctctttcttgagaactatggtgtgaggacattggaagctttttttgctgttctcattggtgtgatggcaatctcatttgcatggatgtttggtgaagccaagcccagtggcaaggaacttcttcttggcgttttgattccgaaactcagctccaaaactatacagcaggctgttggagttgtggggtgccttattatgcc

SEQ ID NO: 53378 - DNA, 257 bp, Glycine max
  unsure (1)..(257): unsure at all n locations; Clone ID: 701142885H1
ggcacttcgttgcttggtgatgtccctttctgttctcttcactcttggtcttgcgagagaaagccatgccagagacgaagatttttggcatgctgtttggccaaacactcccattccaagttcattgcgagatcttctaaagcctggcccngcaagtnttgaaatcgatgatcaccctatgcaaattgaagaaacacagtacccgaaaacttcttctataaagaagaccttcatccaggcaaaacaatgaaagtacc

SEQ ID NO: 53379 - DNA, 259 bp, Glycine max
  Clone ID: 701142886H1
ggcgttccacttccgaaagaagaagagaacttccagaaagtttatgttaaagctccatcttttctttcaattcacatgggggttaaagctgaggttttgccgccagatacagactgtcaccattttgtgcttgagagcaactggtccaaattggaggagccatatggaagtatctttctaagtataccaactgttcttgattcatcattggctcctgaaggccgtcatatccttcatatattcacaacttcttccatgg

SEQ ID NO: 53380 - DNA, 259 bp, Glycine max
  Clone ID: 701142888H1
tttgctcacccctactcttcttccagtctctatctcaatctccatccaaatttaactatggctactgaagaggttttggttgatgaaatcacttaccctaccaagatcactactaccaagcccctatctttgcttggccatggaatcaccgacatggagattcacttcatccatgtgaaattctattcaatcggggtttatttggagccagaagtagtagggcacttgggaccagttcaaaggaaaatctgcaaaggag

SEQ ID NO: 53381 - DNA, 257 bp, Glycine max
  Clone ID: 701142889H1
cagaagcggctcgccgcgagcgtgctcaagtgtggcagaggaaaggtttggcttgaccccaatgaagtcaacgaaatctccatggccaattctcgccaaaacataaggaagctggttaaggatgggtttatcatcaggaagcccaccaagattcactctcgctcacgtgctcgtcgaatgaaggaagccaagaggaaaggacgtcactctggatacggtaagcgtaagggtacaagggaggcaaggcttcccactaa

SEQ ID NO: 53382 - DNA, 248 bp, Glycine max
  Clone ID: 701142891H1
caaatgcttgcttgagttaagtggtaacaatgcaataatagtcatggatgatccagatatcaaattggctgtacgatctattttgtttgcagctgtgggtactgctggtcagcggtgtacaacttgccgtagactgtttctgcatgaaagtatttacgcagatgtactagaccaacttattggagtctacaaacaagtcaaaattgggaatcccttggagaaggggactctagttgggcccttgcata

SEQ ID NO: 53383 - DNA, 249 bp, Glycine max
  unsure (1)..(249): unsure at all n locations; Clone ID: 701142892H1
caatagcaatgggttggatcggtgagactgttgattccatcaaatctcttcacatccgccaggtcctcacccaggctgtgagcctaggcatgattgtnacgtctgcactgataatatggaaggcattgatgtgcgttactggcagtgaatctcccgttgttgttgttcttctggaagcatggaacccggattcaagcggggagacatcttgttcttggcacatgagtaaagatcctattcgggcagggg

SEQ ID NO: 53384 - DNA, 259 bp, Glycine max
  Clone ID: 701142893H1
caaaaatgaaggccagcaccaatgttaggcatattgttcttccttgtactagttctgccagggcccaacttatcccagatattattcgctgttatagcagtggaggccggacaattgtatttaccgagacaaaagaatgtgcttctcagcttgcagggatcttgaatggagcaaaagctctccatggtgacatacagcaatcaacacgtgaggttactctgtctggcttaagtctggggaattcatgacatagttgccc

SEQ ID NO: 53385 - DNA, 156 bp, Glycine max
  unsure (1)..(156): unsure at all n locations; Clone ID: 701142895H1
gcgctcctntcnttaactggacgggtcgtgcctccggnnctgttactttnaagaaattagagtgctcaaagcaagcctacgctctgtanacatgcagcatgggatancaccacaggatnctgatcctaatgtnttggcttcgggatcggagtaatg

SEQ ID NO: 53386 - DNA, 263 bp, Glycine max
  unsure (1)..(263): unsure at all n locations; Clone ID: 701142896H1
gaagaagcagttcaattgatcaactcagatttcagggacctaagtctagctgctaatagactcgcccatcatgccatcaaacttggtggcattggcttggagcctcttttttcggattgtttgctgccattgctgctatttatctgttgatttggatcgtacaaactggaaaacaaatattctcacagcatactcattccatacattttcttcagcttgccttcataattttcgacgtcttcaggggagagntggaaaatgga

SEQ ID NO: 53387 - DNA, 272 bp, Glycine max
  Clone ID: 701142901H2
aaatgggttcttcttcttctatgtggacggtgtgtgtgattttggcatcactggcctctgcagcactctgtgccaacccacgcaggccagtggatgtacaatttggccgaaactacgtgcccacatgggcctttgatcacatcaaatatttcaatggtggttctgacattcagcttcatcttgacaagtacactggtactggcttccagtccaaagggtctacttgtttggtcacttcagcatgtacataaagatggttcctggagattctg

SEQ ID NO: 53388 - DNA, 150 bp, Glycine max
  Clone ID: 701142902H2
aacccaaacgttaactcagacgaagcaccaacagaagaagaagaaacaaaaccgaacctctctaaactctccaacgtcgccacccgattcatcgcatttcgcaggctgcaatggcgacgttcgaactgtaccgcagtcgacgattggaat

SEQ ID NO: 53389 - DNA, 153 bp, Glycine max
  unsure (1)..(153): unsure at all n locations; Clone ID: 701142903H2
gcagcctccaattcgtgccactctcttcaaaatggccgttaccttctcaaatctccacacagaatcaggtcnccaagtccctcgacgacttccttctctgggaaggtctacgtttctggggatcagttcacaaaggacgacatcaaagtgtat

SEQ ID NO: 53390 - DNA, 271 bp, Glycine max
  unsure (1)..(271): unsure at all n locations; Clone ID: 701142905H2
gataaagctctcactaaactgggtagcacttggatctccaagaaagccaaggcagagatttcccacataaccgacgacctatcatctctctcaaatactgtcgaagagaaggcaaagcttttcatcaacaagctcaaaggtaaaacccagaaagccttgccagatctccttcgagagtacaacattcctccgggtctgttcccccgcaacataacatgctacgaatttgatgcatcaangggaaagttgatcgtgtacttatcctcacccg

SEQ ID NO: 53391 - DNA, 166 bp, Glycine max
  Clone ID: 701142907H2
gggacaatagggactgtggtggccatttcataattcttgttctctcttaatatctttaccaaagccagaagatctgcacccttttttttcccttaaaactttttatttttattgccttctctgttttaagtggtcagttaagcaatgaacaatttacatttaccct

SEQ ID NO: 53392 - DNA, 268 bp, Glycine max
  Clone ID: 701142908H2
ctttctcccacaaactccgattcttcttgtaaacagcggtgccaggtgttaatctagaagttgatataggatgggggcaatgatgtcgaggttctggttcatgttattccctgcaaaagagtataagattgttgttgttggattggataacgctggaaaaaccactaccctttataaattgcatctgggtgaggttgtaacaaccaatcctactgttggtagcaacgtcgaagagctcgtctacaagaatatacgatttgaggtctgg

SEQ ID NO: 53393 - DNA, 266 bp, Glycine max
  Clone ID: 701142909H2
aaggtcatctttgtcacgtgtgaagatgatgaaaaggttgctgatatacaaaggctgattgggtcatatgtgagattggaagcatcaactgctggggttaatctgaagttgtcctcttcagttgacatagaagacaattcttccattagaagttcttctgatgactgtgtctctggagttgaggttcctcttttcttctggtagaatctccaattttgatcagggtgcttctctggaagagttatcttgcttcctgatgcagagct

SEQ ID NO: 53394 - DNA, 148 bp, Glycine max
  Clone ID: 701142910H2
cgttatcttcttcttttgttgtttgtgtgtttgttttttctctcacctgaaaatgtcttgctgcggtggtaactgtggttgcggaagcgcctgcaagtgcggcaacggctgcggaggctgcaagatgtacccagacttgagctacacc

SEQ ID NO: 53395 - DNA, 147 bp, Glycine max
  unsure (1)..(147): unsure at all n locations; Clone ID: 701142911H2
aaccacgtcgttttgcaaaaacaaattttgaaacctcatatatgcgttaggttaccctctgaagtctgaactgaacacgatccagagagaacccctgctccttaacgangccgtttcgcaagcatcaatggagaagggaaagggagt

SEQ ID NO: 53396 - DNA, 107 bp, Glycine max
  unsure (1)..(107): unsure at all n locations; Clone ID: 701142912H2
tcatcaccgttgattgaagaagatgccgattcagaaacatcgccatcggaaggcctgaagaggctactcaccccgacacgttgntggcggggttggctgagttcacc

SEQ ID NO: 53397 - DNA, 151 bp, Glycine max
  unsure (1)..(151): unsure at all n locations; Clone ID: 701142914H2
ctaatcacctcctctgcctctcctttgtattctacgatggacncgcgcggccacgatgaggaggagtcaccgaaacctgtggttctgatcacaggatgttccacgggagggatagncgccgcgcttggnaggngccttccgctgaaaagaa

SEQ ID NO: 53398 - DNA, 146 bp, Glycine max
  unsure (1)..(146): unsure at all n locations; Clone ID: 701142915H2
ctcgctccgagttgactcactcctttccctttcgagatcaaccggccancgcnaacgcctnccgcgctnccgccgccactgnaacccccgcctcccttctccgtcaatgcaaaattcgggcgtcgattcttcgccggaaccttctc

SEQ ID NO: 53399 - DNA, 148 bp, Glycine max
  unsure (1)..(148): unsure at all n locations; Clone ID: 701142916H2
gcgatttctcatttcatttttcacacttcaacaatggngaaaaccttcaaatacatcatcctcggtggaggagtttccgctggttatgcggcgagggagtttgccaaacagggcgttaagccaggggagttggctatctttcgaaagg

SEQ ID NO: 53400 - DNA, 150 bp, Glycine max
  Clone ID: 701142917H2
cgttatcttcttcttttgttgtttgtgtgtttgttttttctctcacctgaaaatgtcttgctgcggtggtaactgtggttgcggaagcgcctgcaagtgcggcaacggctgcggaggctgcaagatgtacccagacttgagctacaccga

SEQ ID NO: 53401 - DNA, 270 bp, Glycine max
  unsure (1)..(270): unsure at all n locations; Clone ID: 701142919H2
aagattgcncagatgaagttcaacatcgcgagtcccaccactggatgccanaagaagctcgagatcgacgacgattcagaaactacgagcattttggggcaagaggatctcacaggaggtcagcggagatgcacttggtgaggaatttaagggctatgtcttcaaaattactggaggttgtgacaaacaaggattcccgatgaaacagggagtgcttactcctggtcgtgttcgacttttgcttcacaggggaactcctgcttccgtgga

SEQ ID NO: 53402 - DNA, 147 bp, Glycine max
  Clone ID: 701142920H2
ggagacttcgctgctaactggatctattgggttggcccattgattggaggaggtttggctggcttgatttatggagacgtcttcattggttcatatgcggctgtcccagcctctgaaacctaccctgagcttcaacttgaaaaatat

SEQ ID NO: 53403 - DNA, 149 bp, Glycine max
  unsure (1)..(149): unsure at all n locations; Clone ID: 701142921H2
gattcacnnacntntccncgangcacnagaagacgntcacttcccatgcttctgncaatgatttctgngtagcagacctaaaaggtccaganagcccntcaggcnatcagtgcaagccaccaaacacagtcacagtggatgactttgtg

SEQ ID NO: 53404 - DNA, 147 bp, Glycine max
  Clone ID: 701142923H2
agggtttcaagggatggaaaacatgcagagcttctggcaattgggtgatgaactccgtgggcactcaaaagcatcggaggatcacaagtggttaatggttgcctcgaaactggccgaacagacaagattgaagggggagcgtgtgaa

SEQ ID NO: 53405 - DNA, 148 bp, Glycine max
  Clone ID: 701142924H2
cgtttgccttgttgtttgcgaataaatggcaactaagaggagcgtgggaacgttgaaggagggtgatttgaaggggaagagggtattcgtgagggtcgatctgaacgtgcctttggatgacaaccttaacatcaccgatgacactaga

SEQ ID NO: 53406 - DNA, 266 bp, Glycine max
  Clone ID: 701142925H2
gctgaaccttgttgtgatctgacatggcagaagaacaacaacgacggatcctggtggccgtggatgaaggcgaggagagcatgtatgctctctcatggtgccttaagaaccttgcttttcaaaattccaaagacacccttcttcttctctacgtcaaaccccctcgagtcacttattcagccttcgatggcacaggatatttgttttcctctgacataacggctaccatggagaggtatagccaacaagtggccgattgcgtcttg

SEQ ID NO: 53407 - DNA, 147 bp, Glycine max
  unsure (1)..(147): unsure at all n locations; Clone ID: 701142926H2
gggagccaccattttgcgctccggcaatgttcttcccggnggccatcgtcccttaaacccaccacacttcaaagtcatgggtattccatgggacgacgtcgttgtgatccagcaagggaaggatcacaatgagccctgcatcgtcac

SEQ ID NO: 53408 - DNA, 117 bp, Glycine max
  unsure (1)..(117): unsure at all n locations; Clone ID: 701142929H2
gatgcctattgagtagtgtgtgtttgtacttttactnntanctctttttntttatttttgttatgattttaatnccgaagtagttgtcattaaaagtatgacacatttgaataaaaa

SEQ ID NO: 53409 - DNA, 258 bp, Glycine max
  unsure (1)..(258): unsure at all n locations; Clone ID: 701142931H2
gccggtcgtcgccgacactgttgcttcactctgttcctcttcgtgcgaagtactaggatcagatggcttgcgaggggtttggcaacttaacaagctgattgtcagttattgcaactggggcggaagtagcagaggtataagggcatttatggagtctcatttgccagcatttaaggagaagaatcctcaattagaggtggttactgaactcatccgtggtnagcatccacatctgaagggttatttacaagancangg

SEQ ID NO: 53410 - DNA, 268 bp, Glycine max
  unsure (1)..(268): unsure at all n locations; Clone ID: 701142933H2
ggcccttctagcatgctttctgctcaaagcgcaaacatgggtctgatacaaggaatcaatggtggtggaatgatcaaatctgagcctggatattctggttgttctccttacatgtttggtactgatggaaatgtcctggagacacgcccaactattggtggtgcttcagtcacatcattcactaatgttgagtccaactcacattctctgaatgaggtgggcctagatccagacacttcttcattggattctggggcagattccccna

SEQ ID NO: 53411 - DNA, 67 bp, Glycine max
  unsure (1)..(67): unsure at all n locations; Clone ID: 701142934H2
gcgtcttcaaaggaaataggatntggagaattgaaggacactgaggcttacgaggncagagctcatc

SEQ ID NO: 53412 - DNA, 266 bp, Glycine max
  Clone ID: 701142935H2
gggatcgcccctttctagagaacctgaaactaggggaaggtgttaaaggtgtatatatctcaatagatgtggattgtctcgatcccgcctttgctccaggagtgtctcacatagagccaggaggtctttctttccgtgatgttctcaacatcctgcacaatcttcaaggcgctgttgttgctggagacgtggtcgaatttaacccgcaacgtgatacgttgatggaatgactgccatggtagctgctaagctggtcagagaactgg

SEQ ID NO: 53413 - DNA, 267 bp, Glycine max
  unsure (1)..(267): unsure at all n locations; Clone ID: 701142938H2
aattgatgccagtncacattgccctgcaggcaaatgaagttgtgaaagcaaataacttgtctgatgttgttgttgtattgcatgggcgagttgaggatgttgaaattaatgaagaagtggatgttataatttccgaatggatgggctatatgcttctgtatgagagcatgctggnaagggtattaaagcctagagcntcgtnggcccaaacctggtggtcttattcttccttccaagttcaacgttgtacatggctcctgtcactca

SEQ ID NO: 53414 - DNA, 146 bp, Glycine max
  unsure (1)..(146): unsure at all n locations; Clone ID: 701142942H2
gtggaccaacaagaagtgtaagtnttcattcaatggccagcgctcagctnctcagcaatatcttcgtcgatctctacggcgtcgtttgaagggcttcgaccttcggctgttcagtttgcttccgcgggcagaattagaattggcca

SEQ ID NO: 53415 - DNA, 145 bp, Glycine max
  unsure (1)..(145): unsure at all n locations; Clone ID: 701142943H2
gacaatgaggcctgctcntgctttgcttcctcttctatttgcnttcttgttagctgccactacagnatncagannaagatacaggggaatattggaaaatgatcangaaagatccagganatgccnganggacttcaaggtcttg

SEQ ID NO: 53416 - DNA, 146 bp, Glycine max
  unsure (1)..(146): unsure at all n locations; Clone ID: 701142947H2
ccgccatgctgtagttcacgatcagacaacaggagaganatattgtcccctggacaatgttataatgaaccaagatgaagagatgtttaccgttagnccatagttcacttnctgagtttggtgttcttggatttgaattgggttac

SEQ ID NO: 53417 - DNA, 135 bp, Glycine max
  unsure (1)..(135): unsure at all n locations; Clone ID: 701142948H2
cgccaacaaactcttcaacaaatgcaccgtanactgacaactcgccaatcagnccgtgcactccttgctatacatgactacttttcgcgtctgcgtgcactcagttcactctggttgcttcgccctagagattga

SEQ ID NO: 53418 - DNA, 149 bp, Glycine max
  unsure (1)..(149): unsure at all n locations; Clone ID: 701142950H2
aaaaancttactctttttcangngacgnncnagtntcatttttcnnctccgttctcttntctctctgttcttcantcactctncattcattcacnatgacgaaaacaacatgncaatnggtctccttacgataacaacggaggatcatg

SEQ ID NO: 53419 - DNA, 144 bp, Glycine max
  unsure (1)..(144): unsure at all n locations; Clone ID: 701142951H2
agaaaggagagtttgtagaatacattcctaccagagaatattatcacaggcacacaagatgcttgtnctgggagggaaagcttatcctcccatttgctgatcaattttggtttaggtatctgtttggctggttgatgccaccca

SEQ ID NO: 53420 - DNA, 137 bp, Glycine max
  unsure (1)..(137): unsure at all n locations; Clone ID: 701142952H2
tntcggtaacagtctctcncatcgcaatctttcgaanaccctacnctctctcgctctctcttctgaagctgctcggaagaaggatcgagcagtttcgcattcgattccagcatgaatttcagtgagcncaatttcgg

SEQ ID NO: 53421 - DNA, 145 bp, Glycine max
  unsure (1)..(145): unsure at all n locations; Clone ID: 701142955H2
gttattttcagattgaaatgaaacaagaccttgaagtccttctggcatttcctgatctttcatgatcattttccaatattcccctgtatcttttcttnattctgtagtggcagctaacaagaaagcaaatagaagaggaagcaag

SEQ ID NO: 53422 - DNA, 140 bp, Glycine max
  unsure (1)..(140): unsure at all n locations; Clone ID: 701142958H2
tcggctttgatttctctctcctcgactcgatcccaattccactagggattcaattccgatgcgattccgagcttgttagatccacgacaaggtttcgtttcccagattcttttgtaaaaaaaaattcttcctcngccnaa

SEQ ID NO: 53423 - DNA, 141 bp, Glycine max
  Clone ID: 701142959H2
ctcgtttctggtccaaattcattgatgataaggtttttggtgctgcatggaaatccgttttcacagctgatgagaaagagcgtgagaagaatgttgaggaagcaattgaggctctgcagtttcttgagaatgagataaagg

SEQ ID NO: 53424 - DNA, 140 bp, Glycine max
  unsure (1)..(140): unsure at all n locations; Clone ID: 701142960H2
cctcgcntgtngcaagggtggtgatcttntcaaatgggacaaggcncaaatcggatattatgttggtattgacattgctgaaggctcgatcaaggactgccggacacgttacaacggtgatgctgaccatcatcagcgac

SEQ ID NO: 53425 - DNA, 143 bp, Glycine max
  unsure (1)..(143): unsure at all n locations; Clone ID: 701142961H2
gccttctgattttcttatgagccctcgtgtgcctagatttcaggtgctcgatgcattagtgagtctcttttgncgttctaatatatctgcngagacactgtgggatggtggtgggctttnacgccagnnggcttcctaacnag

SEQ ID NO: 53426 - DNA, 134 bp, Glycine max
  unsure (1)..(134): unsure at all n locations; Clone ID: 701142963H2
cacnantaccttccaggagattgctgnaannaaggacactgttggacagtatgagtctcacacagcctttacccntcctggactctaccgtgttgtgcacggcattgatgtctttgatccaaaattccacattg

SEQ ID NO: 53427 - DNA, 265 bp, Glycine max
  Clone ID: 701142967H2
caaccctcttcccttgttcgaaactagcctaatcaaaaccgaaacaaacgattacaaaaacaagaaaagaagaaaaataattcattcattgctcggtgagaagagagagaggaacggcccgatgaccgggaaggcgaacccaagaagcacacggcgaaggaaatcgccgcgaaggtggacgccgccaccactaaccgcggcggcgggaaggccggcctgaaggaccgatccgggttggagaagggcgggcacgcgaaatacgagt

SEQ ID NO: 53428 - DNA, 134 bp, Glycine max
  unsure (1)..(134): unsure at all n locations; Clone ID: 701142968H2
gaagactgttgaggtggcacctgatgtcaatatagacgaagtggctcgccggacagagggatatagtggagatgatttgacaaatgtctgtcgcgatgcttccttgaatggnctgaggcgcaagatagcaggaa

SEQ ID NO: 53429 - DNA, 142 bp, Glycine max
  unsure (1)..(142): unsure at all n locations; Clone ID: 701142969H2
gagcgtcganggatagtctcaagttcgcatgctttgacgctgnctccttgntctcgacgctctgggatgctaggaaagaggttgaattcccctttacttattattgattcttcagcacagttttggctatngcaagactgat

SEQ ID NO: 53430 - DNA, 140 bp, Glycine max
  Clone ID: 701142970H2
tgcctccttctggtctccctggtgttggtctcctacgctgcccggtcggaatcagcgctgggcggctggagccccatcaaggacgtaaacgacagccacgtggcggagatcgccaactacgcgctgagcgagtacgacaa

SEQ ID NO: 53431 - DNA, 143 bp, Glycine max
  unsure (1)..(143): unsure at all n locations; Clone ID: 701142972H2
ctcatgcagatgtagcttttgcataaggnatatactcttcacacattaaagtctggttacttggtgcttcaaaaatcacacaagttgtgtttcatgtactgccattttagatgcttgagttagatgcatgngtatggnacacg

SEQ ID NO: 53432 - DNA, 142 bp, Glycine max
  Clone ID: 701142973H2
gctgtttggacggtcacacgcagttgtattgtagaactgaacaagggtttctctttctctttctctgtctgcttcttcactttctctcgtttcaatcgaaaaaaatcatgggcagaaaattcttcgtcggtggcaactggaa

SEQ ID NO: 53433 - DNA, 140 bp, Glycine max
  unsure (1)..(140): unsure at all n locations; Clone ID: 701142975H2
ttcttntatgtggacggtgtgtgtgattttggcatcactggcctntgnagcactctgtgccaacccacgcaggccagtggatgtacncatntggccgaaactacgtgcccacatgggcctttgatcacatcaaatatttg

SEQ ID NO: 53434 - DNA, 139 bp, Glycine max
  Clone ID: 701142976H2
acatcaaaagagacatggctgagcaaaccttcatcatgatcaagcctgatggcgtccaaagaggccttattggcgagatcattagcagatttgagaagaaaggtttctacttgaaaggtttgaaacttgttactgtgga

SEQ ID NO: 53435 - DNA, 139 bp, Glycine max
  unsure (1)..(139): unsure at all n locations; Clone ID: 701142977H2
taggttcagggagagccagtttgatgtggtgaaggccnnggaaagctttgaatggtgaggttgtgtccgtgaatccggtttatgtcaaggctggggttgtttctgaagatgggtttgcaatgaacgtccagccttcgga

SEQ ID NO: 53436 - DNA, 127 bp, Glycine max
  Clone ID: 701142980H2
gtggatgagaacacttgatctgtggctgtaaatgtaaatcttcattttattcattgatgtgccacttctccagaaatatgtctgtagtcatgacaataaactaacggaagctcttcgtgggttaaaa

SEQ ID NO: 53437 - DNA, 142 bp, Glycine max
  Clone ID: 701142981H2
ccacacacacacatttcttcagagaaaaaaggattgagaaaaaaatgtgtcctctgcgattcattctgatattcttgtccgcaaccctcgccggttttttcgttctcagaaacctcagatctcagcctcaaattgaagaagg

SEQ ID NO: 53438 - DNA, 260 bp, Glycine max
  unsure (1)..(260): unsure at all n locations; Clone ID: 701142983H2
ggttaggctatggttgatgagagcgttgttgagtccccagtgaagaggcagagagatgatggtgaagaaaatggtgtctctgtttccatggacgcggagggtggcaaagaccctcttagtaacggtttatcatctgtgattcctgggtggttctctgaaatcagtgcaatgtggcctggagangcttcactccttgaaggtggaaaagatttgtttcaaggaaagtcagaataccaaaatgtcatggtcttccagtcatc

SEQ ID NO: 53439 - DNA, 141 bp, Glycine max
  Clone ID: 701142984H2
agctttcctcggttataaccttcaaggtggaaagaaaaacccacccactatcccaattccaataaataccttcctctctatattttcgcacaataccctctcacccttcaacgatgagttactacaatcagcagcaaccac

SEQ ID NO: 53440 - DNA, 139 bp, Glycine max
  unsure (1)..(139): unsure at all n locations; Clone ID: 701142990H2
ctnttgatgggcaggaggctaagccatacaagantgaccctgaaattttggcaatgacaaacttgatagcagcctatcagcggaatgaaatatnggaanttgagaaaatcttgaagngtaacagatgacccattcangg

SEQ ID NO: 53441 - DNA, 138 bp, Glycine max
  unsure (1)..(138): unsure at all n locations; Clone ID: 701142991H2
cacccatttggatcctctcttctcttctttgatctccgttaccctttttgttttctcannnnnnnnnnnnnnnnnnnatctttcgaagttcgtttgcgtgtgttgtgtggtcagtcaccgatggcagcaccacctgcg

SEQ ID NO: 53442 - DNA, 259 bp, Glycine max
  Clone ID: 701142992H2
tctcaatcgaatctcagaaaaatgagagaaatcatcagcattcacataggtcaggccgggatccaggtcggaaactcctgctgggaactctactgcctcgaacatggcatccagcccgacggcatgatgccttctgactccaccttcggtgtagcccacgacgccttcaacaccttcttcagcgaaaccggatctggcaaagcacgtcccccgtgctgtcttcgtcgacctcgaacccaccgtcatcgacgaggtccgt

SEQ ID NO: 53443 - DNA, 110 bp, Glycine max
  unsure (1)..(110): unsure at all n locations; Clone ID: 701142993H2
ctaaaccctactncattctccatacctcaacgaannggttaaagagacggcaacactttgctgtccgccttgaccgagcagagnttcgtcttggccctngatttngccna

SEQ ID NO: 53444 - DNA, 258 bp, Glycine max
  Clone ID: 701142994H2
ctcgtcttcaatcctttcgttattctcttattcatccttctcttctgaataatccagatctctttctgcccttttctccgtcacgcttttcgtgaccggatctgtatggatttgatccagatctacacgccgatggtggttttggccgggtctttcatagatctggtgcgtagaggctcagatctacggtaccgaggtacaacagagaatcgatgacaagaacgcagatccgacggtagatccagccgattccgcttg

SEQ ID NO: 53445 - DNA, 142 bp, Glycine max
  unsure (1)..(142): unsure at all n locations; Clone ID: 701142996H2
ggagagaganaataatataggggaagaagttgggtggtcaaaaaatgtagaagttgcaaagttcaaacccaaagcttgcagccatgaataagaagtttggtatgattcatggattatcttcccttgccaatataatgtcgtt

SEQ ID NO: 53446 - DNA, 276 bp, Glycine max
  unsure (1)..(276): unsure at all n locations; Clone ID: 701143001H1
gtccctcctttcctctgccttataattcttgtgacccttttngctggtagcattgaaagtgcaccagcaaacgtgaagccaagccattatgctgcacccttcaataggagtgtttttccttctggttttctatttggaataggctctgcagcttaccagatagaaggagcagcagctatagatggcagaggaccaagtatatgggacacctatactaaacagcaaccagggaagatttgggatcatagtgatggaagctagcattgatttttatca

SEQ ID NO: 53447 - DNA, 268 bp, Glycine max
  Clone ID: 701143005H1
acaatgaggcctgctcttgctttgcttcctcttctatttggctttcttgttagctgccactacagaatcaagaaaagatacaggggaatattggaaaatgatcatgaaagatcaggaaatgccagaaggacttcaaggtcttgtttcatttcaatctgaaaataaccctaagactcaagagcagcttggtaaaggttccaaaaaccattgtgaagagtctctagttacaaatacacaagttaatagtgcttcgaacccataccaagtg

SEQ ID NO: 53448 - DNA, 269 bp, Glycine max
  unsure (1)..(269): unsure at all n locations; Clone ID: 701143006H1
ctctctctcgccgtctaggtttttctctcaaaatttcgaaaccccgattttctctcaattccgaatctncgattcatcgtaacctaaattattagatagttatattatctctctgcgtttctttcagcaattttctattttctcctctcatggcttcagattccaaaaaggatttccctgctgatgacaaagctggaacagaagagagtaaaacatccaaagatgagacttcatctaaagattctccagagaacaaagagcgacagtat

SEQ ID NO: 53449 - DNA, 268 bp, Glycine max
  unsure (1)..(268): unsure at all n locations; Clone ID: 701143007H1
aaattgccatgcagccatgtctatcatggtgaatgcatcaccaagtggcttagcattaacaagaaatgtcctgtttgcaacactgaggtttttggcgaggaatcaacgcattagcatcaaggtggcaaaanaggatcctttttgctctattaatttttgcttctcatccaactcaccctctccctcccattctcttttttaagttttaattttttacacgtaggtaggtgtagtatgaagaactatggagctctcacacaatatatgt

SEQ ID NO: 53450 - DNA, 264 bp, Glycine max
  unsure (1)..(264): unsure at all n locations; Clone ID: 701143008H1
cgggtatggattggaagcagtaccggctcgtacccaagaacaagaatcatggattatggcttcctgcttttgctcctcttcttccatatcttccttcctcactccnctggtaancccagtggagtgtgtgtttctcaaggaggtcgttttcctcccttcaaatcagagggtagcactcccaaaaagggtcctaaagatttgactctttgccggatcttcgcaaaaagactgctgcgatgtaacccataccatcctgcactctgt

SEQ ID NO: 53451 - DNA, 272 bp, Glycine max
  Clone ID: 701143009H1
acttgatctcatcataatcgtcagcgtcaattgaagaagatgccgatcagaaacatcgccgtcggaaggcctgaagaggcgactcaccccgacacgttgaaggcggctttggctgagttcatctcaaccttcatcttcgtgttcgccggctcaggctccggcatcgcctacaacaagctcaccgacaacggcgctgccacccctgccggcctcatctccgcctccatcgcccatgcattcgccctcttcgtcccgtctccgtcggcgccaac

SEQ ID NO: 53452 - DNA, 267 bp, Glycine max
  unsure (1)..(267): unsure at all n locations; Clone ID: 701143011H1
gaatagaaaattccaacagcaccgtcacttcctctaccgctttcttcctcctcattaaggcgcaannnnnnnnnnnnnnnnnnnnnnnnnngttaggtttggtgacacttagttagaaagagcgtgcgaagagggtggggagaagatttagtgttgtggccatggcggagtctgagaagagtactgtgcttgttacgggagccggtggtcgcacaggacaaatagtttacaaaaaattaaaagagagncaaaccaatatgtggctag

SEQ ID NO: 53453 - DNA, 263 bp, Glycine max
  unsure (1)..(263): unsure at all n locations; Clone ID: 701143012H1
cagacacagagnagaatggcttctacccaatgtttcttgncaccaccatgctcttaccacccctgccagtgccagatccccatcactacgcatcttggttagcaccaagcctaaccagcttgtttgcaaggcacagaaacaacaaacaccacaagaggatattgatgtcagcccaatctcttcgccgtttagctctaactgtgctcattggtgctgctgctgttggctccaaagtccaacctgtgatgcagcctatggtgaag

SEQ ID NO: 53454 - DNA, 269 bp, Glycine max
  unsure (1)..(269): unsure at all n locations; Clone ID: 701143013H1
tctagatcgcgaacnncacgtggttatnatgtcagctttcgtttagnaacgctgcgtatganaggcttcctttggaagatgaagacccttcgatggcgcttcagggaggtggttcgattgggtcaccnggaggtggcggtggaggtgnccggtggcgttggtcaacagcagccatctcagcagcttatggggnattccactgcgcctcttttcnaggtttgaatcccaatcttctgaatcggttcagatgcgtccgagactttctgggc

SEQ ID NO: 53455 - DNA, 268 bp, Glycine max
  unsure (1)..(268): unsure at all n locations; Clone ID: 701143014H1
ctcgancgcgccaacaaactcttcaacaaatgcaccgtatactnacaactcgccaatcacctcgtgcactccttgctatacatgactacttttcgcgtctgcgtgcactcagttcactctggcttgctcgccctagagattgatgggcgcggtaaatagtatggcaaattaattntcatggatccatcactagcaatacttggtcatcataactcttgacaagttttcttgtgttgttttgttgtatcttgtatcactgatgttagtg

SEQ ID NO: 53456 - DNA, 268 bp, Glycine max
  unsure (1)..(268): unsure at all n locations; Clone ID: 701143015H1
cacaactgaaggctaagcttaagaacactaataatttggataagggtgagtttattagtagtttgaattcctatctagaaaacattagggacaaattaggggttgtgattggggttgattcatcctgtagtggttataccaggattttgattganaagcttggagttttcataggtaaagatgttgctggcctggttttggatgggagtgtttcttggagattgggaagtggtcaaggctttgattgttatggtattactgagcattc

SEQ ID NO: 53457 - DNA, 275 bp, Glycine max
  unsure (1)..(275): unsure at all n locations; Clone ID: 701143017H1
cgcgggtaaacggcgngagtaactatgantctcttaaggnanccanatgcnttcgnacatctaattagtgacgcgcatgaatggantaacgagattcccactgtccctgtctactatccagcgaaaccacagccaagggaacgggcttgggcggaatcagcggggaaagaagaccctgttgagcttgactctagtccgactttgtgaaatgacttgagaggtgtaggataagtgggagctggaaacagcgaaagtaaataccactacttttnacg

SEQ ID NO: 53458 - DNA, 271 bp, Glycine max
  unsure (1)..(271): unsure at all n locations; Clone ID: 701143018H1
cngncacancatctgtctnccnaagcaggaactaaatanggctgacgtgttgnnatngtcaaagcaagntaagaaacgnatgcctccatgtcgtctaccgtgttggtgaccttgatcgnnccatcaaattttacacaganatgttaggcactgaagnttttgaggcaaagagatatcncagaggatganncatgtnaatgcnctttctcggattgggccctgaataatcccattttgtngtngaattacatatatanggggtgacctgnat

SEQ ID NO: 53459 - DNA, 267 bp, Glycine max
  Clone ID: 701143022H1
gagagtgtgaatctgtttggtattaacaactatactgagtgcagcaccatccactgaggaagaaacattcaaaaggcccaagcatagcaccgagccaaaggtttccaaagttcttacacgaacagatgcatctgataccggcttatatgtgagggacggatatcagtggagaaaatatggtcaaaaagtcaccagagataacccttctcctagggcttacttcaagtgttcatatgccccaagctgccagtgaagaagaaggtgcaa

SEQ ID NO: 53460 - DNA, 266 bp, Glycine max
  unsure (1)..(266): unsure at all n locations; Clone ID: 701143023H1
cttaagcattataagggtgacatttcggagttggaactatactnctgttatagtaaataatgaatatgganaacaaacagaggaggaactgcttcccggaggaaggaacctacntgtcactaatgagaatgtcattacttttatccaccttgtagccaatcaccgcttgaattttcagatacgccaacaaagttcacatttcttgaggggatttcagcaacttatgcagaaggattggattgacatgttaatgaacatgaacttca

SEQ ID NO: 53461 - DNA, 268 bp, Glycine max
  unsure (1)..(268): unsure at all n locations; Clone ID: 701143024H1
aaccacctccgaatccgacgacctctgtccacacaacatacgatnanaggatatgnnagaacttcncttcccaggtttaagatgccggaggantcgataccaaaggaggcagcgtatcaaataataaacgatgagttgatgttggatgggaacccaannatgaacttggcatcatttgtgacaacctggatggagccagagtgtgataaactcatcatggctgccataataagaactatgttgacatgggagtatcctgtcaccactg

SEQ ID NO: 53462 - DNA, 266 bp, Glycine max
  unsure (1)..(266): unsure at all n locations; Clone ID: 701143026H1
ttcatctatggctacccttattgctcccagtcaaccnctctccncaagaanacnntnangctctcagaaaggcttttgaaggatgggggactgatgagaaaactgtcatagtaatattgggtcatagaactgtttatcagaggcagcaaatcagaagagtctatgaggaaattttccagnnggatcttgtgaaacgcctagagtctgagatcaaaggagactttgagaaagccgtgtaccgatggatatagaacctgcagatcgtg

SEQ ID NO: 53463 - DNA, 145 bp, Glycine max
  unsure (1)..(145): unsure at all n locations; Clone ID: 701143028H1
gtntatcgnnagnagaatatgaagttgtttgttttctttgttgctgcagtagttttggtancatggccatgccatggcgcaggctaccaaaggttccctctccgaatgaaaactggctatggtgagcgttcttcggaggtaaaat

SEQ ID NO: 53464 - DNA, 267 bp, Glycine max
  unsure (1)..(267): unsure at all n locations; Clone ID: 701143030H1
ctattgttggctatgtgtgtgcttccggccatggttgtggccattcgcccagcaaagaaccctttttgcgtgaagggtcgcgtctactgtgacccttgccgtgctggttttgagacctcagcaaccacctacattgccggtgctgagattatgttgcaatgcaagagcagggttagcaacgaggttgtgtacaccaagaaggggtacactgactcaactggagcatacacaatgtacgtggacgagganacgcagatcaaatatgca

SEQ ID NO: 53465 - DNA, 273 bp, Glycine max
  unsure (1)..(273): unsure at all n locations; Clone ID: 701143031H1
aatannacttagccatatctttanttngcanaacttgctctacaatgngtttccttcgttcttttgcaagaaacaaggatatatcaaaagtaggncgcagaggtatccattgcatgcagaaactatgtgcngaaaaaatatctccttattcactagagaaggcccaaaatcgtgtgatagatgcngcactcanacttgttcgagaaaatacaaggcttaaggacagaactcgtgnatagtttgggaggtgctgtgcnacttcaactctcttgg

SEQ ID NO: 53466 - DNA, 274 bp, Glycine max
  Clone ID: 701143032H1
ggaacccatgattcctcctccatcttcctttctcttccagttcctcctcctctttcctctcatactctcccattccgattccgattccggtcaccccgtgctcccgcgcccgctgatcgtggagtacccggagttcgacgcggtgctgcggtgcggcgcgtggcgcgtggcgggggaggcgaacaacctaggcgcgtgggcgataattcccgaggaatgcgcggagtacgtgaaggactatatgagcgggaaaggtacgcgttgacctggaaat

SEQ ID NO: 53467 - DNA, 265 bp, Glycine max
  unsure (1)..(265): unsure at all n locations; Clone ID: 701143035H1
aagaatttntgtctgcatcattatctatgaattcagattatgatgtagtaacacgcaacctgcgggcagatgtaaatggtaaatttcttgcattactagtntattcccattttattattctcttgcatatattctctgtcttttattggactgagtcaatcaaacttgtatattactccaggtgcactgatgctggaccatgagaataagaaggcaattgattccatgactacaagatggntggacagcttaactcattacaaga

SEQ ID NO: 53468 - DNA, 261 bp, Glycine max
  unsure (1)..(261): unsure at all n locations; Clone ID: 701143036H1
gcttagcaagtcccagggctgattacatcagtgtgcctgttgagggtccatacaagcctgctcactacaggtactaagtgattganatgatcaactgaaaagtgagtgagggaaagacaaaaatcggttttatcaatcggatttgattgtttaattttcctttttttgatttttggtgttagacttttcagatttgtggtagaagaatgtagccatttttatttctgtagaacttttgttcggtgggtgggaccagtaagg

SEQ ID NO: 53469 - DNA, 265 bp, Glycine max
  unsure (1)..(265): unsure at all n locations; Clone ID: 701143040H1
ttagcttgctcttggaattaatcgccactttttttgatataacagatcaaactgaagacgctggtcacaataagtgaataaagctcagatcgagtttcatcagagtcacaataatgaagcaagaagtggttccaaggtnnnnnnnnnnnnnnnnnnnnnnnnnnnnnnnnnnnnnnnnaaaattcagggtcttctcaagaccaagagcagaagagagtgtcacaaaccgagaaatcgccaagtttggaggcaaaagaggatcgtg

SEQ ID NO: 53470 - DNA, 266 bp, Glycine max
  unsure (1)..(266): unsure at all n locations; Clone ID: 701143041H1
gtagttatagagaacaaggacatggttttctcttcacttcgcaggtncctttagtatgaggcaccaaagctccaaggttcaggctttgtatgaacattgcaaaaccatcttatcgccctctggatcaccccctccttcgtcccaagctttgcagaagctttcttcgattctggacactattcaacctgctgatgttggccttaaagaagaaattgcagacgatgatcgagggcatggattttttgggctaatgcacttagtagatt

SEQ ID NO: 53471 - DNA, 267 bp, Glycine max
  unsure (1)..(267): unsure at all n locations; Clone ID: 701143042H1
agctcgctgtnatncgcancggcaaacaaacagtnagccatggccgtcggaaagaacaagcgcatctccaaagggnaaaagggtggcaagaagaaggcagctgatccctttgccaagaaggattggtatgacattaaggccccttctctttttcaagtgaaaaatgttggcaaaaccctcgtctctcgtacgcagggtaccaagattgcttctgaaggacttaaacatagagtgtttgaggtctccttgctgatcttcaaggggatg

SEQ ID NO: 53472 - DNA, 138 bp, Glycine max
  unsure (1)..(138): unsure at all n locations; Clone ID: 701143045H1
ctactacttcactttcatcctttgctccagaaaattaactagcncaggatggtcgagtgttgaagagattcgtaagggcgcaacgtgcagaaggcnctgccactgtcatggctattgggcaccgccacctantccaca

SEQ ID NO: 53473 - DNA, 271 bp, Glycine max
  unsure (1)..(271): unsure at all n locations; Clone ID: 701143046H1
gcttccntgtgtgccatcgnaagctgatagtatagagggantatatgacactttnaaggagtgtgncagtccattagccaaatcagntggaggaattggtgttagtgttcacaacattcgtgccacaggaatttacatccgtgggcaacanatgggacatcanatggnattgtnccaatgctgcgtgtgttcaacgatactggctcgccatgttgatcaagggggaggcaagaggnaaggtgcattgctgtgtcntggagncatggcatgc

SEQ ID NO: 53474 - DNA, 260 bp, Glycine max
  Clone ID: 701143049H1
tgaaaatgggttcttctttgtggactttgtgtctaattttgggcttcactagcctcttctgcattctgtgcctttccacggaggccagtggatgttccattcggcagaaactacgttcccacttgggcttttgatcacatcaaatacttcaatggaggttctgagattcaacttcatcttgacaagtacactggtactggcttccagtccaaagggtcatacttgtttggtcattcagcagaacataaagatggttcctg

SEQ ID NO: 53475 - DNA, 264 bp, Glycine max
  unsure (1)..(264): unsure at all n locations; Clone ID: 701143050H1
gagaacccnagggcacctttgtttgttgttgggactagcattggagctaatattctgataaaatatcttggtgaggatggtgagaatattcctgtagctggagctgtggctgtttgctctccttgggaccttttgataggagacagntttataacccgtaggcatgtgcagaagttttatgataaagcacttgcaattggacttncaaggttatgcaaaattacatcagncctcatttttctcccttgctaattgggaagggat

SEQ ID NO: 53476 - DNA, 253 bp, Glycine max
  unsure (1)..(253): unsure at all n locations; Clone ID: 701143051H1
ggtataggcttcgtatggaaagtcattttgaatccaaacaaaaactcgggaagtttgaaggatgaatgatggctgatgatggaatgaacaacttctaaaccgctggacattccaacattgtacaattttttggnttcaaaagagatgctgactgaatctcatacatatagaatgtttccatcttgcttcgattgagaaacataataatgactaagggtggaggaagtcgtggcaatctgaagatagaagagag

SEQ ID NO: 53477 - DNA, 127 bp, Glycine max
  unsure (1)..(127): unsure at all n locations; Clone ID: 701143052H1
gatccatctcttgntnctngctttctnnctncaccatgtcacttgctgggaaaatcaccactgaaatcggggttcatgcaaccgctacnaagtggttcaanctcttcgtnacacnantccatcatgt

SEQ ID NO: 53478 - DNA, 262 bp, Glycine max
  Clone ID: 701143057H1
cgaacatctgctgttgggttttatccctccattgctttgcactgccgccgataacaattttctgtatcgtgtattttttttttctttgttcacagctctgcgagatcttcattcgccgattttaaaagatgagtaagcttcagagtgatgctttgcgtgaagccatttcaggaatcatggccgattccaaggagaagaatcgcaaatttgtggagaccatcgaactccaaatcgggttgaaaactacgatccacagaaggac

SEQ ID NO: 53479 - DNA, 260 bp, Glycine max
  Clone ID: 701143059H1
ctggtggtaccatgcgggactcatttctagtaaatggtgttgccttcaaaaagacattttcatatgctgggtttgagcaacaacccaagaagtttctcaatccaaaaatactattactaaatgttgagttggagctaaaatctgagaaagaaaatgctgaaataaggttatcagatcctgcgcaatatcagtcaatagttgatgcagaatggaatattatttatgacaagttggataaatggtcagcagtggtgccaaag

SEQ ID NO: 53480 - DNA, 262 bp, Glycine max
  unsure (1)..(262): unsure at all n locations; Clone ID: 701143060H1
gcaacttccaacaccatagtgaaanngcttccaaggctgcacttctcttgtgtttcaatgttctcttcttcaccgtggttagctccacatatgtgccatgcaacccaccccccanaactccaaaacacccacctgtcccaaagccaccttccccaaagcaagcaagttgccccaaagacactatcaagtttggtgtgtgtgctgatgtgttaggtttgatcaacgtgcaacttgggaagccacaaagaccccatgctgcaac

SEQ ID NO: 53481 - DNA, 263 bp, Glycine max
  Clone ID: 701143061H1
gttcaagctctgcaaggttaggtcagtacagtttgggccagaaaggtatcccatacctgaacacctatgatggtcgcaccatccgttacccagaccctctcatcagggccaatgacactgttaagctggatctggaggaaaacaagattgtcgattttatcaaatttgatgttgggaatgtagttatggtaacaggccgaagaaacagggggcgtgttggagtgatcaagaacagggagaagcaaagggtagcttcgagacaa

SEQ ID NO: 53482 - DNA, 270 bp, Glycine max
  unsure (1)..(270): unsure at all n locations; Clone ID: 701143064H1
gtgcctcacaccgccggcaggtactcggtgaaacggttcangaaggcgcaatgccccattgttgagaggctgaccaactctctcatgatgcacggtagaaacaatggcaagaaactcttggctgttaggatcatcaaacatgctatggagattattcatttgttgactgaccagaaccccattcaggttattgttgaagctgttgtcaacagtggtccacgtgaagatgcaacaagaattggttcagctgagttgttaggagacaggctg

SEQ ID NO: 53483 - DNA, 264 bp, Glycine max
  unsure (1)..(264): unsure at all n locations; Clone ID: 701143065H1
ganaatgggtnnntntnngtngactnngtgnctaatnttgggcttcactagcctcttctgcattctgtgcctttccacggaggccagtggatgttccattcggcagaaactacgttcccacttgggcttttgatcacatcaaatacttcaatggaggttctgagattcaacttcatcttgacaagtacactggtactggcttccagtccaaagggtcatacttgtttggtcacttcagcatgaaataaagatggttcctggcga

SEQ ID NO: 53484 - DNA, 260 bp, Glycine max
  unsure (1)..(260): unsure at all n locations; Clone ID: 701143066H1
cttttcttcaaatggtagcaagaggcatcaagagcaaaagacattgttaatttcggagatggcgagttacgaggctattaagaacttnnnnnnnnnnnnnnnnnnnnnnnnnnngatggcactcctccataaccagatctctgaatcaagatctgccactgtttctcccaccattgcccaaactaccccgcttcaccttcacatcaacaacattattgaggaacaacacataatcgcaaggccaactcaaccccaaccca

SEQ ID NO: 53485 - DNA, 260 bp, Glycine max
  unsure (1)..(260): unsure at all n locations; Clone ID: 701143067H1
ggtataggcttcgtatggaaagtcattttgaatccaaacaaaaactncgggaagtttgaaggatgaatgatggctgatgatggaatgaacaacttctaaaccgctggacattccaacattgtacaattttttggtttcaaaagagatgctgactgaatctcatacatatagaatgtttccatcttgcttcgattgagaaacataataatgactaagggtggaggaagtcgtggcaagttctaagatagaagagagcttng

SEQ ID NO: 53486 - DNA, 256 bp, Glycine max
  Clone ID: 701143068H1
aaacgaggcaatttggcacagcgtgtccatgggtcagactcacacccgcaagcaaaagaaatagctcagtctcattgagaaggagcaattgtggcccaaaatgttcggtgtcccaattggaattgaagagtgagagtgagagcaaaacgaagccgtatccagcagaggcatcgaggaccataatggagttggctaaggtgggcacgctgtgtacgttgacccaagagggtttgcccctggtactggggttcgattc

SEQ ID NO: 53487 - DNA, 259 bp, Glycine max
  unsure (1)..(259): unsure at all n locations; Clone ID: 701143072H1
cttgctaccaacactgagcttaaccgagcttcgcaaagatgaatcnggaaaagttaatgaagatggccggttcggttagaactggaggaaagggtactgtgagaagaaagaagaaggctgtccacaagacaacaaccacagatgacaaaaggcttcagagcaccctgaagagaataggggtgaatgccatccctgctattgaagaggtcaatatctttaaggatgacgtattatccagttctaaatcccaaagttcaag

SEQ ID NO: 53488 - DNA, 258 bp, Glycine max
  unsure (1)..(258): unsure at all n locations; Clone ID: 701143074H1
accgactcagttgttgtcagcgagtgagtgagtcgtttctctgcagcaacaaggtttagccactccaaacagacganaaatgggtcgtggggtcagtgctggtggtggtcagagttccttaggttatctctttggcagtggggtgcctgccagcagtgcaaacagtcagcctgcaaatggtgctcgcactcaaaatgctagtgctccttcaccaccagtcgataagcaaagtccagcacagcaccagcaccagcacca

SEQ ID NO: 53489 - DNA, 240 bp, Glycine max
  unsure (1)..(240): unsure at all n locations; Clone ID: 701143075H1
gaaattagcgngaaaaatgttggncngtgttcagcagctccactagtgtcgccnccggaggacactcgttgccgccggcagccgtacaccgtcgccgaagatnacggcggcggcgctgcggaagtggttcgaggagaagaacccctccgcagtgtcggtggaggtcggagagcatgtccagctcgcttatacccaccagaacgagtcgccgtttcagcncagatcctttgctgtgaagga

SEQ ID NO: 53490 - DNA, 127 bp, Glycine max
  Clone ID: 701143077H1
gaaaaaccaaagctttgtgggtttgtgtggacttttttttagtgcaaaaaacaaagtgccacccctctctttttttccccactttttctaccttctggggttattgattatccatcaaaatctcttc

SEQ ID NO: 53491 - DNA, 260 bp, Glycine max
  unsure (1)..(260): unsure at all n locations; Clone ID: 701143078H1
agggcctgcatttgcacctcctttcattagggaaggtatttggtgtggtagcgcaaactccacaactgaagaaggaaaggatttnaaggacttgcgaatcatggttgatgttggtgatatccctattcaagaaatgcgagattgtgggataggagatgagagactcatgaaagttgttagtgattctgtcaagctagtgatggaagaggatccattacgtcccttaattttgggtggtgacactcaatctcatatccagt

SEQ ID NO: 53492 - DNA, 262 bp, Glycine max
  unsure (1)..(262): unsure at all n locations; Clone ID: 701143079H1
cntgaggngaatangaagtngtnngnntncnnngttgctgcagtagttttggtagcatggccatgccatggcgcaggctaccaaaggttccctctccgaatgaaaactggctatggtgagcgttcttcggaggtaaaatgcgcaagttttaggcttgctgtggaagcacacaacatccgagctattnnaaccattcctgaagagtgcgttgaaccaacaaaggactacatnaaatgggcgaacaattagtcagatctaaaac

SEQ ID NO: 53493 - DNA, 239 bp, Glycine max
  unsure (1)..(239): unsure at all n locations; Clone ID: 701143081H1
ctctcattccacctgaagcaaaaaatcngccggccaatggagcnagataatgaggaagaggacttcaacaccgaaccgctatttgtactcatgatgagtgttaaaaataatactcaggtactgataaattgtcagaacaacaaaaagcttctgggtcgtgtaagggcttttgacaggaatgcaacatggttcttgaaaatgtcagggagatatggactgagtgccaagactggtaaang

SEQ ID NO: 53494 - DNA, 260 bp, Glycine max
  unsure (1)..(260): unsure at all n locations; Clone ID: 701143082H1
ctccaaccttagtttcaattctaaacttgttcaccctttattctctcctcttccaaacatcaancatgnaactcaataataaccttggtgacatccaccttgctctttctttctttcactttgtcatgtgctattgacacctccaccatcaccaactacaccgacaatgaggtcatgaccatgtacgaggagtggttggtgaagcaccaaaaggtgtacaatgggttgagagagaaggacagaggttccaagttttcaaa

SEQ ID NO: 53495 - DNA, 255 bp, Glycine max
  Clone ID: 701143083H1
atttctctctgtttccttcttcaccgcatcaatggagttggacggcgttctcctcggcatgtgcaaccctctcctcgacatctctgccgtcttcgacgacgctttcttgcaaaaatacggtatcaagttgaacgatgcgattctcgctgaggataagcacaaacctatgtatgaagaattggctaacaatcctaatgtggagtacattgctggaggtgctactcagaattcaatcaggttgctcagtggatgctt

SEQ ID NO: 53496 - DNA, 255 bp, Glycine max
  unsure (1)..(255): unsure at all n locations; Clone ID: 701143086H1
ctcnnccgtngtgttttactntatggacccccnggcactggcaaaacaatgcttgccaaagctgttgcgaatgcataccactgctgctttcatcagggttgtnggatctgagtttgtgcagaagtatcttggtgagggtccacgaatggtccgtgatgtatttcgtcttgctaaagagaatgcccctgcaattatatttattgatgaggttgatgcaatagccactgctagatttgagcccaaactggagctgat

SEQ ID NO: 53497 - DNA, 123 bp, Glycine max
  unsure (1)..(123): unsure at all n locations; Clone ID: 701143088H1
aaaaaccagantgacggcgtgtatatttgtntnacatatagttgtttttaatntgttggaaagagtgcaatacgtatgnatttattggnaaganaagggttgggatccggataaagtaatanc

SEQ ID NO: 53498 - DNA, 256 bp, Glycine max
  unsure (1)..(256): unsure at all n locations; Clone ID: 701143089H1
tgagctataagctagtttatcgtgaggagaatatgaagttgtttgttttctttgttgctgcagtagttttggtagcatggccatgccatggcgcaggctaccaaaggttccctctccgaatgaaaactggctatggtgagcgttcttcggaggtaaaatgcgcaagttttaggcttgctgtggaagcacacaacatccgagccttaaaaccattcctgaagagtgcgttgaaccaacaangactacattaatggcg

SEQ ID NO: 53499 - DNA, 256 bp, Glycine max
  unsure (1)..(256): unsure at all n locations; Clone ID: 701143090H1
gaagagggccctgccggtcagaagataaataccgtctttcattttccggcgatctcttttttcttccatcaccgttttccggctatccctaatccttaacagaaatgacgacatcaaggcgccttgcggacaggaaggtggagaagtttgagaaaaacatcaccaaaagaggatttgtgccagacacaaccactaaaaagggganagactaccctgttggcccagtgctgctcggttcttcgtctttgttgtcatt

SEQ ID NO: 53500 - DNA, 248 bp, Glycine max
  Clone ID: 701143091H1
cgagcttaaccttgttgttttcaagaaacgagttggaaacgctacttcattttaccaacatggtaatttacccgctgattgtcccagtctcacattcactaaatccctcatagagttgatggagcctctcgtgagtgagaaacaaaaaccaccacctcttgagtttcacaagaggattccctatttggcctaaatttgtggatgtttccactaggaagaggttggtgtaattgacattggggtagggg

SEQ ID NO: 53501 - DNA, 250 bp, Glycine max
  unsure (1)..(250): unsure at all n locations; Clone ID: 701143093H1
cgaggagcagcctcaggaggagaaggatgtctcacaggaagttcgagcacccaangcacggttcactgggatttcttcccaggaagcgtgctgctcgtcacaggggaaaagtgaaggcattccccaaggatgacccatccaaggcacccaagctcactgcattcttgggttacaaggccggtatgactcacattgttagagaggtcgagaagccaggatcaaagcttcacagaaggaaacttgtgagcct

SEQ ID NO: 53502 - DNA, 259 bp, Glycine max
  unsure (1)..(259): unsure at all n locations; Clone ID: 701143094H1
ctagttgttggtctttatatttagttattgacatcaacaaagtcatngaggaagttaatgtggttcaaaccaagaatggaactgtttcagtagcttctgcgtttgctggccataaggaagctatacagcaaagggaccacaaatttttaagaattgctgttgaagaagcgtataaaggggtagactgtgaagatgggggtccctttggtgctattatagtttgtaatgatgaaattgttctagatgtcacaacatggtt

SEQ ID NO: 53503 - DNA, 289 bp, Glycine max
  unsure (1)..(289): unsure at all n locations; Clone ID: 701143101H1
ctgctccgtaccagtttcactgcataaatttgagacgaanacttctgcaaacactcnttggtttatcaggacctccttacaggtgatgagcttctctcggactccttccgttacaatgaaattgagaatggaatgctgtgggaagttgaggggaagtgggttgttaagggagcagttgatgttgacattggtgcaaacccttctgctgagggtggagaagatgagggagtcgatgacgcagctgttaaggtgttgacattggtgatacnttcagacttcnngagcnacc

SEQ ID NO: 53504 - DNA, 288 bp, Glycine max
  unsure (1)..(288): unsure at all n locations; Clone ID: 701143103H1
tctgcttctaatggcgagtttcagaaacgctgcgatcaacgtcttcagagcgatcaatactaacaaagccaccatcgctgcttccacaaactctcttcacactctcaggccccttttttgttattctaggtctacccctttctcttcccacactgaagctgaatccctgcaaatcgatttatctaacgaagaaagcaaaagatgcttgtttaaccggctattgtatagaagcaaacaacgagggttcctggaactcgatttggtcctcgggaaatgggttgaggnaaa

SEQ ID NO: 53505 - DNA, 286 bp, Glycine max
  unsure (1)..(286): unsure at all n locations; Clone ID: 701143104H1
cttggagaaagcgccggaggggtccttcaagaataagattcatgggttatnncctgttttttgttttgttgttcagtggtaaagttgtttatttcttgatttcgagtttttttgcaggttgggctgcggctcttgtcgcgggttaagccctcggagatatttttgaagtctatatcgaaggaaatcactagtgttgaaatcatctatccatcaagtttgaatgctcaacttgttcgtcgaagactaagacatattgctgtgaggggagcaatatccaccggaaata

SEQ ID NO: 53506 - DNA, 290 bp, Glycine max
  unsure (1)..(290): unsure at all n locations; Clone ID: 701143106H1
gtaagagagaagaaagaagcaaatggcaaactttcccagttgttgacatggggaagcttaacaccgaagagagactgcagccatggagattataaaagatgcctgtgagaactggggtttctttgagttggtgaaccatgggatatccattgagcttatggacacagtggagaagctcacaaaagagcattacaagaagactatggagcaaaggttcaaagaaatggtgaccagcaaaggtcttgagtcagttcagtcaganatcaatgacttggactgggaaagcacct

SEQ ID NO: 53507 - DNA, 289 bp, Glycine max
  unsure (1)..(289): unsure at all n locations; Clone ID: 701143108H1
ggatcganacaggttagagatgagncccagtgcngatactgaggagntcagaagtattaagtcccaaggagaaatctgaggaggaatatttgacctatgaagccaagattattaccaccttcagtgtagtggataacataaaacagcagttttatgctcaacaggggagaatttccaggttttgtattttctttctagataactttatggggttgcttattaactgagaatttgacagttagttggttcanaataaatataatttgtaaatcctgcagtaaagtggctg

SEQ ID NO: 53508 - DNA, 289 bp, Glycine max
  unsure (1)..(289): unsure at all n locations; Clone ID: 701143112H1
caatttcatgtcatctncatcaccatcatcattattcaaagantttggcacgtggttatggcatgcaggaatatgaattctcatgcagcaacagtccacatcctgtttttttccatgtgccaaagaggaagcatcatttcaacttcccttgcatgaacaccccagaggttgttgaagagcctaataataggcctgtggttttggtgcctaataatatgacacctgaatacactttcaaccttaggtttgataatattaatgcatctgattttgcncctggggagaggaa

SEQ ID NO: 53509 - DNA, 290 bp, Glycine max
  unsure (1)..(290): unsure at all n locations; Clone ID: 701143115H1
cattcgacaggtagagtttcttcaatggctcctaaagttgataagaagaacgacccaaaggcacaggccttgaagactgctaaggcagttaagtctggtgctacctttaagaagaaggcaaagaagatccgaacttctgtcactttccacagaccgaggacattgaagaaggataggaaccccaagtaccctcgcattagcgcgcctccaagaaataagcttgatcattatcagatcctgaaataccctctgnccactgaatccgccatgaagaagattgaggacaacaa

SEQ ID NO: 53510 - DNA, 288 bp, Glycine max
  unsure (1)..(288): unsure at all n locations; Clone ID: 701143116H1
gtgaaaatgtcagtggtggttgtggttattggtgtcggtgtttgcactgtaactggatgtaaaagttaacctcaaaggtttcatgtgtgccgtatanncagttttgtcaacatctttaccagcaaatttcaataggttctcttcaaaagaantnttcaattggatctttgaattgctgngtaaaactgctcccatccaagcgctttttcttcttattcntggtcctttgttgattactacntcagtggcaaattggtaaccanctataagangtctctggtgccattt

SEQ ID NO: 53511 - DNA, 284 bp, Glycine max
  unsure (1)..(284): unsure at all n locations; Clone ID: 701143120H1
ttcntcaccatgtcacttgctgggaaaatcaccactgaaatcggggttcatgcaaccgctacaaagtggttcaacctcttcgcaacacaactccatcatgttcaaaacctaactgatagagtgcatggaaccaagctgcatcaaggtgaagactggcatcacaacgagacagtcaagcactggacttataccatnnatggtaaggttacaacatgtctggagagtattgaatccattgatgaacagagcaaaacaatcacctacaagctcttcnncntngcatg

SEQ ID NO: 53512 - DNA, 280 bp, Glycine max
  unsure (1)..(280): unsure at all n locations; Clone ID: 701143122H1
ttcagcattggtactgtgggtaatgagagaattaccacctnaagaagctgctagcatatctgaagaatcaagtacaatagcttttgttgctgatagttcaattgcaatccatcatcctcaacgctggactacagcaacaagcatgcagaatcagaaaattattttttaatatgaacatggaatgcttaactttgacaggcagcactttaagattcacattcatattgttcctacaagtgtcatcgtacaagacatcaagagcgagtcctatgtgattatg

SEQ ID NO: 53513 - DNA, 284 bp, Glycine max
  unsure (1)..(284): unsure at all n locations; Clone ID: 701143124H1
gccagtagtcatatgcttgtctcaaagattaagccatgcatgtgtaagtatganctaattcagactgtgaaactgccgaatggctcattaaatcagttatagtttgtttgatggtatctactactcggataaccgtagtaattctagagctaatacgtgcaacaaaccccgacttctggaagggatgcatttattagataaaaggtcaacacaggctctgcctgttgctttgatgattcatgataactcgtcggatcgcacggcctttgtgccggcgacgcatc

SEQ ID NO: 53514 - DNA, 293 bp, Glycine max
  unsure (1)..(293): unsure at all n locations; Clone ID: 701143125H1
gtttcnacnacgtcatggttgacggagttgggctcattcatttcacactcacngtggcntangntagcntgcggagccatgaaggagcgtccattccaacccgtgtngagcagggngnttntcttcgccagggatccgccangtgtcaccttcanccaccgcgagtacgnacaactcacagactccaacgatgccgtttcaacagacttcgagcagtattccttcttcttcggncccaccgaaaccgcctccatccgcgccctcctcccccgtgacctcgaccaacgcgccat

SEQ ID NO: 53515 - DNA, 286 bp, Glycine max
  Clone ID: 701143127H1
tccctggttctcccatcgcgaaattagggttcgctcacttgtcttcaatttcccagattcacctagcaccatccataaatccccctattaacgtgtctttcggaccgatttttctacgtgacgcatcgcaattcttcagcggtttcgtttagggaacccgcgaaaccgaatcagatagtgcggcacggaaactaggaattaaagcaatggcagaagatctggtgctggatactgcaatcagagactgggtgttgatccctctctctgtggttatggttctcattgg

SEQ ID NO: 53516 - DNA, 287 bp, Glycine max
  unsure (1)..(287): unsure at all n locations; Clone ID: 701143128H1
gcntacattgtgagacaggctgctaagagcattgtggcaagtggactagccagaaggtgcattgtgcaagtgtcttatgccattggtgtgncccgagcctttgtctgtctttgttgacacctatggcaccgggaagatccatgataaggagattctcaacattgtgaaggagaactttgatttcaggcccggtatgatctccatcaaccttgatctcaagaggggtgggaataacaggttcttgaagactgctgcatatggacacttcggcagagaggaccctgact

SEQ ID NO: 53517 - DNA, 291 bp, Glycine max
  unsure (1)..(291): unsure at all n locations; Clone ID: 701143133H1
cttcttttcacactgccgctgcaanaatggcttcagagaagaaantttcgaacccaatgagggagataaaagtgcagaagcttcgttctcaatatctctgttggcgagagtggagatcgtctcaccagagccgccaaggttcacttcactcattgctcccgctttttttttttctaaattttnaatttcngttttnctncttgcaggtgttggaacaacttagtggccaaaccccagngttttccaangcaagnnnnncgntcgntccnttgggattaananaaatngggc

SEQ ID NO: 53518 - DNA, 288 bp, Glycine max
  unsure (1)..(288): unsure at all n locations; Clone ID: 701143134H1
ctggctccctgccagatacataagtaatgantcagttgagctgaagactcacaatgatgtcattcggttctctctaggcaagtctgatgatattgataatgcaaagaagagccagctgaacaaaaaatttaaaatgtctagaaaggctaaactgaatgagctgaggttctatcgtttgaaggccaagaaaaagatgaattccccaaatccagaagttagaattagatataagcttgaaaaggccaagcgaaaggnaacttggttgattgagaagctacggaaatttga

SEQ ID NO: 53519 - DNA, 287 bp, Glycine max
  unsure (1)..(287): unsure at all n locations; Clone ID: 701143139H1
ctntcctcgccgtttctctcatcgctagtttcaagtctccttgtgacaatggtgagggttagtgtgttgaatgatgctctgaagagcatgtacaacgccgagaaacgggggaagcgccaagtcatgattaggccgtcctcgaaggtcataataaaattcctcttggtgatgcagaagcatgggtacattggtgagttcgagtatgttgatgaccacagggctgggaaaatcgtggttgaattgaatggcaggctgaataagtgtggggttataagccctcgctttga

SEQ ID NO: 53520 - DNA, 287 bp, Glycine max
  unsure (1)..(287): unsure at all n locations; Clone ID: 701143140H1
gaganattaantggacaggnggttgnanttaaagtacaaaggcctggtctcanggatcttntctggtantgatcttannaacctgagggttatngctgnatatctcnnntcaatcgntccaaaatcagatggcgcaaagagggattgggntgctatttatgatgaatgngcctctgtcttatatcaggagatngattacaccaaggaggcngctagtgcagaattgtttgacngtancttaagaacatggnttatgtgnaagttcctncaatctactgggntatacc

SEQ ID NO: 53521 - DNA, 290 bp, Glycine max
  unsure (1)..(290): unsure at all n locations; Clone ID: 701143141H1
ccggaagcaccgtatctgtggtgatcgcacgttaaaattctcgaaatctaaaacccttcgttctcttccatttcttagagtagaaagaacaaagaggagaaaatgaacaaggataagatcttcaagctagcgaaggggttcaggggtagagccaagaattgcataaggatagcaagggagagggttgagaaggccttgcantattcctacagagaccgccgtaacaaaaagagggacatgcgatccctttggatccaaaggatcaatgctggtacccgcattcatggggt

SEQ ID NO: 53522 - DNA, 285 bp, Glycine max
  Clone ID: 701143142H1
ctgtttggtgcttactctttttggttacattcctggaattatctatgctgtctatgctatcaccaagtgatcatattcatcacctcttgtagacaatgaataatttgtcaaagtacaacggttatgcatgtttctcaactccagcattgatataatcgtttgatctcagaacaatgtgattcttttttgttttctgtctatcagactctattcgttttcagttttcattgttgtgtttttaattactgttattgtcttgtatggaaacgaaatgtagacatcgtg

SEQ ID NO: 53523 - DNA, 288 bp, Glycine max
  unsure (1)..(288): unsure at all n locations; Clone ID: 701143144H1
gcctcaggtaagcnaaanccatggttaagcataacaatgttatccccaacggacacttccgtaagcactggcanaactatgtgaagacctggttcaatcagccagcacggaagacacgaagacggttggctcgtcagaagaaagctgtgaagattttccccagacctacagctggacctcttagacccattgtacatggtcaaactttgaaatacaacatgaaagtgagagctggaaggggattttcccttgaagaactcaaggcagcagggattcccaaaaagcttt

SEQ ID NO: 53524 - DNA, 290 bp, Glycine max
  unsure (1)..(290): unsure at all n locations; Clone ID: 701143148H1
gnctcagagancttgcttcttncagcntcnnaatgggcttctctcctgntaccagaagcannaccttgcattttgttcttggctctgcctgtnntgtacttgcttcnctttcnacagatgcttatgatccgcttgacncaaatgggaatatcacaatcanatgggatattatnagctggncncctggtggatatgtggcctgttgttacgatgaacaacttccaacaatatcgtcatatcgcttcacctggctggtcaatgggatggacatgggcgaaaaaggaggtaat

SEQ ID NO: 53525 - DNA, 289 bp, Glycine max
  unsure (1)..(289): unsure at all n locations; Clone ID: 701143150H1
cttgagatccccattttctccgaagcaaagccatggctaagggtcctggtctctactctgacatcggcaagaaagctagggatctgctgttcaaggactaccacagtgaccagaagttcaccatcaccacctactcaccgactggagtggctattacagcatcaggaaccaggaaaagtgaactgtttcanngctgatgtcaacacccagttgaagaacaanaacntcactactgatatcaaagttgatacagattctaatctcttcacnactatcatgtccaatgnac

SEQ ID NO: 53526 - DNA, 269 bp, Glycine max
  unsure (1)..(269): unsure at all n locations; Clone ID: 701143152H1
ggacgntgnccggaaagatcaagaagggcgccggaggaagaaatggcggcggccctaagaagaagccggtttcaaggtccgtcaaggccggtctccaattccccgtcggaagaattnnccgttattncnagaaaggaaggtacgcccagcgtgtcggtaccggtgctcccgtttacttggccgcagttctcgagtacctagctgctgaggtgttgagtggtgggaatgtgcacgtgaaaaagagacagatatcgagcttgtgttgtgta

SEQ ID NO: 53527 - DNA, 284 bp, Glycine max
  unsure (1)..(284): unsure at all n locations; Clone ID: 701143153H1
agaccanccttgtgccctaccctaggatccacttcatgctttcgtcctatgctccggttatctctgccgccaaggcctaccacgagcngttgtcggtgccggagatcaccaatgccgtgttcgagcccgccagcatgatggccaagtgtgatccaaggcacggcaagtacatggcttgctgcttgatgtaccgtggtgatgttgtccctaaggatgtcaatgctgctgttgccaccatcaagactaagaggactgttcagtttgttgatggtgtccaactggat

SEQ ID NO: 53528 - DNA, 288 bp, Glycine max
  unsure (1)..(288): unsure at all n locations; Clone ID: 701143156H1
tttaggttgggatttgggaattagggttattcgcgtggcgaagatgattgangtggttttgaacgatcgattggggaagaaggtgcgcgtgaagtgcaacgaccgatgataccatcggcgacctgnagaagcttgtggcggctcagactnngcacaagagccgacaagatccgcatccagaagtggtacaccatctacaaggatcacatcactctcaaggattacgagatccatgacggcatgggtctcgaatctactacaactaaacacaacaaggtgtgtttatgc

SEQ ID NO: 53529 - DNA, 288 bp, Glycine max
  unsure (1)..(288): unsure at all n locations; Clone ID: 701143157H1
atnctggtactgattctantagagtttntggcnnnaagagacccttgtctgactaccnattgantcaccagntccaacnatctncaagcaatantgctgcnnatggacatcntgtgtatgtccgtaganaatcagaagcaganttgagcaagggcattgcttatgaaaatccaagtattaatgcttattgttcacattctaggcaactttgttgtgaagaggagactgcnnanccaaaatctcagatnaaggagccacctcagttaaaggaacctaaggcttcttgct

SEQ ID NO: 53530 - DNA, 287 bp, Glycine max
  unsure (1)..(287): unsure at all n locations; Clone ID: 701143162H1
tcgannttgtatgatgaatgggttaacaagggcantgcaccggcantgcgcgagantcttaagaattanaacaagctggtgtctcttggcttcnagattntattcttgtcaggaagaacactgnacaaacaggccgtaacagangcanacttaaagaaggctggctaccacacatgggannantaacttctcaaggatccacaagatccttccactccaaatncagtttcntacanaacagcagcgagagaganactgataaggcagggatacaacattgttgggat

SEQ ID NO: 53531 - DNA, 289 bp, Glycine max
  Clone ID: 701143165H1
caaaaatctcccttctaaccttattcttcttctcgtccttcaccatcattggcgcatgcaattgttcctcaaaacgaaaccttcaaatttgagaactcaggtgaacttggaccctacatcgttgagtacggtgcagattacagaatgataagcatcttcaactctccattccaagttggtttctacaacaccaccccaaatgccttcactctagctttgcgtgtagggctccaacgctcggagcagctatttcgttgggtttgggaggccaatagggccaacccagttg

SEQ ID NO: 53532 - DNA, 287 bp, Glycine max
  unsure (1)..(287): unsure at all n locations; Clone ID: 701143166H1
caaagngccccacgttntgagacaaacccagtatgctgtctgccatggnggatgagaaagtttcgatttttccattgattgggtataactgcacaaagaggttagtgaagcaatgcatagagcgatcgtgtttctcattcacccacgatnnnnnnnnnnnnnnnnnnnnnnctcaattttcctcattttaacattttcctggttctactactaccagtggttttgctacacctcaacaggttgttgagatcattgaggagaaaccagaagaggagcctgaaattaca

SEQ ID NO: 53533 - DNA, 284 bp, Glycine max
  unsure (1)..(284): unsure at all n locations; Clone ID: 701143167H1
agaagtactagtatggagagtagattgcatggtttttagntgtacgagaagacgtagagagagaccaagaagaacatttgaggagattattaagagggatctcatagtgagtaatatccttgagaatttggtttttaatcaagtccaatgatgtnatgcaatccaagtagctaacctcatctagtgagatgaaatttttgttattggttggaatgttggacacgtaaatgttgaatgcagtgcttaatgtatcttcctattttccacacnactnnngnngaaaa

SEQ ID NO: 53534 - DNA, 291 bp, Glycine max
  unsure (1)..(291): unsure at all n locations; Clone ID: 701143171H1
ctcttgaatattattcacananttgtcattactcanaagancctcctagngatagaaggaaaattcctgaaagatganaacaaaaatgaaagcctcatttgcttcatgattctatctaatggaatttctgtcacctcaacataccatgttgggaagtggtcaaagagatatcttttgcctgattgcttgtgggcaaatacaggcaagtctatcacgaaattcaaagcaaaatagagcaccctttcatcacaaatctggattcttacaaagattccgagaacatgtgaggct

SEQ ID NO: 53535 - DNA, 256 bp, Glycine max
  unsure (1)..(256): unsure at all n locations; Clone ID: 701143172H1
cggcactgcagccgtagaaggaaaaccgaanntggtgcacntctccttttacaggaactatggtannacgtttaagangccccgccgtccgtacgagaaggagcgtctagacgcggagtgaagctggtgggggagtacgggctgcggtgcaagagggagctgtggagggtgcagtacgcgctcagccgcatccgcaacaacgcgcggaatctccttaccctcgacgagaagaacccgcgccggatcttcgagggcg

SEQ ID NO: 53536 - DNA, 285 bp, Glycine max
  unsure (1)..(285): unsure at all n locations; Clone ID: 701143174H1
ttnntcngcattngcacgaacctaanctactatccgaaagtcgaaacatcccctgtccactttgactcaactncacacaccantctccatatccctaccaattttccctattcactcatcaattttctcgtatcaggtttgatctganatccaggattgctacttaggtttgcatcaatataatctgacaagagantagtaaggagcatgccatagactatacaaacacacactgctgattatttatttacttgatgtaagtggcctgtgcttggtttcagattt

SEQ ID NO: 53537 - DNA, 281 bp, Glycine max
  unsure (1)..(281): unsure at all n locations; Clone ID: 701143175H1
tccccgctgcgtctctcgtaatcatgcctaagcanatccncgagattaaggatttccttctcactggncanaaggaaggatgcgaggtcagtgaagatcaagangagcagagatgtggttaagttcaaggtcagatgctccaagtanctctacacactttgtgtgtttgacccagagaaagcngntaaattgaagcaatctcttcctccaggtttgagtgttcaagacctgtaaaggtatgggcgagagatcaagaagaagcattccatgattcttctgaa

SEQ ID NO: 53538 - DNA, 286 bp, Glycine max
  unsure (1)..(286): unsure at all n locations; Clone ID: 701143176H1
gtttnnctctcacaatggactccctctctctcttntgcaccggangccttctcnccggcggcctctcantggttcgtctgtnttctggggcccgcngngcanaagggcaaacgcgccaccgatctatncggcggctccatctccgccgngaaagtccaagacaactacaagcngtactggtccttcttccgccgccccaaggagatcgagaccgccgncaaagttcccgacttcgtcgacaccttctacaatctagtcaccgacatctacgagtggggctggggcc

SEQ ID NO: 53539 - DNA, 286 bp, Glycine max
  unsure (1)..(286): unsure at all n locations; Clone ID: 701143178H1
tcttagtnncaattttntagggttttattcattttccgatggnttctgcagatgttgagtaccgttgctttgtccggtgggctcgcttngnnccactgacnaccatggccctcgnnanagcnttctctgnagtanggcgaaatcgttgnaacgaagattatcaacgatcgtgagattggcagatccaggggttttggatttgtgaccttcgcctcggagcagtccatgaaagatgcgatcggagcgatgaatggacagaattggacggccgtaatatcactgtcaa

SEQ ID NO: 53540 - DNA, 287 bp, Glycine max
  Clone ID: 701143181H1
gccgtggtggccgccgaagaaggagagtagagagcgcaatcgagtcttcatcttcgactcaccatgaagctcgtcaggtttttaatgaagttgaacaatgaaaccgtgtcaattgagctcaagaatggcactattgttcatggcaccattacaggtgttgatatcagtatgaacacacatttgaaaacagttaaactaactctgaaagggaaaaatccagtcactctagatcatctcagtgtgaggggtaacaacatccgttactatattcttcctgacagcttgaa

SEQ ID NO: 53541 - DNA, 284 bp, Glycine max
  Clone ID: 701143182H1
ttttgatgggcaggaggctaagccatacaagaatgaccctgaacttttgggcaatgacaaacttgatagcagcctatcagcggaatgaaatattggaatttgagaaaatcttgaagagtaacagaagaaccatcatggatgatccatttatcagaaactacattgaggatctgctaaagaatatcagaactcaagtctgctgaagctcatcaaaccatatacaaggatcaggattccgtttatatccaaggaacttaatgtgcctgagcatgatgttgagcatt

SEQ ID NO: 53542 - DNA, 283 bp, Glycine max
  unsure (1)..(283): unsure at all n locations; Clone ID: 701143183H1
gaaaataaccctaagactcaagagcagcttggtaaaggttccaaaaaccattgtgaagagtctctagttacaaatacacaagtnaacagtgacttcgaacccataccaagtgttaccaaatatgatgatttggaattcaagtcaagcattatcaagaacgatgattttgaatcgagaccaagtgttactaagtatgatgattttgaactcaagtcaagcgttaccaagaacaatgattttgaaccgagaccaagtgctaccaaatatgatgatttgaactcag

SEQ ID NO: 53543 - DNA, 273 bp, Glycine max
  unsure (1)..(273): unsure at all n locations; Clone ID: 701143184H1
ttgtgagtttcctacgtagtgttctcattcgttgttggtcgtgctcgtcctcnttctgtcgccattctcggcgatccgaagcgcaaaacaaccgcaatcccttcgaatttcgtgtctcgatccctaacctcaagctggaagagatgaattggatacagcgcaagatctacctttacaatgtgacttttgggctgtatatgttnttnctggtgggagcgttgtacttcaatattgtggtgatgtattaatgtgttcgttctacgatatgttacc

SEQ ID NO: 53544 - DNA, 284 bp, Glycine max
  unsure (1)..(284): unsure at all n locations; Clone ID: 701143187H1
gttttgatgtgtctgatggtgagcttcttcgctacgcattgaatcgctgtctgtgacggtgaacgacgtcgagtgcgtctacgagtacgtgcnttacgagggcgacaccgtttcggggaactttgttgtcgtcgaccatgatattttctggaactccgatcaccccggcattgatttcacggtgacatctgctgcggggaatactgtccacaatatcaagggaacctctggtgacaagttcagttttaaagccccaacactggaatgtatanatttgttttcaa

SEQ ID NO: 53545 - DNA, 284 bp, Glycine max
  unsure (1)..(284): unsure at all n locations; Clone ID: 701143188H1
atntganntgactgtnctcgnagtggagtncaacagctactatctantctaatngggtccgagcaaaatccgntttcctctgcacgaaaggcgaaagnnatggggaggatgttggggtgcattttcttgttttaattcacagnaaggtgggaagcgcattgtacctgcatctcgcattcctgacagtagtgggccagcctcttcagccaaatggacctcaagtgattgggttgaccatcaagccacaggatagctcttctctcttagccccacntcttcacagc

SEQ ID NO: 53546 - DNA, 284 bp, Glycine max
  unsure (1)..(284): unsure at all n locations; Clone ID: 701143191H1
tgaaaacantgacactgttattctctgaattttctcaccatctacaantgaagttttaaccaatatgganactgaaaagtctaatgnttcaaaggctgnagnatttaaactccttgccaatgaagtnctcaatgctcganaatactcccaagccattgatctatatacacaagcaattgagctgaacagtcaaaatgcagtttacttttctaatcgtgcctttgcccatcttcggcttgaggaatatggtagtgcaatacaagatgccacaaaggctattgaaa

SEQ ID NO: 53547 - DNA, 285 bp, Glycine max
  unsure (1)..(285): unsure at all n locations; Clone ID: 701143193H1
gcgaaaaggaagtcaaanaggtagccactgntctnggcgtcgatggagaacggcaacggcctgtctcctgncgagcttggccttccaccgatctcgacatcgatggagaacggcaacgacgtttggaggtaggtgtagntgcggtggagaatggtggtgacatggttcctatagaggccccactccatacccttcgtcctcgccttcttcctcttcctcgcgtagatctcactacggctccaatgtgcgtcctactctatgcgccccctcactcctnccactcag

SEQ ID NO: 53548 - DNA, 260 bp, Glycine max
  unsure (1)..(260): unsure at all n locations; Clone ID: 701143194H1
taagnttcaanaagatagtgaagtgagactagagntaattgggactcgagtggatgctacagaaattttctgcntaggtaccataaaanatgatttcttgggtgtgatcaacgacnctgcaacagtttaaatacccctttctgtactattgtatcgtatatagtttgcatgacttggatttttacaccttaatccgattcagatattatgttttcttactcgattgttgaaagtactaagtcgttgagtttttagttcca

SEQ ID NO: 53549 - DNA, 291 bp, Glycine max
  unsure (1)..(291): unsure at all n locations; Clone ID: 701143195H1
ggnatgtgttagtacatggancgtaggtgggattgcacccggatgaagatttgaatatagatgatttgttgganacntgcaacaactcttgtgacattctatatactagggtttcaangaaatagtgcctctacaagcatcanntgtattggggtccgaaaacaatgagatttctatgaaatggaattccataatcagggaagccttgaacaaganaataacacatncaaagggacaaagatgctaaaaaacaggagctaaagantaattttcccaataagaaagaaaatc

SEQ ID NO: 53550 - DNA, 293 bp, Glycine max
  unsure (1)..(293): unsure at all n locations; Clone ID: 701143196H1
gatcgcagcctaaaaattaagatggcgnggaaggagcaggatgtgtcgctgggatcgaacaatttcccgganagacagccgattncgancggcggcgcanagccnagacgacnggcaagcgagtaccacganccnggcgccggcgccactggttgacccgacngagtttacgtcatggtcttttacagagcagggatagcngagtttgtggccacttttctgtttctatncatcactgtctttaaccgtcatgggngtcgccggggtaagtctaagtgcagtaccgttgggat

SEQ ID NO: 53551 - DNA, 269 bp, Glycine max
  unsure (1)..(269): unsure at all n locations; Clone ID: 701143201H1
ggnagacttggcaacaacttancaacccctcaagnagttgtggncctctacaatcaagccaacattcgcaggatgcgaatctaacggtccagcacctttgttcgacccagaggagctcacacagtggtccttctatagagccctcatcgctgagttcatagcaacccctgtggatggagtgcctagcccagatgacattgctggtcctgaaccattcaagtttcagtttgatagacttggtgttagggttcctaccatcattatttctc

SEQ ID NO: 53552 - DNA, 266 bp, Glycine max
  unsure (1)..(266): unsure at all n locations; Clone ID: 701143202H1
ggcttccaaatcaacggacacantattagttgggccaactggaagttccatattggatttgatccacgtgccggaattgtaatatcactggcatccatttatgatttggagaagcacaaatctcgtagagtgttatacaaaggttacatttctgagctgtttgtgccataccaagacccaacagatgatttttactataagactttctttgatgctggagagtttgggtttggtctctccacggtctcattggtgcccaaccgtga

SEQ ID NO: 53553 - DNA, 265 bp, Glycine max
  unsure (1)..(265): unsure at all n locations; Clone ID: 701143203H1
cgaaantttgttttttntgcgatcattttccattgggtggaatnaantctcaacctttagtcgananagcaaggatctgagtgagtgagcgatcatgtgtggtggtgcnttatctccgacttcattccagcgggtcccgccggcggggcgcagcgcgtngaccnccgacatcctgtggccgaatttgangaagcggttctcnaagtcgctgctggacgatgatttcgaggcagggttcagagaattcgaggatgactcggaaatc

SEQ ID NO: 53554 - DNA, 266 bp, Glycine max
  unsure (1)..(266): unsure at all n locations; Clone ID: 701143204H1
ctcagactgttgtcctcaaagttggtatgtcatgtgaaggatgtgttggagcagtgaagagagttctaggaaaattggatggtgtggaatcatatgacattgatttgaaggaacaaaaggtggtagtgaaaggaaatgtccagccagacacagttctgcagaccgtttccaaaactgggaagaagactaccttcngggaaggtgaagcagcaacatctgaaactagcacagcaactgcctaaaacatttgcctctattctgtgcag

SEQ ID NO: 53555 - DNA, 268 bp, Glycine max
  Clone ID: 701143208H1
gccacaacagctatacacttcgcgcgaagaccgaggaattcgacctcgaatcaggagaaaccctctacccagggctgagcgtcggcgagaaccagctccgatggggtttcatccgcaaggtctacggcatcctctccgcgcagatcgtcctcaccaccctcgtctccgtcaccaccgttttctatactccaatcaatgacctcctcaagggcaattccaccctcctcctcatcctcctcttccttcccttcatctttttgattcccct

SEQ ID NO: 53556 - DNA, 265 bp, Glycine max
  Clone ID: 701143210H1
ctttcttctcttttcttcatttttttccccctaaaagcatttcacaaagagaagacacagtggatcgtggtttcacttcatttcagaccaaacatggtgcagtggcataggcacgtttttccctttcttcgccacattcacaagcgagtattggaaccccaggccactcattcagctccaagccttgtaatttctcgcttagcctcttctctttcacaaggtcagttggggaggagaacatggacaacaacaactttgccctgtt

SEQ ID NO: 53557 - DNA, 264 bp, Glycine max
  unsure (1)..(264): unsure at all n locations; Clone ID: 701143211H1
gctagctcgcacattaagttatataacacatatttgcttgcttagaaatactattattgaagatatggggagtgtagattatgagtaccctttgggcatgaacaactttgagagagtgcnccaagtcgaggttccaccgccacagccgtngctcaagtctctaaagtactcnttgaaggagactttcttccctgatgaccctttgaggcagttcacgaacaagccagcttccaagaagttcatgcttggccttcagttcttctt

SEQ ID NO: 53558 - DNA, 261 bp, Glycine max
  unsure (1)..(261): unsure at all n locations; Clone ID: 701143213H1
gtcaaaactccccaactctctcatgatgcacggtagaaacaatggcaaganactcttggctgttaggatcatccaaacatgctatggagattattcatttgttgactgaccagaancccattcaggttattgttgaagctgttgtcaacagtggtccacgtgaagatgcaacaagaattggttcagctggagttgttaggagacaggctgtggatatctcaccccttaggcgtgttaaccaggctatctatcttctaacaa

SEQ ID NO: 53559 - DNA, 253 bp, Glycine max
  unsure (1)..(253): unsure at all n locations; Clone ID: 701143214H1
gtttctgttcttccagactaaggtaaacgnccagtgcgcaatgcatcgcnagcagcaaaatgggtgaaaaatataaaccttggatcatctttcttcatctactagtaatcacgtgttcctgcnatagaagctgcagagccaggggattgattgaaacagaagacaaattcttcaaagcaacctcaaatgatcatcatgaaacagaacatgcacatgctcactctcacgtggatcacatagatccttctgtgat

SEQ ID NO: 53560 - DNA, 263 bp, Glycine max
  unsure (1)..(263): unsure at all n locations; Clone ID: 701143215H1
cctttttcttcttccactaatcancanagngnnggatangcattcatgtactcatctctagcttcaaaccantcaaatctngctaaaaatcccccggggcctcacccttttccaatcataggaaacatattggagcttggcaaccagcctcaccaagcacttgccaaactttctcaaatttatggtcctataatgagtcttaagctcggtaacactaccaccatagtcatttcctctccacaagttgccaaagaagtactgca

SEQ ID NO: 53561 - DNA, 261 bp, Glycine max
  unsure (1)..(261): unsure at all n locations; Clone ID: 701143216H1
cgcgcanagctaaaccgcgatctctcgaactcttgaggggcgtttccacttcttgtttgagntcgcnttccacttacttnttaganntcngcttctttctcgttggatgagctggttgatattttgaacgtnccagtggccttgatgatagccgactcggcgtgctccaagagccaccggatggtcttgccgtcgaacttgtggtcgatctcttgggtcagctggaagatccgggcgacgcaggcgttggtctacggcatt

SEQ ID NO: 53562 - DNA, 264 bp, Glycine max
  Clone ID: 701143217H1
tcttcacaccgcttcgttttgtggtgcttgcttctttttctcttccttttcgcttcttactagtattcctttcttcttcatttcgttttctccgccgttttcgtcactcagcatcagcagcaacagcaccaggtgtctactatctgactacacatgtgctgtttacattgtctttcaattgggtgaagtctgactgaagagcaatgcagaaggataccagtaccactgccccatcaaccacaagcggtcgggttaggcaccgaa

SEQ ID NO: 53563 - DNA, 262 bp, Glycine max
  Clone ID: 701143218H1
ggcccttctagcatgctttctgctcaaagcgcaaacatgggtctgatacaaggaatcaatggtggtggaatgatcaaatctgagcctggatattctggttgttctccttacatgtttggtactgatggaaatgtcctggagacacgcccaactattggtggtgctcagtcacatcattcactaatgttgagtccaactcacattctctgaatgaggtggtcctagatccagacacttcttcatttggatttctggggcagat

SEQ ID NO: 53564 - DNA, 200 bp, Glycine max
  unsure (1)..(200): unsure at all n locations; Clone ID: 701143219H1
ctttcctgtgttcaatttcgattctactcgttaatttaataagatgtttgggagggcaccgtataaggagcgataatacgaggtaantacgaaatncctcggcgtcttccaagaacgcttcgcatgatgatctgaagaaggcttacaagaaagccgccattaagtctcaccccgacaagggcggtganccccgagaagtt

SEQ ID NO: 53565 - DNA, 265 bp, Glycine max
  unsure (1)..(265): unsure at all n locations; Clone ID: 701143221H1
cagaaatgctgctcatatggtgctggctgcaacaagttaatgaatggaatagtgaaaactgcaccagtgtgagtgcatcttgatacattaccatatcagctggttgtacatcatctagaattatggccatacttcttagggacaagttttggtaattttaaggagataccgtgttaatggtgactaatattttnttctgtaatctncanatagaggaccagaagggggaataaaattgaaaaccatgttgtctttgtttgagtca

SEQ ID NO: 53566 - DNA, 264 bp, Glycine max
  Clone ID: 701143223H1
gtaattctagagctaatacgtgcaacaaaccccgacttctggaagggatgcatttattagataaaaggtcaacacaggctctgcctgttgctttgatgattcatgataactcgtcggatcgcacggcctttgtgccggcgacgcatcattcaaatttctgccctatcaactttcgatggtaggatagtggcctaccatggtggtgacgggtgacggagaattagggttcgattccggagagggagcctgagaaacggctaccac

SEQ ID NO: 53567 - DNA, 221 bp, Glycine max
  unsure (1)..(221): unsure at all n locations; Clone ID: 701143224H1
tagtgcctccttgccagaagttaaaatggcccaagaaactttcctattcacatctgaatcagtgaacgaggggcaccctgacaagctctgtgaccagatctccgatgctgtgctcgatgcatgcttggagcaggaccctgacagcaaggttgcctgtgaaacctgcaccaagaccaacatggtgatggttttcggagagntnacaaccaaggccaacgtgg

SEQ ID NO: 53568 - DNA, 264 bp, Glycine max
  Clone ID: 701143225H1
ctcactcacaactcagtgaaagagaatccgaggcgaagagaagagaaaaattaagatggaggggaaggagcaggatgtgtcgctgggagcgaacaagttcccggagagacagccgattgggacggcggcgcagagccaagacgacggcaaggactaccaggagccggcgccggcgccactggttgacccgacggagtttacgtcatggtccttttacagagcagggatagcagagtttgtggccacttttctgtttctatacat

SEQ ID NO: 53569 - DNA, 264 bp, Glycine max
  unsure (1)..(264): unsure at all n locations; Clone ID: 701143226H1
gggctcgctctttcgtgtttttgttcnncgaaggaaactctatccttagctatcgcgatggatcggtaccagaaggtggagaagccaagagctgaaactccaatcgatgaaaacgagatccggattactagtcagggaaggatgcgcaactacattacttatgccatgagcttgcttcaggagaaaggttctaatgaaattgttttcaaagcaatggggagagctatcaacaaaaccgtgacaattgtggagttgatcaagagg

SEQ ID NO: 53570 - DNA, 260 bp, Glycine max
  unsure (1)..(260): unsure at all n locations; Clone ID: 701143227H1
attaacctccgcatttgttactgatnttccaggtgtgaatggtcnggtgtatcggtggcacggttagacatagccaaaggtggatcaatcccaatgcacacacacccngctgtgactgaactnctnctaatggtggaaggtcaaatcactgctggttttangaccccaactgcactttataccaagacactgaaacctggagatattatggttnttccacacaacanacgagnacgcgagagggggacnngcngcgnanc

SEQ ID NO: 53571 - DNA, 261 bp, Glycine max
  unsure (1)..(261): unsure at all n locations; Clone ID: 701143228H1
atgcctgcatctcttctgcaatctcagttagatttgcttgagattgatgagtctgagggagtacttatgagttgacgctactttgagaccccaagccattgtaaacaccattctaaacatgaaccagtttcagggatgtttcaatgttgattttgtggagcctcattgataaattgggatcattatttcaggtttcaaatatagtttgtacaaataaatggaagaatgggattatgcatganaganaggttgaagggaatg

SEQ ID NO: 53572 - DNA, 257 bp, Glycine max
  unsure (1)..(257): unsure at all n locations; Clone ID: 701143229H1
gagacatttagggctcgttataactcggtgaagggtgcaaaagttgtcattgataggctaactggccggaccaagggatatggctttgtaaggttttcagatgagagtgagcaagtganggctatgactgagatgcaaggggttctttgctcaacaagacccatgaggattggacccgcctctaataaaacccccaccactcagtcccagcccaaagcttcatatcagaattctcaacctcaaggttcacagaatga

SEQ ID NO: 53573 - DNA, 260 bp, Glycine max
  unsure (1)..(260): unsure at all n locations; Clone ID: 701143230H1
cttggtgatgtccctttctgttctcttcactcttggtcttgcgagagaaagccatgccagagacgaagatttttggccatgctgtttggccaaacactcccattccaantncantncgagngacanctnaagcctggccctgcaagtgttgaaatcgatgatcaccctatgcaaattgaaganacacagtacccgaaaaccttcttctataaagaagaccttcatccaggcaaaacaatgaangtacaattcagnaagcc

SEQ ID NO: 53574 - DNA, 263 bp, Glycine max
  unsure (1)..(263): unsure at all n locations; Clone ID: 701143231H1
gccaaacactcccattccaagttcattgcgaganccttctaaagcctggccctgcaagtgttgaaattcgatgatcaccctatgcaaattgaagaaacacagtacccgaaaaccttcttctataaagaagaccttcatccaggcaaaacaatgaaagtacaattcagcaagcctccctttcaacaaccatggggtgttggtacatggttaaaggaaattaaagacactactaaagaaggatatagtttttntngagctatgca

SEQ ID NO: 53575 - DNA, 243 bp, Glycine max
  unsure (1)..(243): unsure at all n locations; Clone ID: 701143234H1
tctcaacacacactttctcacttctctctctctcacccagatcttgtagcaatacgcgagcgctcccactccacgcgaagagttcgtgtacatggcgaantggcggagcaggccgagcgctacgaggagatggtggagttcatggagaaggtctccgcctccgccgagagcgaggagctgaccgtggaggagcgtaacctcctctccgtcgcctacaagaacgtgatcggcgctcgccgcgcc

SEQ ID NO: 53576 - DNA, 262 bp, Glycine max
  Clone ID: 701143235H1
ggtgctgagatcattggaacctttgttttggtctacactgtgttctctgcaactgaccccaagaggaatgctagagattctcatgtgccggttttggctccacttccaattggctttgctgtgttcatggttcacttggcaaccatcccagtaacaggcactggcattaaccctgctaggagtctaggagctgctgtcatgtacaaccaacagaaggcctgggatgaccattggatcttttgggttggaccatttattggag

SEQ ID NO: 53577 - DNA, 172 bp, Glycine max
  unsure (1)..(172): unsure at all n locations; Clone ID: 701143236H1
atctccattgattatttggagctaacattgaacacaagcntgatacataaaaaaaaggttgcattttatgaacataactatagacacattacatatttatccgatgcagcttcgtatcgttttggataactctccctctctctagcttacagctccagctctttccacacaa

SEQ ID NO: 53578 - DNA, 264 bp, Glycine max
  unsure (1)..(264): unsure at all n locations; Clone ID: 701143240H1
gattggaggaacaccactgaacttaagcgcgtgttcttccattcaggcaagtccacaatcctcgtcatacccgagtcctgtaccatcctaccatgctagcccaacctcttcctcgttcccaagccccacgcgcattgacggaaaccacccttcttcctttctcatcccattcatccgcaacataacttccatccccgccaacctccctcctctcaggatatccaacagcgcccccgtnaccccacctctttcttctccccgang

SEQ ID NO: 53579 - DNA, 244 bp, Glycine max
  unsure (1)..(244): unsure at all n locations; Clone ID: 701143241H1
atgttttccaatacataaaacngtgnnagatggaaanatgtctggtccctcctggggatgttgcaaattccctcatggacggctattccaagggtaataatgaagtgagacgtaggtctagattcttacgtagaagaggaagagtccgtcgattgaagtacacctggaaatctgctgcttatcattcaattaggaaaaggattacagagagaaaggatcaaccctgccgacagtataatccatg

SEQ ID NO: 53580 - DNA, 262 bp, Glycine max
  unsure (1)..(262): unsure at all n locations; Clone ID: 701143242H1
gtttcttcgaatcaaaaccctaattcnccnaatttcanttttcaaccttgaaaaaccttctctctctctctcagttcccaacggtcatcaccacagctcgatcaacagggacatatttgctactgaagagatgtctcctgcttccaaatctaagtctaaagacaaaaaggctggcaaggaagctcaaaagtcttctgccaagtcttcaggatctggtaatgccgtggctggtgtaccagctagtgcatacaatcctttatcg

SEQ ID NO: 53581 - DNA, 262 bp, Glycine max
  unsure (1)..(262): unsure at all n locations; Clone ID: 701143244H1
aggtgcttcggcgactcctcgagacaccatgggttcaccaggggccaacctgtnntcgacgctctgggtgcgaagtcatagaatccgctggcttccccnacgccatcacnagtgcgntnntnnatcgncgcttcnnggttggntctgnncnacaccggcttcancnccnacggcgaaatgctggagcagggcnaactcancacccaagccgnttccattcccgncattggcncacgcngacaancgctacggcaatgccatg

SEQ ID NO: 53582 - DNA, 66 bp, Glycine max
  unsure (1)..(66): unsure at all n locations; Clone ID: 701143245H1
cacgancactcaagaagatganagaaagcgatncaacagacagaagattttgcttacatcatctca

SEQ ID NO: 53583 - DNA, 260 bp, Glycine max
  unsure (1)..(260): unsure at all n locations; Clone ID: 701143247H1
gaagctcagccgtaaaggctcnaacccancctgggtagttgaaccaccaaagtctnaagaagggtatcagcatttaatagccgaaagatanaatatcttttgctcgacgttgctattagtcagaagccagaaattcgtgtaggtgagtgaggaagagagaaaagaaaaccggtgctgttgaggcagagattcaagagaatggaaggtgtgagccctgagcccttgagatcagaattggattccaaatccanacaananac

SEQ ID NO: 53584 - DNA, 259 bp, Glycine max
  Clone ID: 701143248H1
gctctctctgcgcatatttgccgtttccccgccacacgcgctgacacttctttgccggagagtctcaccagaatccggtgccggaaacctctctccgtccgatgctccggcgattccacttccggctctgtgggttcggagttcgatccgaaggtgtttcggaagaaccttactcggagtaagaattataaccgcaaaggatttgggtacaaggaagagaccctccaactcatgaatcgcgagtacaccagtgatatca

SEQ ID NO: 53585 - DNA, 261 bp, Glycine max
  unsure (1)..(261): unsure at all n locations; Clone ID: 701143249H1
cttcttcttcctccctctatcttgggaagggcttctcccatcgcaaattgtctcccagttatcacattcacaaaaccattgacgnatcctatgcagttatcttcgatgctggtagcacgggaagccgtgtacatgtctatcgttttaaccaacaattagatctccttcgcattggccaagaccttgagttgtttgtcaagactatgccaggtttaagtgcttacgctgagaatccacaagatgctgcagaatctcttattc

SEQ ID NO: 53586 - DNA, 262 bp, Glycine max
  unsure (1)..(262): unsure at all n locations; Clone ID: 701143251H1
gagaagccataaaaaaatcacagatctaaccaaactccgatttcgantccgattccgggaatagactaccaacaagagcaaacctaaggagaaggaatgtgcagctagatgactaccattgtccattttgttcgtgtcatgaggaggaagcgtcccacatattttttggttgccaaagaataatgcctttatggtgggagagccttgcatggacagaggttgtaactgtgttccttgcatcacctagggatccagagagctc

SEQ ID NO: 53587 - DNA, 262 bp, Glycine max
  unsure (1)..(262): unsure at all n locations; Clone ID: 701143252H1
ggaaaaccctaaganatgaagagaactcctatctngttccctctcttctttcttctttgtgccttcacctcatattctaccttcagccaccgctgatgatgatcatgtgtacgacactgacggcgataagcttcaatacggtgtcaattatttcgtgttgccagtgataagaggaaatggcggtggaatacaagtagcaaaagcaggaaacgaaactcgccctctgactgtggtgcaatctggcaacgagctctctgagggg

SEQ ID NO: 53588 - DNA, 225 bp, Glycine max
  Clone ID: 701143256H1
gagaaagaaaagaatggcaaagttaataaaattctttgagttgaacacaggggccaagattccttctgttgggttaggcacttggcaagctgagcctggtgttgtagccaaagctgtcaccacagccattctggttggatacaggcatattgattgtgctcaagcgtataacaatcaagcagagattggttctgctcttaagaagcttttgatgatggtgtggtg

SEQ ID NO: 53589 - DNA, 259 bp, Glycine max
  unsure (1)..(259): unsure at all n locations; Clone ID: 701143257H1
tgaattgtcaatgactgtggatccatccaacaccacagcagtgcacactgctgcattacaagggcatactgagatagtaaagcttctattggaagcaggtagtaatctggcaaccattgctagaagtaatgggaaaacagctttgcattctgctgcgaganatggacatttggaggttgtgaaagcgctattggggaaggagcctgtggttgcaacgcggacagataagaagggacagacagcacttcacatggcagtg

SEQ ID NO: 53590 - DNA, 259 bp, Glycine max
  unsure (1)..(259): unsure at all n locations; Clone ID: 701143259H1
ccctcttgatttgtagtttgttttgtgctttagataaaagangctgccaaatcaagnngggttttaagatcatagtgtgtgttttgcaacaatggctaagttctttgctgctatgatcttggcactctttgccatttccatacttcaaacagtggtaatggctgctaatgaacaaggaggccacttgtatgacaacaagagcaaatatggaagtggaagtgtcaagagttaccaatgcccatcacaatgctcgaggaga

SEQ ID NO: 53591 - DNA, 255 bp, Glycine max
  unsure (1)..(255): unsure at all n locations; Clone ID: 701143261H1
cttctttccaatacctcgttcaatagctccaaggttctganctgcaagctaacatgggtgagatagctttaccaaatggcattagcaatggcaatattaatggagtcaatggacaaagccattctcttaatggttacaggaagagttgttggtatgaagaagagattgaagaggacttaagatggtgctttgctctcaatagtatattgcatacaggagctagccagtaccaagacattgcattgttggacacaa

SEQ ID NO: 53592 - DNA, 256 bp, Glycine max
  unsure (1)..(256): unsure at all n locations; Clone ID: 701143262H1
ggaaaatanagaaattagcgtgaaaaatgttgggtgtgttcagcagctccatagtgtcgccgccggaggagctcgttgccgccggcagccgtacaccgtcgccgaagatgacggcggcggcgctgcggaagtggttcgaggagaagaacccctccgcagtgtcggtggaggtcggagagcatgtccagctcgcttatacccaccagaacgagtcgccgtttcagcccagatcctttgctgtgaaggatgaggtatt

SEQ ID NO: 53593 - DNA, 257 bp, Glycine max
  unsure (1)..(257): unsure at all n locations; Clone ID: 701143264H1
ctagtcttcgaattgccccatatcacaaaccacattaaaaanagactaccacgtattctnnnnnnnnnnnnnnnnnnnnnnnnnnnnnnnnntcacagtgccaatggcggatccaatcgcgaaggttctgatcgcgtttgcgctcttagcttccctcttgctgtgttcgcacgcttcctccgacgttcccttcatcgttgctcacaagaaggcctccctcaacagactcaagtccggcgccgaaagggtctccgtca

SEQ ID NO: 53594 - DNA, 260 bp, Glycine max
  Clone ID: 701143265H1
agagtccaacctttcattttcaattttcaaagatgcctcgtggaacacttgaagttgttctgatcagcgccaaaggaatcgatgacaatgattttctctccagcatagatccttatgtgattctcacatacagggcacaggagaaaaagagcactgtgcaagaagatgctggatccaagccacaatggaatgagagctttcttttcactgtctctgacagtgcttctgaacttaatctgaagataatggataaagacaac

SEQ ID NO: 53595 - DNA, 260 bp, Glycine max
  unsure (1)..(260): unsure at all n locations; Clone ID: 701143266H1
cagcgtttctgcaagttccaattttccaactatcnacagaaacggtcgttggnanaaaaagctgttaattcgggagcgatatggaggtcgaactcaaagagctgcacgccgatcttcaatctctgagccaatcgcttcccgatccatctcaccatgatttgctccgcaagattcaattgcgtgttggggaccttgcgaanttgcagaggcagcacctgttcgacgctctaaagttgaggatatgagtgctgaggttgtag

SEQ ID NO: 53596 - DNA, 262 bp, Glycine max
  Clone ID: 701143268H1
ggtccatggtgatgtcaagagtattccggatttgcaggctgaactggacagtttattgcaggagcaccagaggttacgtggcacatttgaatatgaaaagaacaaaaacatagagctagtggattacatgaaagcaaaagagaagaatctgatagcgatggcaagagaagttgaagtgttacgagctctcgattttaaatgctgagaaaagagtaaatgctcctaatctgtttggggctgctacccctggacacagcagcgg

SEQ ID NO: 53597 - DNA, 260 bp, Glycine max
  unsure (1)..(260): unsure at all n locations; Clone ID: 701143272H1
gcttggcggaatcagcggggaaagaagaccctgttgagcttgactctagtccgactttgtgaaatgacttgagaggtgtaggataagtgggagctggaaacagcgaaagtgaaataccactacttttaacgttattttacttattccgtgaatcggaagcngggcactgcccctctttttggacccaaggtcggcttcggccggtncgatccgggcggaagacattgtcaggtgaggaatttgacagcaagtgggccaag

SEQ ID NO: 53598 - DNA, 193 bp, Glycine max
  unsure (1)..(193): unsure at all n locations; Clone ID: 701143273H1
attttattcatttattctttgttcctagtctttatcttataatttntcattgcttgcccggtaatttcaagatcaacttggaaaatttgcaagatttgggatgaaatctggtcggatcttgctttgtgggatggggattttggtgggtcttatttcaatacaaagctcttcctctctcaatcccatctccctc

SEQ ID NO: 53599 - DNA, 260 bp, Glycine max
  unsure (1)..(260): unsure at all n locations; Clone ID: 701143275H1
gngagctgnactgttgctggcagtggaagaagaacactccagaccagagnacganncagannatangaagaagaagagcgaacgaacgaccgatnaacgtggtgancgcgttaatggtgactcggaaccaactcgganccacctgaaggcatacccttcggatcggtatggttgntcgtactacgccgggatctcctttccctcgtcatcttcgccggaatcatgtcaggtctaaccctaggtctcatgtctctcggcct

SEQ ID NO: 53600 - DNA, 258 bp, Glycine max
  unsure (1)..(258): unsure at all n locations; Clone ID: 701143278H1
gcagcaccnncccaccctggaccaggtcttcaacagagagaaagaganggaagannnnnnnnnnnnnnnnnnnnnngttaaactaacattttttattagtaagaagacatggctcaacncagttcnaacggggatctgaataataaccagcagggtcaggttnnnnnnnnnnnnnnnnnntgggcggcggcgcagccattgcagtatcagcagcaatggatggccatgcagtacccggccacagccatggccatgatg

SEQ ID NO: 53601 - DNA, 223 bp, Glycine max
  Clone ID: 701143282H1
ttcgcaaaccctaatttcggaaagatcggcgatggctgcctccaaggatcgcgagaaccttcgtctacatcgccaagctcgccgaacaggccgagcgatacgaagagatggtggaatcaatgaagaacgttgcgaatctcgacgttgaactgactgtggaggagcggaatttactttctgttgggtacaagaatgtgattggtgctcggagagcattcgtgga

SEQ ID NO: 53602 - DNA, 259 bp, Glycine max
  unsure (1)..(259): unsure at all n locations; Clone ID: 701143284H1
ctgtcaccgttccgttccgttttcctctgttttttttttctntctttcaaatccccgctttcgnggaaatcccgaaccagaaaccatgcttctccgaaccgctgctgcttctgcttcgtccctctccctcttcagcccgaacgccgaacctccccgttcggttcccgctcgtggattggtggttcgcgcagaaaaggatccacgaaccaccgcgccctgaccggagtgatttttgaaccgttcgaagaggtgaagaagg

SEQ ID NO: 53603 - DNA, 257 bp, Glycine max
  unsure (1)..(257): unsure at all n locations; Clone ID: 701143288H1
ttcagtatgtgatttactatgttctgaccaacgtaaaagattaatggaaattgttggctccatctttcatggaaagctcaatattcnagtgaacaatgctgctacaaatataacaaagaanataacagattacacagcagaggatatatcagccataatgggcaccaattttgagtccgtttaccatttgtgtcaagttgcacacccacttctaaaagattctgggaatgggagcatagtatttatttcttccgtag

SEQ ID NO: 53604 - DNA, 235 bp, Glycine max
  unsure (1)..(235): unsure at all n locations; Clone ID: 701143289H1
gngagatggtgggtgaaacggacgcaacggggaagtangttggtttgggtttgggatgtgacccagtggtgggatccttggcttgttcgaagaagagagaatacagagtcaccaatcgccttcaagagggaaagcgccctctatacgccgtcattttcaacttcatcgactcccgctacttcaacgttttcgccactgttggcggcannagggttactgtttatcaatgtctcga

SEQ ID NO: 53605 - DNA, 82 bp, Glycine max
  unsure (1)..(82): unsure at all n locations; Clone ID: 701143291H1
attcctttctcatgctatctngcnacaaatggtctngtngtcactttcataaacaatatnccncnttnaagtgcctcntacc

SEQ ID NO: 53606 - DNA, 252 bp, Glycine max
  unsure (1)..(252): unsure at all n locations; Clone ID: 701143294H1
gccgacatccatgatcgaccaccgataacttcgccatccctcgccttgcgnagtgttgacgtcgttgttgcgtttnnnnnnnnnnnnnnnnnnnnnnnnnnnaacgctgcgttttcagaaacgatgaggtcttcttcttcttcggacangaacaggatcaacatcgctgccagtnctcagaaagtngatgtcgatnancgaatctccctccgattctactaccgcatcgctgncaacatcctncgacnngnt

SEQ ID NO: 53607 - DNA, 235 bp, Glycine max
  unsure (1)..(235): unsure at all n locations; Clone ID: 701143295H1
tggatgtccatctggccaaacagccaccatagttcttcgnggtggagcngatcagttcatagaggaagcagagcgaagtttgcatgatgcaatcatgattgtnaggagggctttgaagaattcaacagtggttgctgggggaggtgcaatagatatggagataagccggtacctgaggcagcatgcacgtacaatagctggaaagtctcagcttttcattaactcctatgcaaaa

SEQ ID NO: 53608 - DNA, 274 bp, Glycine max
  unsure (1)..(274): unsure at all n locations; Clone ID: 701143301H1
gcataacataacataagaccacaaagctgtgttgcgcgttgaagagcgaagaaggaagaagatgtcgggtatgggagatgggtacgtggncaccgcccaagacgcggtgaggattcgacggttggagaagcagagagaagcggacttcgcaaaatccaagagctgaaaaccaagtctgcctccgccaaggaccaacccggtcttctccaattcggttccagcacttccgagattctagagactgcctttaagaaggaaactgtgggttngtcat

SEQ ID NO: 53609 - DNA, 270 bp, Glycine max
  unsure (1)..(270): unsure at all n locations; Clone ID: 701143302H1
ggcacttcgttgcttggtgatgtccctttctgttctcttcactcttggtcttgncgaganaaagccatgccaganacgaagatttttggcatgctgtttggccaaacactcccattccaagttcattgcgagatcttctaaagcctggccctgcaagtgttgaaatcgatgatcaccctatgcaaattgaagaaacacagtacccgaaaaccttcttctataaagaagaccttcatccaggcaaaacaatgaaagtacaattcagcaagc

SEQ ID NO: 53610 - DNA, 267 bp, Glycine max
  Clone ID: 701143303H1
ctaacaatgacggatgcagctgaagacgctacacgacgccgtaatgcggtggccgagtaccgcaagaaacttcttcaacacaaggaattggaactccagagtacgatccgtcagagaaaatttgcgtgcctcgaagaaagagttcaacaaaactgaagatgatttgaagtctcttcaaagcgttggacagatcattggcgaagttcttaggcctctcgacaatgaacgcttgattgttaaggcaagcagcggacctaggtatgtggt

SEQ ID NO: 53611 - DNA, 263 bp, Glycine max
  Clone ID: 701143304H1
gtggagatgcaccatgaatctcttacagaggcacatcctggtgacaatgtgggattcaatgttaagaatgttgctgttaaggatttgaagcgtggttatgttgcctcaaactcaaaggatgaccctgcaaaggaggctgctaacttcacagcccaagtcatcatcatgaaccaccctggtcagattggaaatggctatgcccctgtcctcgactgccacacttctcacattgctgtcaagtttgctgaactcatgaccaagat

SEQ ID NO: 53612 - DNA, 259 bp, Glycine max
  Clone ID: 701143306H1
ggggctccaaatgttctcggagattgtccattttcccaaagggtcctcttaactttggaggagaagaaaatcccttacaaactccacctcatcgatctcagtaacaaacccgaatggtttttgggtgtgaatcctgaagggaaggtgccagtggttctttttgatggcaaatgggtggctgattctgatgtaattgtggggatactagaggaaaagtacccagaaccctctctaatcactcctcctgaatttgcctccg

SEQ ID NO: 53613 - DNA, 257 bp, Glycine max
  unsure (1)..(257): unsure at all n locations; Clone ID: 701143308H1
ggaaaaccctaagagatgaagagaactcctatcttgttccctctcttctttcttctttgtgccttcacctcatatctaccttcagccaccgctgatgatgatcatgtgtacgacactgancggcgataagcttcaatacggtgtcaattatttcgtgttgccagtgataagaggaaatggcggtggaatacaagtagcaaaagcaggaaacgaaacttgccctctgactgtggtgcaatctggcaacgagctctctg

SEQ ID NO: 53614 - DNA, 254 bp, Glycine max
  unsure (1)..(254): unsure at all n locations; Clone ID: 701143309H1
gtgcttctctgattccagtttcctggttgccttggcggccactttctcctttcaagggaacggtgaaaaccttggtcgcaaaaccatggctgaagaagattcagcaagcaagacccctcatttccgtggttaacagggntgcctggtgggcgcgttgactctttctgtggtctcatctgtgtccattgtgatttgcaataaggcgctgatgagttcactgcatttcattttcgctacaactttgaccagctggc

SEQ ID NO: 53615 - DNA, 226 bp, Glycine max
  unsure (1)..(226): unsure at all n locations; Clone ID: 701143312H1
gcagaaagcagcagggaaggaggaggaggtaaaactgangaagggaattgcagagttctacgacgantcgtctggccncacgcgacagccnacnttctctcttctctattcagtaaacggctgttttntatacgagctgtcccagtctcagcctatanatcccaaaacatcaaaacaactggtnggggctccttgtatggcttcntcctcagttggtagattcntt

SEQ ID NO: 53616 - DNA, 256 bp, Glycine max
  unsure (1)..(256): unsure at all n locations; Clone ID: 701143316H1
attcaacacctgcaggcaattgataccctcatgccagccacaatgagcagcagtcctgcaccttgcagccgatcctggtcaattagtgaggactccctaagaaggtatgtgcagtttgcgagtgaaagctgcatacaagagttattggcagcttcggncacnancaacggccttngcgtgctgtcacttatgttgtctttggtngtcncgcttgttttgnccnnancctattcnatganctngctctaggactngt

SEQ ID NO: 53617 - DNA, 251 bp, Glycine max
  unsure (1)..(251): unsure at all n locations; Clone ID: 701143317H1
ctgnaattccancaagatgggancacccacaagtattgacggccaaacgngaaacaggcagaggattgatcggaaagggtcgatgcagtgtgntacaatacttaagagtctaatgtctcacacatatagttgggtgtttagtaagccagtggaccctatagcgtgagtattccagattattttacaatcatatctcatccaatggatttnggcacaattanatctaagctggagaaaaatatttatctggc

SEQ ID NO: 53618 - DNA, 260 bp, Glycine max
  unsure (1)..(260): unsure at all n locations; Clone ID: 701143321H1
ctcnagcgnaantttcgnagagtanttgaagctgaagganttccntacacttacctatgttntcatggcctttanctggttatttcttacgtaacctggcacagattgacatcactgttcctcctanggacaaggtgttcatacaaggagatggaaatgtgaaaggagcgtatattactgaggctgatgtgggaacttttaccatcgaagcagcaaatgaccctngagccttgaacaaagccgtgcacatnagactccca

SEQ ID NO: 53619 - DNA, 255 bp, Glycine max
  Clone ID: 701143324H1
cagcagccttcttcgccgtttcagctcaagagccaccagcaggtaagatatggttaagcataacaacgttatccccaatgggcacttcaggaaacactggcaaaactatgtgaagacttggtttaatcaaccagcacggaagaccagaaggcgtttagctcggcagaagaaggctgtcaagattttcccaaggcctactgctggacctctcaggccaattgttcatggccagactctgaaatacaacatgaaagt

SEQ ID NO: 53620 - DNA, 150 bp, Glycine max
  unsure (1)..(150): unsure at all n locations; Clone ID: 701143325H1
tgcggctgaggattccgaacgagtgaccttcttcgtttctcgcaaagtttaagtaatcatgggtaaggaaaaggttcacatcaacattgtcgtcattggacatgtcgactctgggaagtcaactaccactggtcacttgatctacntnct

SEQ ID NO: 53621 - DNA, 114 bp, Glycine max
  unsure (1)..(114): unsure at all n locations; Clone ID: 701143326H1
agcaaagcnnagaatcatggaattccantatttgncanttggaaacaaaatgcaggttcttcccacagaggaaggcaantnggggatgacacttagcctgctgcaggctttgat

SEQ ID NO: 53622 - DNA, 270 bp, Glycine max
  Clone ID: 701143333H1
ggtcttcctacccaaaacaaaacttcaatttctgtttcagttcgcggagatcaatattttatctaggtccatcgtcgatagaagatacgagaaaccaaaggcaatgtttttgtgggattggttttatgggattctagcgtcgctcgggctgtggcagaaggaggccaagatcttattcttgggcctcgataacgctggcaaaactaccttgcttcacatgctcaaagatgagagattagtccagcatcagcctacccagtatcctacatc

SEQ ID NO: 53623 - DNA, 265 bp, Glycine max
  Clone ID: 701143334H1
gcaaaatctagggtttgttcgttcgctcgttcgcaacaatggcgctgaggagattctacaacgagatcaaggggaagagggtgagcgaggtccctgagcacgtgaagccgatgctgtccctgagctacatcaagaaagcgattcagagaggcttcgacaattaccatgccaagtacattgaaaccagttcccctgatcccatcttccatgtctgctacggcggcatgatcttctcctacctcgtcgctctcccccacgagcgccg

SEQ ID NO: 53624 - DNA, 132 bp, Glycine max
  unsure (1)..(132): unsure at all n locations; Clone ID: 701143335H1
gctgggaaaagttggaagggacatnctcattgtcaactatgcctcatngggttatatttnatttggaaggncctgctcctggagntgacctggctantacgntcagtagagatcaactnttccactnccana

SEQ ID NO: 53625 - DNA, 262 bp, Glycine max
  unsure (1)..(262): unsure at all n locations; Clone ID: 701143336H1
ggaatattcacagatgaggtttccattggngcatttcatgcaattggctagaaacagaattttagttgcctgctggcagggaatgatggacccacacctggaactgttctcaatgtggctccttgggtcttcacaattgctgctagcacattagacagagactttagcagtaatttaaccatcaacaataggcaaattacgggagccagtcttttcgtaaatttgccacccaataaagccttttctctgatccttgcgactg

SEQ ID NO: 53626 - DNA, 230 bp, Glycine max
  unsure (1)..(230): unsure at all n locations; Clone ID: 701143341H1
attgctctccctaagttccgacgtcggcgtctaggacggtaaaagttgttgttttgctcttctgggttttggagcatacgacaaaaagatggntgagggagaacgtttccagcttggganctgggtgngaatgggagatctgctgttgcttcaattccttacccaaggntgtacggtgaaatttatntggagacccaanttcatcagcttgagcaagangcatacagttc

SEQ ID NO: 53627 - DNA, 249 bp, Glycine max
  unsure (1)..(249): unsure at all n locations; Clone ID: 701143343H1
ctcatggngaagtggagcggaggattgtntcccagctcttgaccctcatggatggnctaaatcacgtgctcatgtaattgtcattggagctactaatcgccccaacagcatccgnnttgnnaacccgaacttcaagtttcaggtttgancgtcagggcgttggatttgacagaacaaaaggtggatattagttttcagagttttgggtgtctgatgccacagccacaatantanatgtgcgagctttga

SEQ ID NO: 53628 - DNA, 114 bp, Glycine max
  unsure (1)..(114): unsure at all n locations; Clone ID: 701143344H1
atccgaggcccctcttttatatggtcgttaataaaaatggcttcgacccttttcacaaagatgcttttgngccaacgattgatccatccttattcgttcctcactcaacnnngc

SEQ ID NO: 53629 - DNA, 265 bp, Glycine max
  Clone ID: 701143349H1
gtttatcttgagcatgatattcaaacaaacacgagccccggcgatcatcaaaagctcttgcttgcatatataagcacacctcgtcatgaaggccccgaggttaatagagaaattgctcagaaggatgcaaaggctctttacaaagcaggggagaagaaactgggaactgatgaaaagacttttatccacatattcagtgaacggagtgcggcacatttggctgccgtcagttcttattaccatgacatgtatggccattcactga

SEQ ID NO: 53630 - DNA, 259 bp, Glycine max
  unsure (1)..(259): unsure at all n locations; Clone ID: 701143351H1
ataagaaactcacctctagtggcagactagataaagaaactaatattacaacccaagttgccacagcaattctcatgcagaaattattcagttttatggtctgcaacaaagcaactacctttcatcaatgatgctcattcaaatcaacggagattacacatgaatttgtatctcattcaaacgaacagagtgcatcatctatactcttggaagttaacatgaccagttgcttntccatgctccactgcctccttntgac

SEQ ID NO: 53631 - DNA, 256 bp, Glycine max
  unsure (1)..(256): unsure at all n locations; Clone ID: 701143352H1
ccagttttgaatatatttttattccttctttgtttcttcactttcttccatacacataaccatntgctctcagactgttgtcctcaaagttggtatgtcatgtcaagggtgtgctggagcagtgaacagggttttgggaaaaatggaaggtgttgagtcatttgacattgatctgaaggagcagaaggtgacagtgaaaggaaatgtggagccagntgaagttctgcaagccgtttccaaatctgggaagaagact

SEQ ID NO: 53632 - DNA, 246 bp, Glycine max
  unsure (1)..(246): unsure at all n locations; Clone ID: 701143356H1
gcaggcaatggtgtacgtcaaggctcagaaatcaaaagcctactttcaaganatatcaagtcaagttcaagagaagaagagagggaaaaaccgattaccgtgccaggattcggttgattaatcaggacaagaacaaatataacactccgaaataccgatttgttgttcgctttagcaacaaggacattgttgcacaaataatatctgctagcattgctggcgatattgttcttgctgcagcatatg

SEQ ID NO: 53633 - DNA, 265 bp, Glycine max
  Clone ID: 701143365H1
aaccttctttcttcttatatatcgaacatggctaagtatcattcaagtgggaaaagctcttccatgactgctatagccttcctgtttatccttctaatcacttatacaggcacaacagatgcacaatccggggtatgttatggaagacttggcaacaacttaccaacccctcaagaagttgtggccctctacaatcaagccaacattcgcaggatgcgaatctacggtccaagcccagaagtcctcgaagcactaagaggttcca

SEQ ID NO: 53634 - DNA, 251 bp, Glycine max
  unsure (1)..(251): unsure at all n locations; Clone ID: 701143366H1
ggatcattcacaagattgangagacccttcatgtgggaggccacaagaaggagnaggagcacaagggtgagcagcaccatggtggagaatacaaaggggagcatcatggtgaacacagtactgaatacaaaggagagcatcatgttggtgagcacaagccggagcaccatggaggagaagagcacaaagaggggttcctagacaagatcaaggacaagtccacggcgaggagggtggcgccaccgccgagg

SEQ ID NO: 53635 - DNA, 257 bp, Glycine max
  unsure (1)..(257): unsure at all n locations; Clone ID: 701143367H1
cagcttcaatcctcgaccacaccacccatcagcgacatgcttcctctttcccttctcaagactgcccaaggccaccctatgttggtggaactgaaaaatggggagacatataacgggcatttggttaattgcgatacatggatgaacatccatctccgagaagtcatttgtacatctaaagacggagatagattttggaggatgcctgaatgctatatacgaggcaatncnnncaagtaccttcgagttcctgatga

SEQ ID NO: 53636 - DNA, 254 bp, Glycine max
  Clone ID: 701143368H1
tctctctctagacttagattttgtgaatggctgaagtggaagagggacaggtcatcggcgtccacaccgttgatgagtggaagctgcaactccagaatgcaaaagactccaaaaaactgattgtggtggattttactgcttcctggtgtggtccatgccgttttatggccccagttcttgcagagattgcaaagaaaactcctgaattgatcttcctcaaagtggatgtggatgaagtgaggcctgttgctgag

SEQ ID NO: 53637 - DNA, 254 bp, Glycine max
  unsure (1)..(254): unsure at all n locations; Clone ID: 701143370H1
gggatcacagaaaccaacaacagttcttgcactgaggtttcacgatgttgctggaacttgcacttggtttgtttgtgttagctttgtttctgcacttgcgtcccacaccaagtgcaaaaancaaaagcacttcgccacctcccaaaccctccaagcccaaagcctcgtcttcccttcattggccaccttcacctcttaaaagataaacttctccantatgcactcatcgatctctccaaaaagcatggcccctt

SEQ ID NO: 53638 - DNA, 251 bp, Glycine max
  unsure (1)..(251): unsure at all n locations; Clone ID: 701143372H1
ctgaagacnttggtgctttgcatctaatcccaaaggaantttncacttcaagattgttagacnagattgaagctggggaaaggtttgctgtgtatgttgtagtcccaatgtggccagagggtgttccagaaagtgcatcagttcaggcaatattggactggcagaaganaacaatggagatgatgtacaaggacattattcaggcactcagagctaagggaatcgatgaagatcctcgacactatttgaca

SEQ ID NO: 53639 - DNA, 250 bp, Glycine max
  unsure (1)..(250): unsure at all n locations; Clone ID: 701143373H1
ggantcgatcaatccctcanctcattgctgagatctgcaaactggctntggantacgaaccctacgacagtagcggaactgntgatgaccttccaccaacccatcaanntnccgantttccaggggaggaggctgaagttacaagcttggaggtattgacaagcgtgtgattgagaggttcgagaaggaggctgccgagatgaacaagaggtcattcaagtatgcctgggtgctcgacaagctcaaagct

SEQ ID NO: 53640 - DNA, 109 bp, Glycine max
  unsure (1)..(109): unsure at all n locations; Clone ID: 701143375H1
gcagacatattaatgagtaatgatgaacganctaagagtagatctttgtggaatttttccattagaacacgaccaaaggagttgcagtcaaattggggagtgcgcatag

SEQ ID NO: 53641 - DNA, 76 bp, Glycine max
  unsure (1)..(76): unsure at all n locations; Clone ID: 701143376H1
gctcccaatcctatttacacagagagagccantganacaaaacaacgatctaattcaagtttaaatttnncagnat

SEQ ID NO: 53642 - DNA, 128 bp, Glycine max
  unsure (1)..(128): unsure at all n locations; Clone ID: 701143377H1
aacggcanttccacaacaagcctcantnttctgcactgccaatcggtcgttcacggcgccgtttcatcagtatncgaggtcgaataanaccaaccagaatagtcgcggaagctactcaaggtnttact

SEQ ID NO: 53643 - DNA, 117 bp, Glycine max
  unsure (1)..(117): unsure at all n locations; Clone ID: 701143390H1
ctcacctgtcttncagtagtttcttccctatttcctgttcataactcantttgtaactatnactggtgaggttatggctcaanaggagacacaagcanctgangttgttnttgctgt

SEQ ID NO: 53644 - DNA, 99 bp, Glycine max
  unsure (1)..(99): unsure at all n locations; Clone ID: 701143392H1
cngctcgangcccgtacaaagcaaactgctgcgtnnagttcaactggaggaaaagcttcccaggaagcaggcttggcaaccaaggctggtnnngtgtgt

SEQ ID NO: 53645 - DNA, 138 bp, Glycine max
  unsure (1)..(138): unsure at all n locations; Clone ID: 701143393H1
ctcaacttggctaaaaganaaaaacatgtgctgtgataggttggcattcaagatgttagggcagaagttatgcctgcaggaaaggctgatgttgttcgttcattccaaaaggttatgttacaactntcatancgnacc

SEQ ID NO: 53646 - DNA, 138 bp, Glycine max
  unsure (1)..(138): unsure at all n locations; Clone ID: 701143394H1
cagtaagcnataactcatttgangctctgtgnaganttgaganatggctaaagatgttgaggttcaanatgcaatgaggagagtanctctgccaaagactaccatgaccctcctgccagcacctttntncgncncgnt

SEQ ID NO: 53647 - DNA, 275 bp, Glycine max
  unsure (1)..(275): unsure at all n locations; Clone ID: 701143401H1
gccgcatcctcaaggtgaagaatatggtcctgttagcgaagtctacgtgccttcgagcgaaggagttgaagcttatatttggttattggcaaaggcttatgttgttgtaaatgactcgtgctaccatcaactcgttagccattggctaaacactcatgcggttgttgagccattcgtcatagcnacaaataggcatctgagtgtggttcaccctatttacnaacttttgtttcctcactatcgtgacacnatgaatattaattcacttgcccgca

SEQ ID NO: 53648 - DNA, 278 bp, Glycine max
  unsure (1)..(278): unsure at all n locations; Clone ID: 701143403H1
ganaaattcacctctccaatcccaatcccatcgttgcaaatgatccgattcattctgttgcagaancaggcagggcaanacccgtcttgccaaatactacgttcctctcgatggactccgagaagcacaaggtcgaatacgtggttcntntggctcgtcgtaaacagagaccctaaatacacaaatttcgtcgagtttcgtacgcacaagataatatacaggcgatatgctgngttatttttctcactctgtgttgatatcactgataatgagttggc

SEQ ID NO: 53649 - DNA, 274 bp, Glycine max
  unsure (1)..(274): unsure at all n locations; Clone ID: 701143404H1
aaannccacttctttgccagaggtggccaagcagcgngagtangtggaacattcnagtactttcaagttcctttgtcgntnagcaagaccnntacactgtggnaggagtgcagaatcttgganacnaancagtgatgtgtcataggctaaatntcagaactgcagnattttnctgccatgangtccgtgaaacaacngctttcatggtnccattggtggctgnttatggaaccaaaactcaggcacttgctatttgccactcagatacttctng

SEQ ID NO: 53650 - DNA, 280 bp, Glycine max
  unsure (1)..(280): unsure at all n locations; Clone ID: 701143407H1
ggtccttccgaattcgnagttaatttgcaanatggctaaggaaaaggctcanatcaatcattntggtggttggtcatgtngaccctganccacgaccnccaccattaacganctgaanaagcctgttgtgganaaanaagctccagggcatgccatatgagggcatgcacgtacggcctcggaggggaaccagaaaattatnttaacaaaataatctggaaccctaatgtatcagtgtcatcatcagtgtgtagtttaagctagctttgctatggttact

SEQ ID NO: 53651 - DNA, 277 bp, Glycine max
  unsure (1)..(277): unsure at all n locations; Clone ID: 701143408H1
gttgaggatctaatcattaccanatttaatatacttggcnaatggggtctgaaggncctacgacaccgacancaacaattcatgtgacaggatttaagacattccatggagtttcagagaatccaacagaaacaattgccaataatttgacggagtacatgaataagaagggtttgccaaagggtttagttattgggagctgcagcattcttgagactgctggtcaaggagcacttgttccactntaccagcagattncaatccgccgttattgaca

SEQ ID NO: 53652 - DNA, 281 bp, Glycine max
  unsure (1)..(281): unsure at all n locations; Clone ID: 701143409H1
gttggtctttatattnagttattgacatcaacaaantcatggaggaagttaatgtggttcaagacccacgnatngaacctgnttcagtagcttctgcgtttgctggccataaggnagctntacancaaagggacccacaaatttttangaattgctgttnaanaagcgtataaaggggtagactgtgaanatgggggtccctttggtgctattntagtttgtantgatgaaattgttgctagntgtcacaacatggttctgnggaacacagaccccactnc

SEQ ID NO: 53653 - DNA, 273 bp, Glycine max
  unsure (1)..(273): unsure at all n locations; Clone ID: 701143416H1
ctctctctcacccagatcttgtagcaatggcgagcgctcccactccacgcgaagagttcgtgtacatggcgaantggcggannaggccgagcgctacgaggagatggtggagttcatggagaaggtctccgcctccgccgagagcgaggagctgaccgtggaggagcgtaacctcctctccgtcgcctacaagaacgtgatcggcgctcgccgcgccttcctggccattcatctcctcaatcgagcagaangagganagccgcggcaacgagg

SEQ ID NO: 53654 - DNA, 254 bp, Glycine max
  unsure (1)..(254): unsure at all n locations; Clone ID: 701143418H1
atcctaagtctttgggaataacngctgcaatggcttnnagtcaggangaggtgacacttttgggagctactggaagcccatttgngtgcagggttcatattgccctcaagttgaagggagttcaatacaaatatgtcgaagaaaatttgaggaacaagagtgaactgcttctcaaatccaacccagttcacaagaaggttccagtgtttattcacaatgagnagcccatagcagagtctcttgtgattgttgaa

SEQ ID NO: 53655 - DNA, 275 bp, Glycine max
  unsure (1)..(275): unsure at all n locations; Clone ID: 701143424H1
ggagatgcaagtgggatttcgcgcanagcagggggattgggagctgnaaggcttggttcaacaaatccctcaacctcaagatttctacccactgattcgattaatcgaataaanaaactcttggggaattgaacatgatgccttttgtggtgaatgaatgccactattatcagtaatatgtatttctttgcttgtttctcttctcgctagcccgagaaccctctttaggaatttgttcaactttgagttttaggttttgatttttatggaataat

SEQ ID NO: 53656 - DNA, 278 bp, Glycine max
  unsure (1)..(278): unsure at all n locations; Clone ID: 701143428H1
caaaatcacagtttctggacaaactccttttcgaaggtgaccaatccggtggatcaancatggacaagagcatgttagcggatttggattcgcttcctgaggctgataagcaaagaatgactgtcatgatcgatcagctccaaattcgtgacagtctgagaatgtataattcactggttgagagatgcttcagtgattgtgttgacacatttnngcataaatcccctgcaaaagcaagaggaaacctgtgttccgaagatgtgcagagaaatttctga

SEQ ID NO: 53657 - DNA, 274 bp, Glycine max
  Clone ID: 701143430H1
ctatctctatcggtcatgggtgcttttgcttttgatgaggaaaactccttccaaccgtggatccggcaacactctacaaagctctgacaaaagatgctgacactatcatcccaaagattattggggccatccaaactattgaaatcgttgaaggaaatggaggacccggaaccgtcaagaagataacagctagtgaaggtgaccaaaccagtttcgtgctgcaaaaagtggatgcaattgacgaggctaacttggtatacgactacagcatagt

SEQ ID NO: 53658 - DNA, 271 bp, Glycine max
  unsure (1)..(271): unsure at all n locations; Clone ID: 701143432H1
ggtggatnnagttgtttgtttcattctangaacnatntccgattcgagtcctagttggaactgagctcncncctttctctccctccctctaaatatntatttctgacaacccanagtcaaacaaagaanagcaactnaactagaaatagattgattgtttcatgataaaaaggcntcatgccttgtctcccttttgatcaagcgtgacanacttgttttntncttgntnattgnaaatcaaagagttccctttctntggtnatataataat

SEQ ID NO: 53659 - DNA, 160 bp, Glycine max
  unsure (1)..(160): unsure at all n locations; Clone ID: 701143443H1
ctctctctttcnatcatggcttagcccantcagcaaacagtncgnntaccnagtttcaaantacgngatngtcggnganggtggtacaggaaagncaacgttnncgaaaaggcatcttacnggtgaatttgagaagaaatangaaacgaccattggagtg

SEQ ID NO: 53660 - DNA, 271 bp, Glycine max
  unsure (1)..(271): unsure at all n locations; Clone ID: 701143449H1
anattatggcacctgtcttttctcgtgaagcttggcgttgtgtgtggcacatgattcngantgatctagtgcntggatggggattggactttgctctcagaagatgtgtagagccagcacatgaaanaattggtgtaattgattcacaatggattgttcatcaagtaattccttctcttgggaaccaggttagacctcactngcttncnatatagtnagggccacttattttctttgatgatatcnttttaaattgagtgtgtttttatat

SEQ ID NO: 53661 - DNA, 275 bp, Glycine max
  unsure (1)..(275): unsure at all n locations; Clone ID: 701143462H1
atcagcagaaggaaacaacttcagctcnagccgcagcttcanaactcaacatcctttcacagcaacagcttncnataanncaagccgaagacaaagaagccgagctgagcctctcattaagccactccgagtcagagtcaattaactcggttgagtcactccggaaacgatccagatgacgtggcgcttttccttcacacctccggcaccacgagccgacccaagggagtgctttgacgcaacacaacctgttctcttccgtgaacancattaaa

SEQ ID NO: 53662 - DNA, 270 bp, Glycine max
  unsure (1)..(270): unsure at all n locations; Clone ID: 701143466H1
antccttcacaagtccaananntagcacacccagaagancgcgtntcagctggccacactgttgnntttgntgacacatagtnnagnntcatatnaatgtcgtcaagaagcattgagganaagnctctntcatggggatntngatggcaaaaggcaggggcatttggagncttcgggnttngattctttgagtgancccttgcnggcagacgatgnttatattgagaataanangatatgtactcttgaagntccatgggangatgntaa

SEQ ID NO: 53663 - DNA, 272 bp, Glycine max
  unsure (1)..(272): unsure at all n locations; Clone ID: 701143474H1
gtttaccacgaccacttctacatttaccatcttgaccttgacattgatggtgttgccaactccttttgagaagacaagtttgaagactgtaagagtgacanatgnnagttcgaagaggaaaagctantggacaactgaggttgaaactgccaagactgaaaatgatgcaaagataatacttgggttgagccctggtgagctttcagtggtgaatcctaacaagaaaacctctgttggnaatgatgtgggataccgtttgattccagcaatcc

SEQ ID NO: 53664 - DNA, 264 bp, Glycine max
  unsure (1)..(264): unsure at all n locations; Clone ID: 701143480H1
ggcaagatnacanaatnggtgtcngagagcnnggttcgntcgtgaagcttncaaggagggcctggaaactgagatgcccgttatggttcagatgcaggaattnctccgaggagctaagaatgccgtgtctttggcccagggggtggtttattggcagcctcccaagcaagcattggaaaaancgaaagaacttgtatctgagcctttaattagtcgttatggtaacgatgaaggtattcctgaactcagagcagcnttantcaa

SEQ ID NO: 53665 - DNA, 250 bp, Glycine max
  unsure (1)..(250): unsure at all n locations; Clone ID: 701143481H1
gnccatggtaggcggaaccatgnncngctgcgtatttgcgagtatccatgcccacttcnccacagtcccccaccnctacgaggangagatgcagaaatctgaaaacttcttgctccgttaacagacccnaaattccaatgccccctctcaaccctaaagacccctttctctccaagntcgcttccgtcgntgcttcttcccctgaaacgctcctcaacactcccaaaaactccgacacccttccttatct

SEQ ID NO: 53666 - DNA, 233 bp, Glycine max
  unsure (1)..(233): unsure at all n locations; Clone ID: 701143482H1
gcactctgtgttttcagcgccgtctccgatctccgacaatggcgacccanatgagcaancaagaganagttcgtanctgatggagtgtnctncgctgaaccngacgangttctganaaganagttggnnnangacggttantccgncgtggaagttagggttacgccgtnncncactganntcntnattngagccaccagaatcccaagctgttntnggtnagaagggaagga

SEQ ID NO: 53667 - DNA, 266 bp, Glycine max
  unsure (1)..(266): unsure at all n locations; Clone ID: 701143483H1
aacattagcagctgaagcaaaagctcaatcccttgcgttaatggtggattgtcagatttaattcgattttggaaacancttatcgatcccccaatccgctgtgaacagatcgagggcgtggcctgtttgatttgaactgnatttcggattgaaggatctcattttcttggagcattaaagcagaaatttctagtattgtgtacatggttctctttatgatacagtgtagaataattgaatatgatattaagagtgagtcagtctac

SEQ ID NO: 53668 - DNA, 274 bp, Glycine max
  unsure (1)..(274): unsure at all n locations; Clone ID: 701143488H1
ggtacattctgctgtgtcccttatcaacaccaaagtacacggcatatataanatctatcatcaatggctggcttggaagctnccatttccaacaccaccaagaagttctttcaaagggctcttgagancttcaagtcttgtttctctcctggttaccaaaagcttcccaaaacacctccacataatcaattctcntgttctctggacattaataataacccatgctacgaggaattggagaagttctacagtgacttcaccaagcaatgggatt

SEQ ID NO: 53669 - DNA, 266 bp, Glycine max
  unsure (1)..(266): unsure at all n locations; Clone ID: 701143490H1
ctggttctgaagaggacgatgaggggttcgactcttaccggaaaggagggtaccacgncgtaagagtcgccgacnagttcgccggcggcaggtacatnncgcagaggaagctcggctggggccagttttcaacagtttggcttgcctatgannctactacatctgcnatgtcgctctcaagatccagaaaagtgcggcccagtttgttcaggctgcccttcatgaaattgatgttcttacatccctttctgatggtgccgacatgg

SEQ ID NO: 53670 - DNA, 269 bp, Glycine max
  Clone ID: 701143491H1
gtacttggtgtgataggcattttccactgatccagccaacaagcacaggaccatcttccggggagaatcctccgtcttgcgaaacagttaggaagggagtctttgctgccggtgctgcttttgttttcttcactgccataatctctgaattctactatatcaactactcaagggcaagggaaagcttccaaccttatgctggcggcgagactggtgtcggtatgggaacctacaaatgagcttctagttaagaattttacagcaaacat

SEQ ID NO: 53671 - DNA, 258 bp, Glycine max
  unsure (1)..(258): unsure at all n locations; Clone ID: 701143492H1
gccagtattcatatgcttgtctcaaagattaagccatgcatgtgtaagtatnaactaattccagactgtgaaactgcgaatggctcattaaatcagttatagtttgtttgatggtatctactactcggataaccgtagtaattcnngagctaatacgtgcaacaaaccccgacttctggaagggatgcatttattagataaaaggtcaacacaggctctgcctgttgctttgatgattcatgataactcgtcggatcg

SEQ ID NO: 53672 - DNA, 268 bp, Glycine max
  unsure (1)..(268): unsure at all n locations; Clone ID: 701143494H1
aatacctcaaaaatggttcactctctgctcctacttcttctcctcctncactctcactggnaacctgctgctcaacatgacggcccttcgatcacagccaccatggagcaattctccggttacaaaatccacgaacctcactctttccaaccctcttcactctccgttgatgctcaggctcttcagaaccagattgatgagcttgcggcgttttctgactcacctgctccatcagtaaccagggtcttgtatactgacaaggatgttt

SEQ ID NO: 53673 - DNA, 262 bp, Glycine max
  unsure (1)..(262): unsure at all n locations; Clone ID: 701143495H1
ctgctttgataagtgcaactttcctagaggaagaggtgtacgttggaagtttggtangggctgttggagttattgccggtttatatgttgtgctttggggtaaagccaaagagtttgctgagattaaaccagaggcaccacaatcatcanacttactagatgatgagataagtagtaggatagatttggaacaaccccttctatcagagaaattgtctgaacatgcaacagaagcagatagcaaggtgtagccatgatgatt

SEQ ID NO: 53674 - DNA, 250 bp, Glycine max
  unsure (1)..(250): unsure at all n locations; Clone ID: 701143502H2
gctggcgttgttgccgttgaggtcaccggtggacctgaagttcccttccatcctggaagagaggacaaacctgagccaccaccagagggtcgcttgcccgatgccactaagggttctgaccatttgagagatgtgtttggcaaagctatggggcttagtgaccgagatatcgttgctctgtctgggggtcacactattggagctgcgcacaaggnncnnnctggattcgagggtccctggactctaatcc

SEQ ID NO: 53675 - DNA, 249 bp, Glycine max
  unsure (1)..(249): unsure at all n locations; Clone ID: 701143504H2
accgatgtggtcgctctctccggcgcacacacctacggtcgtgcccactgtccctccctagtgaacagaaccatcgaaacggacccaccaatcgacccaaacttcaacaacaatttgatagctacgtgtcccaatgccgagtcccccaacaccgttaatttggacgtgagaacccccgtgaagttcgacaacatgtattacatcaacctctnncnaccgccaaggagtgttcacttctgaccaggacat

SEQ ID NO: 53676 - DNA, 247 bp, Glycine max
  Clone ID: 701143505H2
ggcaagaagaagtttgagactctttcctacctgccagaccttgatgatgcacaattggcaaaggaagtagaataccttcttaggaagggatggattccttgcttggaattcgagttggagcacggtttcgtgtaccgtgagcacaacaggtcaccaggatactacgatggacgctactggaccatgtggaagctgcctatgtttggttgcactgatgcttctcaggtgttgaaggagcttcaagagg

SEQ ID NO: 53677 - DNA, 247 bp, Glycine max
  unsure (1)..(247): unsure at all n locations; Clone ID: 701143506H2
ggcgtcttcataaacgcctttcttctccgtttccgtttcctcgttcgaattcgctttttgatctgcgaaaatgagagagtgcatctcgatccacattggtcaggctgntatccaggtcggaaatgcttgctgggagctctactgcctcgagcacggcatcgggcccgatgggcaaatgccaagtgacaagacagttggcggtggtgatgatgctttcaatactttcttcagcgagactggtgctgga

SEQ ID NO: 53678 - DNA, 239 bp, Glycine max
  Clone ID: 701143507H2
caacagcgtcctctccacccactccctcctggaacacaccgacgtggcggtcctcttggacaacgaagccatctacgacatctgcaggagatccctcgacatcgagagaccaacctacaccaacctcaacaggctcatttcccagatcatttcgtccctcaccacttccttgaggttcgatggtgccatcaatgtggatatcactgagttccagaccaaccttgtgccctaccctagga

SEQ ID NO: 53679 - DNA, 247 bp, Glycine max
  unsure (1)..(247): unsure at all n locations; Clone ID: 701143508H2
ctagaacttgattacttgaacattccctatgacagatgaggncggttgttctggatttctggccaagtccatttgggatgagggtcantactgcanttgctgaaaagggtatcgaatatgagtacngagaagaggacttgaggaacaagagtcctcttctcttacaaatgaacccggttgacaagaagattccggttctcatccanaatggcaaacccatttccgaancctcattgctgttcagtac

SEQ ID NO: 53680 - DNA, 244 bp, Glycine max
  unsure (1)..(244): unsure at all n locations; Clone ID: 701143511H2
gttttcttngttgntgcagtagttttggtagcatggccatgccatggcgcaggctaccaaaggttccctctccgaatgaaaactggctatggtgagcgttcttnngaggtaaaatgcgcaagttttaggcttgctgtggaagcacacaacatacgancnganngaagcattcatnaagagtgngtnnaaccaanaaangactannttaatggcgannaatttagatcagactctaaaacagtta

SEQ ID NO: 53681 - DNA, 135 bp, Glycine max
  Clone ID: 701143513H2
gggtagcctacccttgatccccttcactgatatgatgtagaggttcttcgcgccggtgttgtcggcgcagttcaccgtcgccgccaccggcagacccagcgacatgcggaacttgtttcccgccgatcctccgcg

SEQ ID NO: 53682 - DNA, 252 bp, Glycine max
  unsure (1)..(252): unsure at all n locations; Clone ID: 701143515H2
cgaantanngcgcagtggacatcaacggagcgaacgtcacagtcgttttctaacaatcgtcacggcggtttccagctctcgctcttcatctcagacaactgggcagaagaaccagagttttattgaaatgatgaagtctgcaagggatagtaatgcccaggatgaagtgctagnaagcgaggaaacattttttctcaagaaagaaccctcctcgaatacccaaagagaactcagggtgaaagtggatgcgaa

SEQ ID NO: 53683 - DNA, 250 bp, Glycine max
  unsure (1)..(250): unsure at all n locations; Clone ID: 701143518H2
catgcacangaacatgaacangcatggtggcaagncaggangcatgtttcaagaaggcatgcacantgaccaccatggtggcagaaagttccnttttggtagtcatcatcatggtaataataacgcctctcaacatcattttnccaaaccatggtgggcacctgagtatttttcggaggaatccgaggagtacgaggagtcttatgcagaggagcatgttggtggagtcacggctaagntggatgaaatg

SEQ ID NO: 53684 - DNA, 247 bp, Glycine max
  Clone ID: 701143524H2
ggtgaattggttggagagatatccagaatataaggacagagatttctatattgctggggaaagctatgctgggcattatgtgcctcaacttgcacataccattctctatcataacaaaaaggcaaataagaaaatcatcaacctcaaaggaatcttgattgggaatgcagtgatcaacgaggaaactgactcggacggactgtatgattatcttgctagccatgcaatcatctcagacaaagcagct

SEQ ID NO: 53685 - DNA, 248 bp, Glycine max
  unsure (1)..(248): unsure at all n locations; Clone ID: 701143525H2
anttcgcccccactagccntctagtacagccctttgaaaatcgttacaaaaccaatcnatctatctatttggtataagcatggagctttgttggcaaaaatccatccatggctcttaaagaagcttggaggattttgtgtgagagggttctcacccttcacactccacctcctacagtttgcttangctttagccattggtttctctaatcaatcaccacaaaagggtatacatggaggaacataatc

SEQ ID NO: 53686 - DNA, 243 bp, Glycine max
  unsure (1)..(243): unsure at all n locations; Clone ID: 701143528H2
cggtaggatcttccgaganccgaagcngccatggggatcgncactcaaggccggaggtaagagcaanaanaccaaaagaacagtacccaagtccagtgatatctatntcaagctcttggtcaagctttntccctccttgttcggagancnggcagcaacttcaatgctgttatacttaaganattgttcatgagcanggttaacaaacccccattgtctttgtcaaggttgattaantatacg

SEQ ID NO: 53687 - DNA, 251 bp, Glycine max
  unsure (1)..(251): unsure at all n locations; Clone ID: 701143531H2
gatcatgtggatgnnggtggatcacaaaacagtgnncagcaacatcantgaaatngtgaccancccagaaggggaaaacttaggagaatggctgagtctaggcctcaaaggagacatcaacatgccagcagaagaacaaaactcatcatcaaggcctctccacagcaacaacaanagcgtattctcatgcaacttctgcatgagaaagttttacagttcacaagccttagggggtcaccagaatgcacaca

SEQ ID NO: 53688 - DNA, 246 bp, Glycine max
  unsure (1)..(246): unsure at all n locations; Clone ID: 701143533H2
ggaacaagcaagtgcttctaaaggactatgttaccggttttcccaaagaatccgacatgaatattgtcgaaagtaccataacattgaagcttccacaaggttncaangangacttgctcaaaaatttgtacttgtcttgtgatccgtatatgaggaatctcatgaacaagcccgaaggccctcccaatagtcgtgcttacatcctggctctccattaataggatatggtgtgtctaaagtcctgga

SEQ ID NO: 53689 - DNA, 244 bp, Glycine max
  unsure (1)..(244): unsure at all n locations; Clone ID: 701143535H2
anccngcaaacgcagaatccttctcgattttaataagcaattaaaaccaacttgccaaccttttcccaacttccacaaaggtatattataataagcatgttaaggtgaggacaactccaaattgagaaggattctgcgtttgcagttgaaaagttaataacttatgctggttcagcgtaatttatttagtgtcttccgtgtccttattatttnctgtaatctagattttagatgttattgggat

SEQ ID NO: 53690 - DNA, 89 bp, Glycine max
  unsure (1)..(89): unsure at all n locations; Clone ID: 701143537H2
ggtgcctcntctcncctatattcattgcttnctgcttgcttgtaatttgttgccacacaaccaaaccacttgcacttctgggttttttt

SEQ ID NO: 53691 - DNA, 247 bp, Glycine max
  unsure (1)..(247): unsure at all n locations; Clone ID: 701143540H2
ctagaacttgattacttgaacattccctatgacagatgaggnggttcttctggatttctggccaagtccatttgggatgagggtcanncttgcacttgctgaaaagggtatcgaatatgagtacaaagaagaggacttgaggaacaagagtcctcttctcttacaaatgaacccggttcacaagaagattccggttctcatccacaatggcaaacccatttccgaatccctcattgctgttcagtac

SEQ ID NO: 53692 - DNA, 248 bp, Glycine max
  unsure (1)..(248): unsure at all n locations; Clone ID: 701143541H2
gccttaccttancctcgcancngnagnnaccggcanaggaaaaactagnaaagatcccaacantgagganccgagcgattttntctaccntccnaganatgnagcatttgggtccacttgaagtccatcagatnttctgcgctatggaatcaaatctgtatcccaagatgtcttgcctgtcttgnctgatgcattcgatggaaatatnttgagccttgagnttgntaattttgctgaagtgcacnaat

SEQ ID NO: 53693 - DNA, 217 bp, Glycine max
  unsure (1)..(217): unsure at all n locations; Clone ID: 701143544H2
aaagaaccgataatagttgttccttcactctccgctgctctntggccactgagccaagaagatcggcctcacaggtttgcaaatctgcttccagagccgcgaggtcccttctatcctctcgttttcactctcaaggacgtgcgcttggngctgctgcggctgtttcattgagcagcaaagtgcctcttttttacggaaagaacggttctggaaatgg

SEQ ID NO: 53694 - DNA, 246 bp, Glycine max
  unsure (1)..(246): unsure at all n locations; Clone ID: 701143548H2
cccttcctgtacaagttcttgcatcgacctggactggaatgcnttgattncagtgtaataatcttgttgtgagtatgaaaagtcacgggatctgcgtgtagtgaagaaagtgtttgatgcttgagaaatgatgactataatctctatctttgtactttttagtggggtacctgtatacattacagtggttttaaaattttaatgctatgttataatggttggcatatttatcaaaagtttgcttat

SEQ ID NO: 53695 - DNA, 241 bp, Glycine max
  Clone ID: 701143552H2
taactatgaagcctaccctactattatccctttccttcctgcctctctttgctttcctggctctttcagaagatgttgaacaagttgtggacataagtggcaaccccattttcccaggtggcacatattacattatgccatcaacttggggcgctgccggtggtggattgaaactaggccggacaggaaactcaaactgcccagttactgttttgcaagattactcagaaatcttccgtgg

SEQ ID NO: 53696 - DNA, 241 bp, Glycine max
  Clone ID: 701143557H2
ctttctttttctgtgagcctttctttcaggttcttaacttgatcagtgtgcagtgtccaaatcataagggtagttgcaaattgcaatggctaagcatgatgttgagggtggttccttctctgcaaaggactaccatgatcctcctccagcaccgttgattgatgctgaggaactcacacagtggtccttctacagggctttgattgctgagttcattgccacaatgctcttcctttacatc

SEQ ID NO: 53697 - DNA, 248 bp, Glycine max
  unsure (1)..(248): unsure at all n locations; Clone ID: 701143564H2
acaaaaattcactatgggagtcacaacctttacacaggaatactcctccctctgtngccccancacgcatgtncaaggccttgattgtagactccagaaatttgcttccaaagctcttacctcagtttgtaaaagatgtgaatgtgatccaaggtgatggtgaagctggaagcattgaacaagttaacttcaatgaagctagccccttcaaatatctgaaacacaggattgatgtgcttgacaaggac

SEQ ID NO: 53698 - DNA, 234 bp, Glycine max
  unsure (1)..(234): unsure at all n locations; Clone ID: 701143565H2
ttttgcttcactctacgcacatcgcagcaaaccagagattgaactccgacnatgcctcccgtcgctcctcgatccggcgatgccatattcgccaacgtcgaacgcgtcaatgcggagtgtttactttgacgtatggcgcaattgtgcgtcaattgctcacggatctggaagaggttgaggaggttaacgagcagcttgatcaaatgggttacaatattggaatccgattgattg

SEQ ID NO: 53699 - DNA, 239 bp, Glycine max
  unsure (1)..(239): unsure at all n locations; Clone ID: 701143567H2
cttagacaaaaaacaaggatcanaaccgttgaatcaagttgannaagatggcactagtctctggaggaagatcaacactnaaccctaacgcccctctttacattcctgccgcgtttcgccaagtggaggatttctctccggaatggtggcagntggtgacgacgntgacatggtaccatgactactggctaagccagcagcacgatgagggagnttctacggngaggacgacgggtttg

SEQ ID NO: 53700 - DNA, 244 bp, Glycine max
  unsure (1)..(244): unsure at all n locations; Clone ID: 701143571H2
atcgaccatgcttncgccntcntgcgtcgccgtctnacgtcggcgccaacatctccggnggncacgtgaaccccgccgtgcacctgtcggngnccttcntgggcggcaacatcaccttactccgcggcatcgtctacgtcatcgcccagctcctcggntccatcgtggcctccctcctcctcgccttcgtcactgcctcccctgttccagcattcgggctttccgctggagtcggagttggcaa

SEQ ID NO: 53701 - DNA, 243 bp, Glycine max
  unsure (1)..(243): unsure at all n locations; Clone ID: 701143573H2
cttcgtcctgctcttgtcttgcttttccatccatgtaagtttcnccatccatagatattttatatatttttctctccttctccaatgcattaattttcnctaaggaataccacatgtgtttaagagttaggtgtttgattcaatctaaggatagggatagtactaacctgtttattttcttatggaataaataactaacactgtttgttgttcttaattgacccaacccaagggcaagccttt

SEQ ID NO: 53702 - DNA, 218 bp, Glycine max
  unsure (1)..(218): unsure at all n locations; Clone ID: 701143574H2
tgttatttcagtgcagcagcaganatgaccatcctcatnnagcaacctgcccttgagttacaagttgaaggcaacaatgtgcatgctgaagaaaccaatgagcttgtattggatggtggatttccattgccaaaggatggatatatggccccagaaatcaattcatttggccactccttcagagaatatgatgctgaaagtgagaggcaaaaaggtgt

SEQ ID NO: 53703 - DNA, 228 bp, Glycine max
  Clone ID: 701143575H2
tgaacccgacagtggttgcaactaaaatgtttagctataactcattgagatcagcaacaggagattttcatccttcaagcaaaatcggtggaggaggctatggagttgtctacaagggagttttaagggatggtactcaagctgctatcaagtctctttctgtagagtctaaacagggaacccatgaatttatgacagaaattgatatgatatcaaatatacggcatc

SEQ ID NO: 53704 - DNA, 243 bp, Glycine max
  unsure (1)..(243): unsure at all n locations; Clone ID: 701143579H2
aaatcctcaattttctgagcagccaaacactctctctctgtctctcgaaaattctcagtttgcagagaaaatctgaatcatgtcgtggcaagcgtatgtcgacgatcaccttctgtgtgacatcgaaggtaaccacctcactcacgctgctatcatcggccaagacggnagcgtttgggctcagagtaccgacttccctcagttcaaacctgaggagataactgccatcatgaatgactttaa

SEQ ID NO: 53705 - DNA, 237 bp, Glycine max
  unsure (1)..(237): unsure at all n locations; Clone ID: 701143583H2
antttttcatgctcaganaaaaaattaaaaaattgagtgtgttaattgttaagttctttcaagcgttgtggatccttttcattcaattttgttggcctttgaaaaccgaagaagaagcactgtgattctgattctttatcggtcgttgcanttggtgcctccgtctttttcatccctaaccccactccacacaacatacgatnnncancgcnnnanggnncganggatcaagacggt

SEQ ID NO: 53706 - DNA, 238 bp, Glycine max
  unsure (1)..(238): unsure at all n locations; Clone ID: 701143584H2
tttgacgagaccggaaaattgggcattagttgaaaaggccaagtatttctacatttctggctttttcctcactgtatctcctgattccatacaattagttgctacnacatgcagctgcaaataacaagttcttcatgatgaacctttctgccccatttatctgtgngttcttcaaggatgcactgaataaagttctgccatatatggactacgtttttggtaatgagactgaagcaag

SEQ ID NO: 53707 - DNA, 239 bp, Glycine max
  unsure (1)..(239): unsure at all n locations; Clone ID: 701143587H2
ctcttggtantttcgatgactnttttggngttgcctctcttaaggcttatttggcagagttccatgcaactctgannaagcgtgttcgngggtgtngggtcancccatcgcttacaacgagnttacaaaagatgcagccttggatccaacggggctggtggcagtagctgtggcccatgcatttgcactgtttgtaggtgtctccgtcgcagccaacatctcgggtggccatttgaacc

SEQ ID NO: 53708 - DNA, 241 bp, Glycine max
  unsure (1)..(241): unsure at all n locations; Clone ID: 701143589H2
aagcttcttctgtttcacttctacttgnagtttataantgctcctcaattctaatgctcgccttccccatttatatatcttntactttctagagtaagagtagctacagtcatacacaccacacaacanagntcancgggagtggatttaaggcaagtggtggcgggtgtgctcaccctgcanaatgttcgtcatgcttattcacatngatcaaaagggaccattttgatgtgttcatgat

SEQ ID NO: 53709 - DNA, 235 bp, Glycine max
  unsure (1)..(235): unsure at all n locations; Clone ID: 701143590H2
tgatgtaattgtggggatactagaggaaaagtacccagaaccctctctaatcactcctcctgaatttgcctccgtgggatcaaagatatttgggtcttttgtgagttttctgaagagcaaggatacaaacgatggaactgagcaagcancggttgctgaattgagtgccttggatgaacatctcaagacccatggtccatacattgctggggagaaagtcactgctgttgatctg

SEQ ID NO: 53710 - DNA, 236 bp, Glycine max
  unsure (1)..(236): unsure at all n locations; Clone ID: 701143591H2
cactgtggtgangtcgtgtctggtgttggatacgacggaggctgggttcaanaaatttngactttggttgggggaatgcnctgtatggtggaaatggcangttgctgngngctggtgctttccctgcggtgaaacttcatgtgccgagtcagaatgccaagggtgnanaaggaattcnggttttganttgccttccttaccaagtcngaaanncttgcaaagattngatcanaaca

SEQ ID NO: 53711 - DNA, 182 bp, Glycine max
  unsure (1)..(182): unsure at all n locations; Clone ID: 701143594H2
cnttttggccttttgaagcttccgaggtggcaaagatgaactgatcccaaaatatataactcnagttttacaattcaagccaacatgaatcctgtaataccatgctctantggcaatgtttcaattattcctgtattcatctattcaacnaggaagaataacactttaacaagattcaactt

SEQ ID NO: 53712 - DNA, 231 bp, Glycine max
  unsure (1)..(231): unsure at all n locations; Clone ID: 701143595H2
tctaccgagagggttanacacttagcatctgcngagggtaccttggtagacaccacactacccataatatggtcgaaaacaacaacccaagggtttttggttcttctatgtttctatgtttgcttgtgttgatgatttggaacaagattgttgttgttgttccacaagccgaggctcgagcattttttgtttttggtgattcgctagttgacaatggcaacaataactacc

SEQ ID NO: 53713 - DNA, 243 bp, Glycine max
  unsure (1)..(243): unsure at all n locations; Clone ID: 701143596H2
ctccctctctgtgttatagatttcttgaaatantgatttagcctaggattatagtttatgtgtatttacatgagggaaaataaggagacaggatttggagtccatctcgttgganagcnacctagatanatcagggntcagaattcctgttctaaactgangacaactctntagatgntatcttncttnacctcactnnaacatangggtngnccacctatttgaagagcatcccacgtntnc

SEQ ID NO: 53714 - DNA, 196 bp, Glycine max
  Clone ID: 701143601H1
caatctcttcctccaggtttgagtgttcaagacctgtaaaggtactgggcgagagatcaagaagaagcaattcattgattcttctgaagtttgattctctgtagttgaagcttgagatttttgtcagttggtcttttattatagattattgctaagacatggttgtctttatctgttttggaaaatgaaacttgaa

SEQ ID NO: 53715 - DNA, 272 bp, Glycine max
  Clone ID: 701143606H1
ggctgatgtcaaccttcaacagcctccggagcagaagacactgaacgaggaggagtgaaaattggagccaagctttcattgtcacggccagggaaccgaatacccctcgatctcagactcttgtaagtttcctcatagacagggagatagcgcaactcgccggtggactcaccccaggcttcgatcatcatgagggccttgttgcggttattaacgacggtctgggggtcgtcgatgagcttgaccatctcgtcgaggacacgctcggcggc

SEQ ID NO: 53716 - DNA, 258 bp, Glycine max
  unsure (1)..(258): unsure at all n locations; Clone ID: 701143607H1
gttaccaacaacacctcaaaactcattcagcaaatcctcacaattacaattaacaccaatttgntcttcaattggttttcactctctcaccatgtcttccatagagatggtttctgctagtgccatcaagcttccttaccaaattctaaggcatgagccatgctctgatgatgaaagagatcaaanggtgatccttaggccgaagaagtggtgtaggcctagaggggtgccattgaggagaaggtttagggtgaaagt

SEQ ID NO: 53717 - DNA, 263 bp, Glycine max
  Clone ID: 701143608H1
cgcattctcaatcacatccattcattcactcatccatatcccttctttccactaacttctctctctagttgatacaaataaaaaacaaagtttcatactttacgacacccttttctgcaactgatgatggaaggaagctgaaacagtgaaaaacagcaacaacgaccaccctgtctttgttttttgtttgttgagttgaaactttagagaaagtgaatagtgatatggaggcaaagggtgtgcggttcttagcgtatcaatca

SEQ ID NO: 53718 - DNA, 249 bp, Glycine max
  Clone ID: 701143609H1
cgacttacaaatattttgaggtcaactctggtggatgttgcacacagcgctgttagaaatgatccaagaatcaactggctctgcaacccagtccataaacacagggaactgcgtggcctcacttctgctgggaaaagtaacaggggtttacggggcagaggacatctctaccacaaaaatcgtccatcccgcaggcaacctggaagagaaacaacactctttcccttcgtcgctaccgttgattttgtt

SEQ ID NO: 53719 - DNA, 268 bp, Glycine max
  Clone ID: 701143610H1
gtcgaagaagtgaaggtgttgagtgttttcttcttgtttggatctgagagagaagagcgagcgatgacggtctttcatttcttcaactgcgccattctcaccttcggcccccacgccgtctactattctgccacgcccttatctgagtatgatacactcggaacctctatcaaagccgctgttgtttatcttgcaacggcattagtgaagcttatttgtctagctacttttctcaaggtttcggagagtgatagctttgatccgtatc

SEQ ID NO: 53720 - DNA, 275 bp, Glycine max
  unsure (1)..(275): unsure at all n locations; Clone ID: 701143614H1
ggatcttcnactacgtggancataccttaatcaggtcaanccccctnntccagcatggactgnccatntccangctacgagaaactcncncgaaggtctcnccgacagcaggtactgcgatnntggacgaagcggaggcgtggggataaagagggacgaagcgtgccacaatcttgtgttcatgtnatcgtncaacgcgcagggtgggttcagtgaaccagtttccgattttgatcaagtggctaggactggctgggganggnttacacaagcag

SEQ ID NO: 53721 - DNA, 270 bp, Glycine max
  unsure (1)..(270): unsure at all n locations; Clone ID: 701143616H1
ggcataacctaaacttacccttcttctctctgtgtgtgtgcgcatcaaacgcaaccagaagcagccatggccactgcaagaactgtgaaggacgtttctcctcatgagttcgtcaaagcttactcttctcacctcaagcgatctggcaagatggagctgccagagtggactgatattgtgaaaactgcaagatttaaggagttggcncctaagganccgactggtactatgtnaganctgcttcanggcaagaaagatctacttgagagg

SEQ ID NO: 53722 - DNA, 267 bp, Glycine max
  unsure (1)..(267): unsure at all n locations; Clone ID: 701143630H1
ccgccacggaggttgatttcggccaccataggccttgccttctgattttgcccaatccaagctgcgttnatcaaagctatttccgcccaccacgatacatttcatgaggtgagaaggagacgtgactgaaaggaggagtcatatgacaccataatgttggaaaagtatggagaagactcttcaaagcatccattggttgattcaacantgtgggcagatgtgtcagattcaaagaagngacaaatttttggaactatggctacttca

SEQ ID NO: 53723 - DNA, 265 bp, Glycine max
  unsure (1)..(265): unsure at all n locations; Clone ID: 701143631H1
gtagccatggggactttcaatcactatctgattgtnaagttcaaagatggngtggcagttgangatctcattcaanggttggagaanatggcccttgggattgancatgtcaagtcctttgaatgnncgaaaggacattgaaagtcatgntatnctaagacaaggttccaccnatgttnnctngatgaannttcaatgggaaaggangggttccaanctattnngnganncncccannncttngagtnccgnggggttttncccc

SEQ ID NO: 53724 - DNA, 270 bp, Glycine max
  unsure (1)..(270): unsure at all n locations; Clone ID: 701143633H1
gtgtctgggtcgattcggcggggtctcttacggttggagttggaatcggaggagggacaacacccantaacaggcccagatggcgtttgatggcccaggaatcaccctcnctcgactcagacaaaaccgccactgctggattctgcatcattgaaggccccgaaactgtacaggattttgccaagatggagcttcaagaaattcaggacaacattcgaagtcggaggaacaaaatcttcttacacatggaagaggttcgcaggcttagga

SEQ ID NO: 53725 - DNA, 265 bp, Glycine max
  unsure (1)..(265): unsure at all n locations; Clone ID: 701143640H1
ctttcccctctctttcgagggtttttctttttcttntttccctttnnntatttttcctttattttgttttttnnctttctcttgtttntcagttttgcntccatttcctttgaatccccatttattcttcttcttctgcaaccctaaccctagaattgaagatgcagcctcagaggttnaggcagcaagccatgatgcaaccatctctctaccaccaccctgctctacttactcctcctcagatagagcctatcttgagtggaaa

SEQ ID NO: 53726 - DNA, 263 bp, Glycine max
  unsure (1)..(263): unsure at all n locations; Clone ID: 701143641H1
aattgctccttcgatgctctcttccgacttcgccaatttggcttccgaggctcagcgcatgctccacttcggcgccgattggctccacatggacatcatggatgggcattttgtccccaatttaactattngcgctccagttattgaaagtttgagaaagcacacaaagggatatttggnttgtcaccttatggttacaaatcctcttgattatgttgagcccttggcaaaagctggtgcttctggttttacatttcatgtag

SEQ ID NO: 53727 - DNA, 263 bp, Glycine max
  unsure (1)..(263): unsure at all n locations; Clone ID: 701143642H1
attccccatctcctcaccttattcagccactgctaatttctagggttccgaaatggacgctggcggaaagatcaagaagggcgccggaggaagaaagggcggcggccctaagaagaanccggtttcaaggtccgtcaaggccggtctccaattccccgtcggaagaattgggccgttatttgaagaaangaaggtacgcccagcgtntcggtaccggtgctcccgtttacntggccgcagttctcgagtacctagctgctgag

SEQ ID NO: 53728 - DNA, 268 bp, Glycine max
  unsure (1)..(268): unsure at all n locations; Clone ID: 701143651H1
tgaaaatgnaggtccttgttttcttcgttgctanaattttngtagcntggcaatgccatgcgtagcgatntgttcccctctccgantgagacactgggctatggtgnccgtantccggagttgaaatgcgcaagttggangcttgctgtggaagcacacaacatctttggntttgaganccattcctgaagagtgcgttgaagcaacaaaggantacatccatggcnaacaatatagatcagactccaaaacagttaaccnacaagct

SEQ ID NO: 53729 - DNA, 263 bp, Glycine max
  Clone ID: 701143656H1
gggaaatatggcatttgcaggaacaactcagaagtgcatggcttgtgacaaaacagtttatctggttgataagttgacagcagataaccgagtgtaccataaggcttgcttcagatgccaccactgcaaaggaacactcaagcttagcaactataactcttttgagggggttctttactgcaggccacacttcgaccaactgttcaaaagaactggtagtcttgacaaaagcttcgaagggacaccaaaaattgctaaaccag

SEQ ID NO: 53730 - DNA, 258 bp, Glycine max
  unsure (1)..(258): unsure at all n locations; Clone ID: 701143657H1
gtctacttgtgtcccccagaagccttaaagctcttctctgctttgaaaatggctgattggggcccggtggtgatcgcagtggtgctgttcgtgctgttaagcccngggcttctgtttcagatgccagccaggggaagggtagcagagtttgggaacatgcaaaccagtggggcctccattttggttcacgccatcatctactttggcctcatcactatcttcctcattgccattggcgttcacatctacactggctaa

SEQ ID NO: 53731 - DNA, 261 bp, Glycine max
  unsure (1)..(261): unsure at all n locations; Clone ID: 701143667H1
ctgctgcatatggacactttggcagagatgaccctgacttcacatgggaagtggtgaagccacttcaagggggagaaggtacctgcttaactaaaaggggttccaacactcttggcaagggacttttgcactactactggcttcttattatctgattgctaaaattttctctatgtttcctccctcttactcaattctgtttttttttntctgtnttttctnatgaatttcccccttttttttgggnactngnatgtgttc

SEQ ID NO: 53732 - DNA, 263 bp, Glycine max
  unsure (1)..(263): unsure at all n locations; Clone ID: 701143668H1
gnggtgagtgngtnaganacggaaagnnccaaagccaccgtcttctcttctcagagcttngctttgcttatcgattntctctcctctgcatgctttgctcattcaaggtntgtnatagatggccgatgctgaggatattcaaccccttgtttgttacaatngaactggaatggtcaaggctggatttgctggtgatgatgctcccagggctgtcttcccagtattgttggccgacctcgacacactggtgttatggttgggat

SEQ ID NO: 53733 - DNA, 173 bp, Glycine max
  unsure (1)..(173): unsure at all n locations; Clone ID: 701143672H1
cgntcgntcactctctactcaacttcaattnatcaaatccctnactttctntntctngncttcaaatctccaattnctattntggaaaatcagnntcaaagacagttaaaaatacagaacaaacntctcactcaacatcaacacttnagatctacgtttcnacacancatagg

SEQ ID NO: 53734 - DNA, 256 bp, Glycine max
  Clone ID: 701143674H1
catgggtgagatacataaccacttttctcaataatcttcaaatatcttacctgtatcccagacacagtaaaatatggtatctcaaattttacacgtataggagcttttctctcaggagttgcttcctcatctactatactgggaagatgaaactctgcccttaacatgtactcctttcctccaggaaatgatcttattttccagattaatgcatctttttcaggtgcatatgatgcagatcccattgaagtccgaa

SEQ ID NO: 53735 - DNA, 256 bp, Glycine max
  unsure (1)..(256): unsure at all n locations; Clone ID: 701143677H1
anaaggntcaagagacccagtgggagaaggagcgataagtaattcatattccattatctccatttctagatcncntnattaactctcataggatcctccaatttcaattcaatcccttccgntatttcggagagagcatggctggtaaggntttgaaagaaacaaagtcgctgtcggcggcggaggtggcggtggcggaggcngagacggcggtgtcgtcggtgaagttctgcngctgcgggctgatggaggagtg

SEQ ID NO: 53736 - DNA, 117 bp, Glycine max
  unsure (1)..(117): unsure at all n locations; Clone ID: 701143679H1
gncatggcgcaggntaccaaangttccctctccgaatgaaaactggctatngtgagcgnttctttcggangtaaaaatcgcgcatntnttaggnttgctgtggaancacaacaacat

SEQ ID NO: 53737 - DNA, 268 bp, Glycine max
  unsure (1)..(268): unsure at all n locations; Clone ID: 701143680H1
gcgattctgngccttgaataaagtcctcgtgggagaagtatganttcagtgagaaagatngcaaatgatatgacagagntttttggttcccatccttgaccttgttcctgaagagcggccaacaagctggntagttncntcntccattcatggattnantgtnggtccaaggccnttttgaagcnatcaatgctttctaatnaaaccctgctgctggaaactcngnttcnggatcagnaggaaagggacaaagatgagagggaggcca

SEQ ID NO: 53738 - DNA, 257 bp, Glycine max
  unsure (1)..(257): unsure at all n locations; Clone ID: 701143683H1
ctgccagtagtcatatgcttgtctcaaagattaagccatgcatgtgtaagtatgaactaattcagactgtgaaactgcgaatggctcattaaatcagttatagtttgtttgatggtatctactactcggataaccgtagtaattctagagctaatacgtgcaacaaaccccgacttctggaagggatgcatttattagataacnggtcaacacaggctctgcctgttgctttgatgattcatgataactcgtcggat

SEQ ID NO: 53739 - DNA, 257 bp, Glycine max
  unsure (1)..(257): unsure at all n locations; Clone ID: 701143685H1
ttagatacttcatctnctgcaaagancttccagtggtgttgnatgccttcattcacggtgatanaaacttgttcaaggactacccanaattacaggaagctttggtttgggtttactttcactcaaatatttcaaaattcancaaggtagaatgttggggtccactgaaanatgtgtgtgcatactcaagtgggtgccatgaggagggtaagcaaggtgatattccagttagcgacagcacgcatatcaatatgtcg

SEQ ID NO: 53740 - DNA, 256 bp, Glycine max
  Clone ID: 701143689H1
caggtctcttgggctcctaaactggaggaccctactgtggcttgtggtgcaagtaagttgtcttcaccctcaccttcatcatcagggaacaaaagcttgaagcataccaatgagaaaactggcaagtctgcattgtctgcatcttcaaggaagggccttggatctgtggctgggaacaaagggaaggtaaatatgcgtagtgtttcacgaccgctatcggtatcatcatatgtttccacttccaactcttcccttc

SEQ ID NO: 53741 - DNA, 255 bp, Glycine max
  unsure (1)..(255): unsure at all n locations; Clone ID: 701143690H1
gtatgttaacacataccgtcgaacctttacaacaaaagctggtaagtntcctgaggtccacaaattctctatctgtgtatgtatgctgggcagatagggaaaatatatttgcttatgaaaaancntgttggaagtaactcactcctataatcctattgtgtatcgagtatcaactacctagttccaagtttgaatttattcatctgtttgatggatattcttatcacatanttgtattttctattgtggaattgt

SEQ ID NO: 53742 - DNA, 254 bp, Glycine max
  unsure (1)..(254): unsure at all n locations; Clone ID: 701143691H1
gcatatttcnacacgggganncttnacnaagtcaaaagtgnagtaagtaaattgtggatggttgatcttggacggagcgaacggttgcttaaaactggagccaaaggactaacacttgatgagggcagagccattaatctttccctttcagctttagctgatgttgttgcagctttgaagaggaagaggtgtcatgtgccttacaggaatagcaagctgactcaaatactgaaagattctcttgggtatggctc

SEQ ID NO: 53743 - DNA, 255 bp, Glycine max
  unsure (1)..(255): unsure at all n locations; Clone ID: 701143692H1
antgtgtgntcaactagcccaatttgatgaagaactttataaggtaactggtgaaggngatgacaaatatctgattgcaacagcagagcagccactctgtgcatttcatttagatgattggattcaccctacccagctaccaataagatatgctggatattcatcatgctttcgtaaagaagctggatctcatggtcgagacactctaggaatattccgagttcaccaatttgagaaagtggagcaattttgcct

SEQ ID NO: 53744 - DNA, 258 bp, Glycine max
  unsure (1)..(258): unsure at all n locations; Clone ID: 701143693H1
gagcgatgcatcggagcatctcttctgcgcttgcatttncatgattgtttcgtaaatgggtgtgatggatcaatattgctagatgacacccgaaacttcactggcgagaagactgcattgccaaatcttaattcagtcagaggtttttctgtggttgatgaaatcaaagctgcggtggacaaagcctgcaaacgccatgtggtctcnngggnggattnctgggcnattggancccgnngntnctaagnccnatatagg

SEQ ID NO: 53745 - DNA, 257 bp, Glycine max
  Clone ID: 701143695H1
atgaaaatgaaggtccttgttttcttcgttgctacaattttggtagcatggcaatgccatgcgtacgatatgttccctctccgaatgaacactggctatggtgcccgtactccggaggtgaaatgcgcaagttggaggcttgctgtggaagcacacaacatctttggctttgagaccattcctgaagagtgcgttgaagcaacaaaggaatacatccatggcgaacaatatagatcagactccaaaacagttaaccc

SEQ ID NO: 53746 - DNA, 262 bp, Glycine max
  Clone ID: 701143696H1
gctcaggccaaccaatttcttcgagaggaatccggttcttaaaacactttctcccccggatgtccaaatgggcctggttgccccaagtaaaactagctagccagccatttccattatattagtgtgcttcgagtgctacaactagatgtgttccttggataatgtgaaatgcgatctgcttattgcatgtgcaagaataatgatttgatatgtattgcttattattatatcaatgagaagtttacttgaacttgaaaaaaaa

SEQ ID NO: 53747 - DNA, 268 bp, Glycine max
  unsure (1)..(268): unsure at all n locations; Clone ID: 701015701H1
tagtatcaatctattcttcatccctgttgatcaagaatgcaattctttggggggtctgagattagtccttcaccttcctgctccgacagcttcagganacnatggccntatgatgtatgtgttcaataggnatggtgtgtgcctgctctatagggagtggnatcgtccctgcggacnttggatgcccngnnagaccannagttaatgtttggnctattttcctctctgaagtcattaatgncnagntggaccccactagtgctgttga

SEQ ID NO: 53748 - DNA, 269 bp, Glycine max
  unsure (1)..(269): unsure at all n locations; Clone ID: 701015702H1
aatatctcttccaatttcaatttctcgtcgtccctcatcatggctcgtctcgcgatcgctgtacgctgccgtgntcctcgtggcnctctccgcntccancgcgacggtgcgtncctgncaggaccttcataatctcctcctactcgttccgcaaccctaactccaacaacttcgccagcatcancgagatccgatccttcanncctctctaaatcaccgacaaacccaccggcaaacnctcctcntcctangaaatcttcttcccccag

SEQ ID NO: 53749 - DNA, 265 bp, Glycine max
  unsure (1)..(265): unsure at all n locations; Clone ID: 701015703H1
gtctagtagctggttccctccgaagtttccctcaggatagctggagcccgcgggcgagttctatcgggtaaagccaatgattagaggcatcgggggcgcaacgccctcgacctattctcaaactttaaataggtaggacggtgcggctgctctgttganccgcgccatggaatcgagagctccaagtgggccatttttggtaagcagaactggcgatgcgggatgaaccggaagctgggttacggtgnccaactgcgcgctaacc

SEQ ID NO: 53750 - DNA, 265 bp, Glycine max
  Clone ID: 701015704H1
gcaagccccactcaaccaccacacctctcctcgttcacgctacccctttctgctcttcttctacctttcaagttttaaaagtataaagatggcagagacattcctatttacctcagagtcggtgaacgagggacaccctgacaagctctgcgaccaaatctccgatgctgtcctcgacgcttgcctcgagcaggacccagacagcaaagttgcctgcgaaacatgcaccaaaaccaacttggtcatggtcttcggagaaatcaga

SEQ ID NO: 53751 - DNA, 265 bp, Glycine max
  unsure (1)..(265): unsure at all n locations; Clone ID: 701015705H1
ccttcaaagtcttctctctcgagaatcatcgaataaaactagggtttccgatcgtcgtacgaggagaatgccgaagaacaagggaaagggaggaaaganccggaagcgcgggaagaacgaggcggacgacgagaagcgggagcttgtgttcaaggaggacggccaggagtacgcgcaggtgctccggatgctggggaacggccgctgcgaggcgatgtgcatcgacggcaccaagcgcctctgccacatccgcggcaagatgcac

SEQ ID NO: 53752 - DNA, 145 bp, Glycine max
  Clone ID: 701015706H1
gccaatctggcagccacaaataaaggataacattatgcctccttcccacttgagatactttttagtgccattatagcttttacttaattttaatgtcttgcttctaattattataattaagtcttttcacggttttcttttactt

SEQ ID NO: 53753 - DNA, 261 bp, Glycine max
  unsure (1)..(261): unsure at all n locations; Clone ID: 701015707H1
ctgagttaaggcttggactgcctggaaacggaggcactgaagaagtgctcatcaggaagaggggtttctctgagactgaaactggtcatgaagatgagtctgccaccactgtggatttgatgcttaatctttcttctaaggagnnnnnnnnnnnnnnnnnnnnnnnnnnnnnnnnnnnngataagcacaagactttgcctaaggagaagacccttctgccagcagatcctgctaagcctccagccaagacgcagtggtggg

SEQ ID NO: 53754 - DNA, 261 bp, Glycine max
  Clone ID: 701015708H1
aaaactgggtgttcatggtcactgcacagacaccaaccaacattgccgttatcaagtattgggggaaaagagacgaaaccctcatcttaccggttaacgacagtatcagtgtcactctcgatcccagccacctctgcaccaccaccactgctgccgtcagtcccgctttccaccaagatcgcatgtggctcaatggaaaggagatttctctttctgggggcaggttccagagctgtttaagggagatccgtgctcgtgctt

SEQ ID NO: 53755 - DNA, 258 bp, Glycine max
  unsure (1)..(258): unsure at all n locations; Clone ID: 701015709H1
gccgcctcctacgttaaattcgtggagtccggtggtgctagagttattccccttatctacaatgagtcacctgagaaccttaacaagaagctcgatttggtcaatggagtgctcttcactggtgggtgggctgtttctggtccatatttggatactcttggaaacatttttaagaaagcttagagaaaaatgatgctggagaccatttcccagtaatgccttcaacttaggtggaaacctcgtaataaggntcgtaag

SEQ ID NO: 53756 - DNA, 257 bp, Glycine max
  Clone ID: 701015710H1
tgattctatgggtggtggtgcatggccgttcttagttggtagattaattgacacgtatttgagagagatatcccctgaccacaacctcaagatctctaaatttcttggagtagcagaatgcttgccagacactgcaagggattgctatgatggggtctacaaagccattgacatctatcttgagtctcatccaactatcacatttgaggaaaggtcgagattgtgtagatgtcttaattacagcaaactcagctttg

SEQ ID NO: 53757 - DNA, 261 bp, Glycine max
  Clone ID: 701015711H1
aaaaaacccaatcaaaattcaaagtctctttgtttaccttgtttccctcattgctttgctcacattcaatttacgaaggcgtagagtgagatccgaacgatgaagagagtattcggcgtcaagaagaacaaggatccacccccttccattcaggatgcttccgaaaggattacaaaacgaggtgacacggtggatgacaagattaagaagcttgatgccgagcttagtagatataaagagcagattaagaaaactagacct

SEQ ID NO: 53758 - DNA, 258 bp, Glycine max
  unsure (1)..(258): unsure at all n locations; Clone ID: 701015712H1
ggaagctggaccctccggctcctccgatggaggggtaggagtgaattggctctgcatgagccctaagcgagatcacaaccccgaaaactatgacgaccttcaattcgagttcaatcctaatctcttcgcctctctcgagcactatttgcctcctcatatgctcaacctctcacgcgatgttaagcttcactacatcaggaacattcttcttcgctattgcctgagaatgaccgcaactgggtgccccttttttaanta

SEQ ID NO: 53759 - DNA, 262 bp, Glycine max
  Clone ID: 701015713H1
acccaccaaggttggcatagcctctcgcaacctcaaatctacacaatgcatttctaaggcttttggcttggaacctgctgcagctaaactcacttgctcccttcagcctgatctcaaagaatttgctcaaaaatgtgtcgacgctaccaaaattgcaggattcgcccttgccacctctgctctcgttgtttctggagcaagtgcagaaggtgttccaaaaaggctaaccttcgacgaaatccagagcaagacatacttggaa

SEQ ID NO: 53760 - DNA, 263 bp, Glycine max
  unsure (1)..(263): unsure at all n locations; Clone ID: 701015714H1
gaaattacacgcaattatgaagtccttctgatacctctccacagcacgatgactatttactacacaaaagcatttctgttgatggctatacttacaccaacacagataaagaaattaccgcgaagggcacaggaaaaagcagcaattttacacataggattcataaccatgtaaaaatgggtcctaatctgtctgagattctgaagggtaagttgagtttgggggcnaggattatacaagaaggaggaagagggnacatcttc

SEQ ID NO: 53761 - DNA, 212 bp, Glycine max
  unsure (1)..(212): unsure at all n locations; Clone ID: 701015715H1
tagtgcctccttgccagaagttaaaatggcccaagaaactttcctattcacatctgaatcagtgaacgaggggcaccctgacaagctctgtgaccagatctccgatgctgtgctcgatgcatgcttggagcaggaccctgacagcaaggntgcctgtgaaacctgcaccaagaccaacatggtgatggttttcggngagatcacaaccaagg

SEQ ID NO: 53762 - DNA, 246 bp, Glycine max
  unsure (1)..(246): unsure at all n locations; Clone ID: 701015716H1
atcctcacccattttcttcgtaaccaaacactctgaaattcctcagttatgtcgtggcaancgtatgtggatgatcacctactgtgtgaaatcgaaggtaaccacctcactcacgccgctatcatcggccaagacggaagcgtttgggctcagagcaccaacttccctcagttcaaacctgaggaaataactgccatcaataatgactttaatgagcctggatcacttgctccaactggattgtat

SEQ ID NO: 53763 - DNA, 269 bp, Glycine max
  Clone ID: 701015717H1
aaaactttcatcttatttacaagtatttttttcagaaccttcacttctcaagtctcaacacatacaacaatgggttttcgtttacctggtatcagaaaggcatcattaaaccaagcatcatcaaaagccatggacgtgccaaagggataccttgcagtctatgttggagagaaaatgaagcggtttgtcatccccttatcatacttgaagcaaacgtcgtttcaagacttgctgagtctagccgaggaagaatttgggtataaacatcc

SEQ ID NO: 53764 - DNA, 228 bp, Glycine max
  Clone ID: 701015718H1
caccatgtcacttgctgggaaaatcaccactgaaatcggggttcatgcaaccgctacaaagtggttcaacctcttcgcaacacaactccatcatgttcaaaacctaactgatagagtgcatggaaccaagctgcatcaaggtgaagactggcatcacaacgagacagtcaagcactggacttataccatagatggtaaggttacaacatgtctggagagtattgaatc

SEQ ID NO: 53765 - DNA, 265 bp, Glycine max
  Clone ID: 701015719H1
gtagtcatatgcttgtctcaaagattaagccatgcatgtgtaagtatgaactaattcagactgtgaaactgcgaatggctcattaaatcagttatagtttgtttgatggtatctactactcggataaccgtagtaattctagagctaatacgtgcaacaaaccccgacttctggaagggatgcatttattagataaaaggtcaacacaggctctgcctgttgctttgatgattcatgataactcgtcggatcgcacggcctttgt

SEQ ID NO: 53766 - DNA, 265 bp, Glycine max
  Clone ID: 701015720H1
gtaggcatcatagacgatgggttgccgagaagttaggtcctgaagctagaaacaatgagctcgagttcaccaaaaagatactgtccgttgatgccaaacattatcatgcatggtctcatagacagtgggctcttcaaacactaggaggatgggaagatgaacttaattattgcacagaactacttaaagaagacatttttaacaattctgcttggaatcagagatattttgtcataacaaggtctcctttcttggggggcctaaa

SEQ ID NO: 53767 - DNA, 262 bp, Glycine max
  Clone ID: 701015722H1
ttctctcgcatctcaatacccttttgatttgtgaaaggaaagcaaacatgcttgatcaggtccaacaccctacaatcatggacaaggttgctggccagctccatctccgttctggtgtttctggtattaggagttatgaaggagcctactgccaccccacaatgtaccaaagaccctcttttgggaattactcgaatgctgcattgcagtatcctgtgatgccctcatgcaaagctactatggatttgtctgctgctgcaac

SEQ ID NO: 53768 - DNA, 258 bp, Glycine max
  unsure (1)..(258): unsure at all n locations; Clone ID: 701015723H1
ctgtattcacaacaatgcagttatggagttgatgagaggcgttagaaatcagttaactgaacttatatctggtctagctgttcaagacatggccccaatgagcttgggtttatctcacagcttatccagatacaaattgaagtttagtgcagagaaggtggataccatgattgtccaggctattggtttactagatgatctgataaagagttgaatacctatgccatgagggttcnnnaatggtatggttggcatttc

SEQ ID NO: 53769 - DNA, 240 bp, Glycine max
  unsure (1)..(240): unsure at all n locations; Clone ID: 701015724H1
gtcaaatcggagaatcgaaatcannggaatcaaagccctgctgaatggcgccaccggcaccacccaagtcaagtcagggtcaggtgatgaataatgcaaggattcacttcttttccattctcctcgctctccaatacggtgctcaacctttgatctccaaacgcttcatcagacgtgaagttattgtgacttcatctgttttgacttgtgagcttgcaaaggttatatgtgcagtgtttt

SEQ ID NO: 53770 - DNA, 251 bp, Glycine max
  unsure (1)..(251): unsure at all n locations; Clone ID: 701015725H1
ctcagttctcacacaacataaacacntacaagaacagagcaatatatctatactatttctctgttctgttgtctcagcaaaacaaataataaaatcctctcgtagctaccttcaacaactcttgttcatggcgtgtcaccgttggctctgtatatcannnnnnnnnnnnnnnnnnnnnagtttagcttcgcagagttgccacgctctccattcgttcgggttcgacattcaccaccgtttctccgatcccg

SEQ ID NO: 53771 - DNA, 260 bp, Glycine max
  Clone ID: 701015726H1
gcgcaacgcaacacaaaaaaccacactttcaattgcatttctctctctttctcacaatttccactttcccggtaagatttttctctcgttttctcgggaaaaccgcgggatctgtgttctgcgtgacgcgattccacgatttccactaatttttcggtctgaaattgcgattttttgttcttcgtttttgttttgttagggttttcgattcgatattcgttgttccaatgagcgatcacttggtggtgttcgttgaccgt

SEQ ID NO: 53772 - DNA, 250 bp, Glycine max
  unsure (1)..(250): unsure at all n locations; Clone ID: 701015727H1
gagaatatgaagttgtttgttttctttgttgctgcagtagttttggtagcatggccatgccatggcgcaggctaccaaaggttccctctccgaatgaaaactggctatggtgagcgttcttcggaggtaaaatgcgcaagttttaggcttgctgtggaagcacacaacatccgagcctttaanaccattcctgaagagtgcgttgaaccaacaaaggactacattaatggcgaacaatttagatcagact

SEQ ID NO: 53773 - DNA, 260 bp, Glycine max
  Clone ID: 701015728H1
tggaaggtctcctcggtggtcttcaacagttccctcaacccaaggtcgagcttgaacagtacccaacaggaccccatatagcttctcgaatgcttttcactgcagagaattcttttgaggatgtgagcgacaaagtagtggctgactttggatgcggttgtggtacgttaggtgttgcagctgcactgttgagtgcagaacatgttcttggcattgacattgatccagaatctcttgaaatagcttccaataatgctgag

SEQ ID NO: 53774 - DNA, 260 bp, Glycine max
  Clone ID: 701015729H1
gcaatgggcatgcaatgctcggttatcaactccaactgctcagctgggattgcctgaacttcagcttggaataattcctggatttggaggaacacagcgacttcctcgtcttgttggtttgacaaagggacttgagatgatactggcttcaaaaccagttaaagggaaggaagcttttagtttggggctgttgatggtttggtgtcacctaatgatttggtgaacactgcacgccaatgggcactggatatgttgggcca

SEQ ID NO: 53775 - DNA, 260 bp, Glycine max
  Clone ID: 701015730H1
accctggacacagcacatcatgatgactttcatcagcctaactttggtggttcttcaataaaaaaaggtggtccaagggaaccttggcacgacatccattctcgacttgaaggccctattgcttgggatgttttgttcaactttgagcagagatggaggaagcagggaggaaaggacttacttgttccactgagagaccttgaagatgtcatattcccccatccccggtaacttacattgatgatcatgagacatggaat

SEQ ID NO: 53776 - DNA, 228 bp, Glycine max
  Clone ID: 701015732H1
gccaatgtctcctccctcacccaatgaatctgttgcaggtttatgaacgcaatttgtataccttggtttaatttgtacgcaaatccagaaagaattgaagtagttattcatgtccctttactccacacgaaaaggaaggaatggcttatttatggctcctactcttgtaacttatgcggtcacaccatgtggaacatgagatgatcttgtctgtacaaagaggcaatg

SEQ ID NO: 53777 - DNA, 258 bp, Glycine max
  unsure (1)..(258): unsure at all n locations; Clone ID: 701015733H1
cttttcccttttttttttaatttcctttctactgaattcgtaaaaaaggaaaaaanaatgtagattttttcatgtttttggtttggtatgcttgttctgagttttgccgggttttcagtcagattcattttgattggngaaattgttgcnaataataagtgaaatttgtttttnattttttttactataaatagaaaggttcattttttgaaaaaatatatgtagtaagtcgttttcttnaatgttngtgtatggnaa

SEQ ID NO: 53778 - DNA, 265 bp, Glycine max
  unsure (1)..(265): unsure at all n locations; Clone ID: 701015734H1
taggcctcaggagaaaaaaagaagattgtaggggtgttctacaaagggaatgagtatgcttcgaatcccaattttgtgggatgtgttgaaagagcattgggtatacgtgagtggttggaatcacagggtcaccagtacatagtcactgatgacaaagaaggacccgattcagaactagaganacacattcctgatgccaatgtcatcatatctactccatttcaccctgcctatatcaccgcagaaagaattaagaaagnccaaa

SEQ ID NO: 53779 - DNA, 244 bp, Glycine max
  unsure (1)..(244): unsure at all n locations; Clone ID: 701015735H1
cggatcgcacggcctttgtgccanccgacgcatacattcaaatttctgccctatcaactttacgatggtaggatagtggcctaccatggtggtgacgggtgacggagaattagggttcgattccggagagggagcctgagaaacggctaccacatccaaggaaggcagcaggcgcgcaaattacccaatcctgacacggggaggtagtgacaataaatnacaataccgggctcattgagtctgg

SEQ ID NO: 53780 - DNA, 263 bp, Glycine max
  Clone ID: 701015736H1
gtttgtgtatacgggatgcaatgctagcaacaccctgatctgaaaggtgcaataaggttatgaatgaaaccagtgacaaaagctgtagatgattgtgttaagctatgagatctgagggcttcaaattccttttctccttccggatttcatccttgtgtctctttacttttgttgtctttaaattatatgtacatcaatgtttcttttattcttttttattttatttgtttattgttggctgtgttaattatttttcatattta

SEQ ID NO: 53781 - DNA, 263 bp, Glycine max
  Clone ID: 701015737H1
caaacagtgagccatggccgtcggaaagaacaagcgcatctccaaagggaaaaagggtggcaagaagaaggcagctgatccctttgccaagaaggattggtatgacattaaggccccttctctttttcaagtgaaaaatgttggcaaaaccctcgtctctcgtacgcagggtaccaagattgcttctgaaggacttaaacatagagtgtttgaggtctccttggctgatcttcaaggggatgaggatcatgcattcaagaaga

SEQ ID NO: 53782 - DNA, 217 bp, Glycine max
  unsure (1)..(217): unsure at all n locations; Clone ID: 701015738H1
agatcttgtagcaatggcgagcgctcccactccacgcgaagagttcgtgtacatggcgaantggcggagcaggccgagcgctacgaggagatggtggagttcatggagaaggtctccgcctccgccgagagcgaggagctgaccgtggaggagcgtaacctcctctccgtcgcctacaagaacgtgatcggcgctcgccgcgcctcctggcgcatca

SEQ ID NO: 53783 - DNA, 258 bp, Glycine max
  unsure (1)..(258): unsure at all n locations; Clone ID: 701015739H1
tactctcaacttcaaaaggtggaagctaatgtgcacatcaaggcttctgctgatcagttccataatgttttatgcaacaggacacaccatattgccaacattttccctggaaaagtacagtctgttgaaattcataaaggtgaatggggcactgagggatccgtcatctcctggaattatttacatggtatgtgaatttcgacatcaaaattttaacaacaaatngcaatattccttctcgtttgcattataccaaat

SEQ ID NO: 53784 - DNA, 260 bp, Glycine max
  Clone ID: 701015740H1
agctgaagagccatccgcaggtaagcaatggttaagcataataatgttatccccaatgggcacttccggaaacactggcaaaactatgtgaagacttggtttaatcaaccagcccgaaagaccagaagacggttggctcggcagaagaaggctgtcaagattttccccaggcctactgctggatctctcaggcctattgttcatggccagactctgaaatacaacatgaaagtcagagccgggagaggattttcactgga

SEQ ID NO: 53785 - DNA, 256 bp, Glycine max
  unsure (1)..(256): unsure at all n locations; Clone ID: 701015741H1
gtgagcaccaaaccaaaccacattgtttgcaaggcacaaaagcaggttgtccaagagggtgaggacactactaacattgtctctcgcaggttggccctcactgttctcattggtgctgctgctgttggctctaaggttgcacctgctgatgctgcctatggagaagctgccaatgtgtttggaaagccaaagacaaacactgacttccntccatacaatggggatggattcaaactctcaatccctcaaagtggaa

SEQ ID NO: 53786 - DNA, 254 bp, Glycine max
  unsure (1)..(254): unsure at all n locations; Clone ID: 701015742H1
aagccatgcatgtgtaagtatgaactaattcagactgtgaaactgcgaatggctcattaaatcagttatagtttgtttgatggtatctactactcggataaccgtagtaattctagagctaatacgtgcaacaaancccgacttctggaagggatgcatttattaggttaaaggtcaacacaggntctgcccgttgcttgatggttcctganaactcgtcggatcgcacggccttgtgccggcgacgcatcatt

SEQ ID NO: 53787 - DNA, 259 bp, Glycine max
  unsure (1)..(259): unsure at all n locations; Clone ID: 701015743H1
ccccaatatacttagccatatctttacttcccaaaacttgctctacaatgagtttccttcgttcttttgcaagaaacaaggatatatcaaaagtaggacgcagaggtatccattgcatgcagaaactatgtgcagaaaaaatatctcctgattcactagagaaggcccaaaatcgtgtgatagatgctgcactcacacttgttcgagaaaatacaaggnttaagaaagaactcgtggcatagtttgggaggtgctgtgg

SEQ ID NO: 53788 - DNA, 260 bp, Glycine max
  Clone ID: 701015744H1
attcgctctctttcaatcacaacaacatggccgaacgtggaggcggagaccgtgccggtttcggtcgcggctttggcggtcgtggacgcggcggcgacaggggacgagggcggcgcagggcaggagggcgccgcgacgaggaggagaagtgggtcccagtgacgaagctggggcgcctggtgaaggaggggaaaattcggagcctggagcagatctacctacacttcgctcccaatcaaggagcaccaaatcattgacac

SEQ ID NO: 53789 - DNA, 255 bp, Glycine max
  unsure (1)..(255): unsure at all n locations; Clone ID: 701015745H1
ctcaattgcatcgctgtccatggctaccatcgttagcatcaaggcccgccagatcttcgacagtccgtggcaatccaactgtcgaggtggatttgacttgctccgatggtacttttgccagagctgctgttccaagtggtgcatccactgggatttatgaggcccttgaattgagagatggaggatctgactaccttgganagggtgtatcaaaggctgttgacaatgtgaacaccgtcattggccctgctttga

SEQ ID NO: 53790 - DNA, 259 bp, Glycine max
  Clone ID: 701015746H1
gcaaggcgcattgtctccgacaatattcactccgggaatggcttccctaccctttccgttgatgaacaagtcgttgccatagagctgccactgaaatacggtccattcattgagtcagtgaacaagagagggctgaacctctctgaggtggtgtgttccacattcacaatggggtggtttggagaaaccaaggacagaaggacagtgagagtggaatgctcatgaaagaaagcagccccaatatctgggtgaggcctat

SEQ ID NO: 53791 - DNA, 262 bp, Glycine max
  unsure (1)..(262): unsure at all n locations; Clone ID: 701015747H1
gaaatcattccatatgatatagcttctactctaaatctgagttctaaacttcctcagatttgatcccaaaccagttattctttgaatcagctatcagtgtatcaatttctacaaactttatgaggagctggatnatggctatctagtttggantattgagtttgctagtnaaagtgttgttttggntggtagatttggggcttcatgtctggtgaaacaagatctgagttgtggtcagttttagtcataactaggnagtggg

SEQ ID NO: 53792 - DNA, 259 bp, Glycine max
  Clone ID: 701015748H1
agtacaagtgcaacactgagactgtcaaatgttggagagagcagaggtttgcagctgcgtaagtgtaaccctaatcctaataagctgaaggttatgggggggtttggaggttgttctggagtggcagtgggtgtgagagaaagaaaaggaattggaagggttagggttcgggttcgggcgagttcttcgtcggacgaggcagtgagtgcgcatcaaaagtgactcagaaagtattcttgacgtcatattggaaatccag

SEQ ID NO: 53793 - DNA, 267 bp, Glycine max
  Clone ID: 701015749H1
cagtagaaaatgtggcatccaaactatttgttcaatgctctcggcagaagggacttataaagatctacaggcacttgctaaattatcgaaaaaatgtattcaatctttgcagcttgcctaatctagaaggactgacatatagacaaataagacatagatttccagaagctgttgtatgtggtctttaccggagtgggaaaatatacttccacccaaacgatggtgaaattctgcagcaaaccgacaaagtattgtttattggatccc

SEQ ID NO: 53794 - DNA, 265 bp, Glycine max
  unsure (1)..(265): unsure at all n locations; Clone ID: 701015750H1
gaaacattgggccatccctgcagtactccttgtaatactcattttgattctatcctctgtcttgttccatcttcaagatgaaagaacaaatccaccaggtcctaaacccctcccaattattggtaaccttcacatgctggggaaactcccanatcgttcccttcaagcccttgccaaaaattatggncccataatgttcataaagttgggacaagncccaaccgttgtagtttcctcncctgaaatgcagagtattcctcaaaac

SEQ ID NO: 53795 - DNA, 262 bp, Glycine max
  Clone ID: 701015751H1
ggcattacaaatacaaagggagaaggcaaaatccttaacaatggaagactatgaccttgtggatataagtgaagacaaagataacgaaaaattaactttgaaggatgtgtctgataaaggaaacgaagcaataaaatcactggatagagatataattttcactgttgatgaactgaatgctttgtcaaaggaggagcaaatgaatgctttatacaggtctgctccagaattagttgattggttgtcagaactaaatgaggtg

SEQ ID NO: 53796 - DNA, 242 bp, Glycine max
  unsure (1)..(242): unsure at all n locations; Clone ID: 701015752H1
gttcttcttcgtcgttatcttctncttttgttgtttgtgngtttgttttttctctcacctgaaaatgtcttgctgcggtggtaactgtggttgcggaancgcctgcaagtgcggcaacggctgcggaggctgcaagatgtacccagacttganctacaccgagtcaaccaccaccgagaccttggtcatgggagtggcaccagttaaggctcaattcgagagtgctgaaatgggtgntcccg

SEQ ID NO: 53797 - DNA, 252 bp, Glycine max
  Clone ID: 701015753H1
tgtgcgcacagtattttgttcttgaagtggtaggacctggtggatcacccgatgggcatggcgatgatgatcaccattgattgcaatccttcaattaaatctggaataaattctggaaagatggagagacattgtttagaatacactctggcctttcaaaatcctgtggcctatgtttgattttgatttgtctataccttgttgtgttgcaacttttgagctagaaagtttatgcgattatttgaacgcagg

SEQ ID NO: 53798 - DNA, 242 bp, Glycine max
  Clone ID: 701015754H1
ggggtcaagaaaatcctaatcctacttgggctctttgtgtctgaagcttcactacgaaagtggaaacactgctctcatcgactcgaaagcggtttgcggtttccgtcatcggcgagacgccgccgccgtctggaattggaagaccgtcgcagtagtcgcaccatcgcagcacgcattggaaacggaaatgggttcttgtgctacatcatctgttctgactaatcaatttattccgtggtcta

SEQ ID NO: 53799 - DNA, 260 bp, Glycine max
  Clone ID: 701015756H1
caacacagcactttggtcgtgtttcgtttcatctttttctccgagaaagatccaccccacgtttcaaaatcactttttttctctgctttgggaaatgatgccattgtttgtcccttgcgaagccaaaccccatcaccaacatcatcatgtaggagcgactcaacaactcgagtctcgcgttcctcttcctccccctctgggcacgtgagaattctccgattctgaaaccgaggcacgtgacgttagcgtgcgtgtgtttt

SEQ ID NO: 53800 - DNA, 257 bp, Glycine max
  unsure (1)..(257): unsure at all n locations; Clone ID: 701015757H1
caccttcctctgcgcaatttgtgcgcactccgncgccgtcacctccgcggcatatccttccatccccggcacggaaaccggagagtgctccctccacggcgtcggcgtcggcgacggtgttctggtccctccgcggcgagaagtgtangaggaggggcgaatcttcgacatcacccacaggtatgtncccgagattccggtgtnggantcgacggaagggctaggngagnaattcctatggntcgaaaagagcatna

SEQ ID NO: 53801 - DNA, 260 bp, Glycine max
  unsure (1)..(260): unsure at all n locations; Clone ID: 701015758H1
ctagaatggaatttcgatgctcagtcatctcttttaccattctcttctctcttgctcttgcaggagagagccatgtccatgcatcgctacctgaggaagattattgggaagctgtttggccaaacactcccattcccactgcactgcgagagcttctaaagcctctccctgncaggtgttgaaatcgatgaactccctaagcaaattgatgatacacagtacccaaaaacattcttctataaagaagaccttcatccagg

SEQ ID NO: 53802 - DNA, 259 bp, Glycine max
  unsure (1)..(259): unsure at all n locations; Clone ID: 701015759H1
gggtgagctaaagtcaattttccttcctttcctttccactagtcacataatcccgctagtggacatggccagactcttcgccttgcacgacgtcgacgtcaccatcatcaccaccgcacataacgccaccgttttccaaaagtccatcgatttagatgcgagtngcggtcgccccatcagaacgcacgttgtcaacttccccgccgcacaagtgggtctccccgttgggatcgaagccttcaacgtcgatacgcctcgg

SEQ ID NO: 53803 - DNA, 260 bp, Glycine max
  unsure (1)..(260): unsure at all n locations; Clone ID: 701015760H1
cttcaaggaaggagagcttgttattctctatcaacaaggaaaatgtcaggtgaagaggttgttgttgcagctgagccagctgctgccatcccaggcgagcctatggatatcatgactgccttgcaacttgtgctcagaaaatctctggcttatggtggtcttgcacgaggccttcacgaaggggcaaaagtgattgagaagcannctgcacaactctgtgttctagcagaagactgtgaccagcctgactatgttaaact

SEQ ID NO: 53804 - DNA, 258 bp, Glycine max
  Clone ID: 701015761H1
gttagtccgtacctggcagaattgttgcggttggaagaacaggctaaacaagaaggccttgggcggtggagcaaggttcccggtgctgcagaggcttcaatcagaaatttaccaccttctgcccttggtgaccctagtaactttgatgctatgacttttttaaatgcaaagaagggattgcccatggaggcagttgttgagcaggttcgtgatggcagtacactccgtatctatttgctcccggagtttcagtttgtc

SEQ ID NO: 53805 - DNA, 260 bp, Glycine max
  Clone ID: 701015762H1
gtttacttcccccactcattcattatccatcctttcatgtgatgccattatttactctctaaatacatttcattcctgctaggactttgctgtttatcatttgcatttattttttgttggtcctcaaaaaagtgtccccctttctatgtattctatcttcccttaaagcccctctgtgttttgtcacagctattattgctgctttcaatagtaatttattacctaagtagaaaacttgcttatttatcttgtcatgccat

SEQ ID NO: 53806 - DNA, 262 bp, Glycine max
  Clone ID: 701015763H1
ctcaggaggggatttggctcatgcccttcccctggggtgcttggttttggccattattgtgatcggttctctgtgaaagtgtgcagggcttttaggactgaggatggtggggatgtaaaggagaaaaagttacgaaatttgaagaaaaatgaagagaaaaccaaaagggaaagtgggttttggagttccctcaagtctatcttgttgaggaatttcatggtgggttcaaaatcagatgatgagtatcgccaagctgtggcca

SEQ ID NO: 53807 - DNA, 265 bp, Glycine max
  unsure (1)..(265): unsure at all n locations; Clone ID: 701015764H1
caaacactctcatcttcttattcttctgctttcactctctgactcaatcgttctaatccacaaaaaatgaccttaaattacaacattgccctcgccttctctgcggtgctcacnctgctcctctttcccctactgaccgtagggagctcgtggaggagcagccactagtcctcaagtaccacaacggccagctcctgaagggccgcatcaccgtcaatctcatctggtacggcaccttcaccccgatccaacggtccataatcgt

SEQ ID NO: 53808 - DNA, 264 bp, Glycine max
  unsure (1)..(264): unsure at all n locations; Clone ID: 701015765H1
agcaagctctctatcctttctggtagcaatgccctctgcaactgcaagcttcggattcttcttctgtcgacaacgcctttcttcttctttccccttccctccgcgtccaagactcctctccaccactnccancccatannctctccaatacgaactcatcatnaaccgtccttcttaccccgactctccccgcccancacctgctcgacctattgactcccctgaacccgaatcaacaagggccagaggaagtactacaacaaa

SEQ ID NO: 53809 - DNA, 255 bp, Glycine max
  unsure (1)..(255): unsure at all n locations; Clone ID: 701015766H1
tggcctttctgctggcatggctattggtattgtcggtgatgctggtgttagagcacaatgcacagcagccaaaactttttgttggaatgattctcatcctcatttttgctgaagctcttgccctttatggtctaatcgttggtattatcctgtcttctcgtgctggccantctagagctgnctaagnaaggagttgtgctgcaaaatattctttgaccacccatcngttttaacctctttttagagggggtgagg

SEQ ID NO: 53810 - DNA, 263 bp, Glycine max
  Clone ID: 701015767H1
ataccctttaagatgaaaccgtacctacgtccaatattcctattattccttatccttctcgaccaatccacttcggcgagtgcttctaagagtaggtttatagaattcttttcaaaattaaagaattcttttaatcctaagtctgaagaactcaaatcaaaagatataaagaagctcccgagcgtcgaatttttgaagaagaaacatgacggagttaaggacttctctcaagaagctaacctgaaaataccaacctggatagg

SEQ ID NO: 53811 - DNA, 261 bp, Glycine max
  Clone ID: 701015768H1
ccatttacagcaatttcatcgacgcgctccccgtggtgaaatactgttccgagaacaacaagcgccttatccatttctctacttgcgaagtgtacggaaagacgattggagcctttctccctaaagatagtcctcttcgtaaggatccggcatactatgttcttaaagaagacgagtctccttgcatttttggttctattgaaaaacagaggtggtcttatgcctgtgcgaaacagttgattgagaggctgatttatgctg

SEQ ID NO: 53812 - DNA, 264 bp, Glycine max
  Clone ID: 701015769H1
gatggcgatgaggtgtaaggatgatagcttgacatgtgaaactacagagatcaaaatcacagcgttagcaaacccaacgacaaccgaaacagcgtcgctttgaaataaaccaaacctcgccacatttcttctcttcattcttcttctaagctttctagaatcttcacttcagaaccgaagccatggcggatcggttcttccccaacccgatgcccgagttcgtacccgaaacgacgccgtccactcctcaggaagaagaagaag

SEQ ID NO: 53813 - DNA, 261 bp, Glycine max
  Clone ID: 701015770H1
ctcatttaccaattaaaaatgccttcactagttgcggaggcattcgaagccaagggcgcagaacccttgagcctgaagcccattttcagtgcctcaggcgtcaagggcaagcgagtaactgcactatcagcagaagcaaatgccctcactgatttcattcaagcaatcatagctgacaaaccagacatcgactctccattcagcgtcctcgatttgggcgtcgtaatgggcctcatggacaaatgggcctgcaagctcccc

SEQ ID NO: 53814 - DNA, 259 bp, Glycine max
  unsure (1)..(259): unsure at all n locations; Clone ID: 701015771H1
ggagggtgttgcctttgcttacaatccttgtttcctttggagtgttcttctacttgcaggattcttacacagcacagttatttcctctcataaagttaccgcgggataagtgcagccttcttccccatcgccactttctggatatccagcaaacgtattgtgaccccacaagggatcatttctggttcagtggagataaatgatgggaaaataatatctgnngttgagggncatgctattcaggggnagcctaagcaag

SEQ ID NO: 53815 - DNA, 258 bp, Glycine max
  Clone ID: 701015772H1
gtggttatgttcccattccttgcatttggccacattagtccatttgttcagctctccaacaagttgttctctcatggtgttcatgtcactttcttgtcagctgcatccaacattcccagaatcagatcaactcttaatctcaatccagccatcaatgttatctcactaaagttcccaaatggtataaccaacactgctgaattgccacctcacttagctggaaatctcatacacgcccttgacctcactcaagatcag

SEQ ID NO: 53816 - DNA, 255 bp, Glycine max
  unsure (1)..(255): unsure at all n locations; Clone ID: 701015773H1
tttgacaaaaatccaatgcaaatttaagtgnaagcagtctagttataatgtgagcagactagtacttgttcaaagcaatttcactggaaatgctattcttaatttcgcctcatgggaaaaacccactacgtcatttnaaattttagaagcatttcaaacattcncantccaagacaggnatctccaacaacaatttcctgtaaagcattagtcttccttaggtccatgtattcacgatgnataccactggcnttt

SEQ ID NO: 53817 - DNA, 254 bp, Glycine max
  Clone ID: 701015775H1
cgaaatcggcggagatggttgccatgaggtttcaccagtaccaggtggtgggaagggctcttcctaccgaatccgatgagcatcctaagatctaccgcatgaaactctgggccaccaacgaggtccgtgccaaatccaagttctggtattttttgagaaaattgaagaaggttaagaaaagcaatggacaagtgctagccatcaatgagatttttgagaagaatcctaccaagataagaattatggaatttggc

SEQ ID NO: 53818 - DNA, 251 bp, Glycine max
  unsure (1)..(251): unsure at all n locations; Clone ID: 701015776H1
ttgtcacataaaagtcatctaagaagaattacaagatcatcatcacaataacnagatgagttcaggaattagagcatggagtgtggcagcaagtgttggaattgtggaggccttgaaagaccaaggcatatgcaggtggaatcatgccttaagatcagctcaacaccatctcaaaaaccatgttggctcattctctcaggctaacaagctttcttcttctgctatgatatccacaacactaaaacatgagg

SEQ ID NO: 53819 - DNA, 261 bp, Glycine max
  Clone ID: 701015777H1
aaaaaatgaaaacatatagcatttggttgggcaactaaagcgtggactttttgccagtttttcttcaatcagatccaccaaacccatcacagaaaatcacgtaagattgtacctccaactcaaaagcttcaaactttttccagtttccaaattaagacacagagagaaaaagcaaaaagaagctgcaaaattttcttcttttgtcacttttttctgttttttcatcacaaaagtttgaaccttttctttccttccattgaa

SEQ ID NO: 53820 - DNA, 261 bp, Glycine max
  unsure (1)..(261): unsure at all n locations; Clone ID: 701015778H1
ctcttctctagttttctcnatcattactcacaatgcgctacctcacttgcaacgccgagtccgcaatagccacatgcgaccctcactccctcaagaagaagaaaaagcccaaaagcccagctcaggcccagcccgtgcgacacttcgcctactccgacatcctcgacgccaccaacaacttctctgccgacaccttcctaggtaaaggcagccacggcaccgtctacaaggccgccttccacggcggcgccctcgtcgccg

SEQ ID NO: 53821 - DNA, 261 bp, Glycine max
  unsure (1)..(261): unsure at all n locations; Clone ID: 701015779H1
ccgcccnntggtttnatctttttgggctgtgttatgcntctcagcacctgtcactgantgcgttgtcttgcggaggataatggactgttatgaacttctacaaggnatcatgccctcaggctgaagacatcatcaaagaacaagtcaagcttctctnnaagcgccacaagaacactgctttctcctggctcagaaacatcttccatgactgtgctgttcagagttgtgatgcttcactgttgcngggctccncaaggaggg

SEQ ID NO: 53822 - DNA, 85 bp, Glycine max
  unsure (1)..(85): unsure at all n locations; Clone ID: 701015780H1
gcgagttctatcgggtaaagccaatgattanaggcatgcgggggcgcnncgccctncgngcctatttctcacccctttancatga

SEQ ID NO: 53823 - DNA, 266 bp, Glycine max
  Clone ID: 701015781H1
tcttgctttgcttcctcttctatttgctttcttgttagctgccactacggaatcaagaaaagatccaggggaatattggaaaatgatcatgaaagatcaggaaatgccagaaggacttcaaggtcttgtttcatttcaatctgaaaataaccctaagactcaagagcagcttggtaaaggttccaaaaaccattgtgaagagtctctagttacaaatacacaagttaacagtgacttcgaacccataccaagtgttaccaaatatg

SEQ ID NO: 53824 - DNA, 147 bp, Glycine max
  unsure (1)..(147): unsure at all n locations; Clone ID: 701015782H1
gagaagcgtcttaataaacgctcttctctgaaaaacctgatttcttctcggcttctcttactctttcgtttcgatcttcgatctctganaatgagagagtgcatttcaatccacatcggtcaggccggtattcaggncgggaacgcc

SEQ ID NO: 53825 - DNA, 243 bp, Glycine max
  unsure (1)..(243): unsure at all n locations; Clone ID: 701015783H1
ttgatcgttctctctgaacaaccacngccatgggaggagncacatggacagaaggccaagatggctcgtgagagaaacatggagaaaaataaacctgccaaaggtagccagttagaggccaacaagaaggccatgaacatccagtgcaaggtgtgcatgcagacattcatatgtaccacatcggaagttaagtgtcgagaacatggctgaagccaagcatcccaaggctcatctctacacntg

SEQ ID NO: 53826 - DNA, 261 bp, Glycine max
  unsure (1)..(261): unsure at all n locations; Clone ID: 701015784H1
gttcctgcttctggcttttcttttagttctgagcatatatggaaagtcattaaggagaacaaagatctcgatcttcctgcacataaggttatggttgctactgtacgatgtgaagnaatagccaacgagaaatatgtttctttgttgcaaatgaggattggtgtcaattggaagaggctgtgcaatctggccctattcctggatttgggaaaaagctcagttcactcttgatatttgtttttcagagtatgatgctgaagc

SEQ ID NO: 53827 - DNA, 259 bp, Glycine max
  Clone ID: 701015786H1
caacctcgttgtggttttccaatgctgcgaagtcgaagatctagctagaggcagagaacgttctccctaatcttctgccgatggcgatcttctacgctttggtggccagaggcaccgtcgtcctggcggagttcagcgccgtcaccggcaacaccggcgccgtctcccgccgcatcctcgagaagcttccggcggagtccgactccaggctctgcttctctcaggatcgctacatcttccacatactccgatcggatgg

SEQ ID NO: 53828 - DNA, 258 bp, Glycine max
  unsure (1)..(258): unsure at all n locations; Clone ID: 701015787H1
ggctacctccatggtgaagcttatgcttttctctgctctcatactcttgtccttgcaagcagttgtgtctgtaacaccactgcattttcaacatccactagaccctttaaccaaacaagagataagtcttgtccaaaccatagtccaaaacaagtacccaagctcaagtaacaggttgagcttccactacattggactcgacgaacctgaaaaggatgccatcctcaaatgggaatccatcanaccaatgttataact

SEQ ID NO: 53829 - DNA, 104 bp, Glycine max
  unsure (1)..(104): unsure at all n locations; Clone ID: 701015788H1
attccttcttataataaaggagagactatgtatgangtggatcttgttcaganggctgttagagcattttattgttcaggaacagactgnaagttcaagtccaa

SEQ ID NO: 53830 - DNA, 257 bp, Glycine max
  Clone ID: 701015789H1
ctgaagagccatccgcaggtaagcaatggttaagcataataatgttatccccaatgggcacttccggaaacactggcaaaactatgtgaagacttggtttaatcaaccagcccgaaagaccagaagacggttggctcggcagaagaaggctgtcaagattttccccaggcctactgctggatctctcaggcctattgttcatggccagactctgaaatacaacatgaaagtcagagccgggagaggattttcactgg

SEQ ID NO: 53831 - DNA, 261 bp, Glycine max
  unsure (1)..(261): unsure at all n locations; Clone ID: 701015792H1
cttcctcactctcattcgcaatggccgcagcagcacgtcctctcnncancgtgcaggcnctcganagtgacatggccaccgacgcctccgccagcgtccctatcnctgacgtcatnnagtnctccatncgnccggacatcgtnaanttcgtacactccaanatctccangannagccgacaagcctatggngtcngccgccgatntggcgcaacaganttccgccgagttcctggggaaccggtcgtgccgtctcccgtat

SEQ ID NO: 53832 - DNA, 258 bp, Glycine max
  unsure (1)..(258): unsure at all n locations; Clone ID: 701015794H1
gttaggttctgcacgctctgcttccagcgagtgttctttcttcgtttcaacaccttaatttgcacacgctgcttcttcagcttgagaaatggcacaagaaacctttctattcacatctgaatctgtaaacgagggtcaccccgacaagctgtgcgaccagatctctgatgcagtgctcgatgcgtgccttgaacaggaccctgacagcaaggttgcctgtgagacatgnaccaagaccaacatggtcatggtctttgg

SEQ ID NO: 53833 - DNA, 108 bp, Glycine max
  unsure (1)..(108): unsure at all n locations; Clone ID: 701015795H1
ttttagcgcacttncttctagatttaaggaagatgggtaaggaaaaggttcacatcagtattgtggntattggccatgttgactctgggangtccactacnactggnc

SEQ ID NO: 53834 - DNA, 275 bp, Glycine max
  unsure (1)..(275): unsure at all n locations; Clone ID: 701015801H1
caagaagaagaattggattcgaaaatcgtagcgtagcgntgggtgcgattgaacgatacgatgggaagaggaaaattcaagagcaagcccactggtcgccgccagttctccaccccggaagatatgcttgctggaacctctaaccgtcctcgaacttttagacagaaagangctgagcatgaagaggaagnccccgaggaagtatntggagatgaatctggagaagaatctgaagntggactnctaanaaaangaggnttctaggggttttnccc

SEQ ID NO: 53835 - DNA, 272 bp, Glycine max
  Clone ID: 701015802H1
cgcatcaacacagcacttgtttgttcccaactccgaaaaatatcatgctcctaacgtaaaatcctcggtttcaacgttcaaccgcgatctcaaaaaacaaaactatggcatcactctcaggcatttgctcctcttccccgactctcaaaaaattcccaaaccaatccccatcgttgaccgaccctctccgcaaagaccacgtgtccttccccgcacgcctcgccgatcggaccctcagcctcgcgccgtccgtgcggtggctgggaggtttc

SEQ ID NO: 53836 - DNA, 271 bp, Glycine max
  Clone ID: 701015803H1
catatctttacttcccaaaacttgctctacaatgagtttccttcgttcttttgcaagaaacaaggatatatcaaaagtaggacgcagaggtatccattgcatgcagaaactatgtgcagaaaaaatatctcctgattcactagagaaggcccaaaatcgtgtgatagatgctgcactcacacttgttcgagaaaatacaaggctaagaaagaactcgtgcatagtttgggaggtgctgtggcaacttcaactcttcttggagttccttggg

SEQ ID NO: 53837 - DNA, 267 bp, Glycine max
  Clone ID: 701015805H1
ctgtgactctgtgcttagttaacgttaacagtgacttaagatggcggattctgcagatgtcacccacgatgttgtgtccctcctctcttctcctcaaagggactttcttcttcgaaacaacggcgatcaggttaaaattgacagcttgaagggtaagaaacttggtttgtatttttcggcatcctggtgtggtccatgtcaaacatttacgccaactttggtggatgtgtacaatgaggttgcaaaaaaaggtgacttccagatcgt

SEQ ID NO: 53838 - DNA, 265 bp, Glycine max
  unsure (1)..(265): unsure at all n locations; Clone ID: 701015806H1
gtgacattcgggttgttcctaggacgcaaggtgtcgttgataagggcgttgttgtacatggtggcacagtgtgccggtgctatctgnggtactggattggccaaggggntccaaaaagcatactacaacaggtatggaggtggtgccaactctgttgctgatggctacaacaatggtactgctttgggtgctgagattattggtaccttcgttcttgtctacactgtcttctctgccactgaccctaagaggaacgctagggatt

SEQ ID NO: 53839 - DNA, 265 bp, Glycine max
  unsure (1)..(265): unsure at all n locations; Clone ID: 701015807H1
agaatatgtattctagagattcatggggtggaccgttggagataaacgcgacggactcggcgacggaggacgagcggagccggaacctgcaggacgttgacagggcagcgctgtcgcgtcccttggatgagacgcagcagagctggctccttggccccggcgnnnnnnnnnnnnnnnnnnncgtcgatctcggctgcatcatcgtcagccgcaagatcttcaagtggaccctcggcacaatcctcttcgccgccttcctcgccgg

SEQ ID NO: 53840 - DNA, 98 bp, Glycine max
  unsure (1)..(98): unsure at all n locations; Clone ID: 701015808H1
cacttctncattaanattaaaatccaatctaatctgggtttccctttctcccatcagaggacaaagcttccaactttgcgggattcgtatttnttgtt

SEQ ID NO: 53841 - DNA, 267 bp, Glycine max
  unsure (1)..(267): unsure at all n locations; Clone ID: 701015810H1
gttctgtgctcgcccttgtattccttcttgtcatactatttcgngaaggattggtaacatgtatgaagaatgaagacggatcagaagaatggggatatgtgcaagttagaccaaaagcccacttgttctggtggctttacagaagtccatacagagtggagaatccctccaagcctggccaatcattctctggcttcagggaggaccaggctcttcaggagttgggtttggaaattttggagaggttggtcctttggatgctaattt

SEQ ID NO: 53842 - DNA, 265 bp, Glycine max
  unsure (1)..(265): unsure at all n locations; Clone ID: 701015811H1
aagcgatggtcattagctctgatgatgaacctgaagcagttaagggataaaacgtaagggaaaagtctgctgggaaaaatgcaaaggcattcagttcagtcctctctgctcgaagcaagctgggaaaaagatcatttctataacacaatctccacaggtcatgccattggggcaaatcctgcaattcctagaatgtttccaaatatgtttccactggttacaagtcagagaaagttggcaaacagaaggtgntgcatctgaatnt

SEQ ID NO: 53843 - DNA, 150 bp, Glycine max
  Clone ID: 701015812H1
caacttccaacaccatagtgaaatgggcttccaaggctgcacttctcttgtgtttcaatgttctcttcttcaccgtggttagctccacatatgtgccatgcaacccacaccccaaaactccaaaacacccacctgtcccaaagccacctt

SEQ ID NO: 53844 - DNA, 269 bp, Glycine max
  unsure (1)..(269): unsure at all n locations; Clone ID: 701015813H1
caatcggcttctgcttcaaggaaggagagcttgttattctctatcaacaagtaaaatgtcaggtgaagagggtgtcattgcagttgagcnnnnnnnnnnnnnnnnnnncatcccaggcgagccaatggatatcatgactgccttacaacttgtgctcagaaaatctctggcttatggtggtttgtcgcgtggccttcatgaaggtgcaaaagtgattgagaagcatgctgcacaactctgtgttcttgcagaagactgtgaccagcctg

SEQ ID NO: 53845 - DNA, 271 bp, Glycine max
  Clone ID: 701015814H1
aagaaagcttagattacttttttattttccatatttaatttagtgttgtatatcggtgtttaggtgcttttggtgtaacaggatattttatgtgtttcgaaaacactgtaattcttgtcccaatttgttgcttgtaggagtgagtttgcttcgttaatgaaaagtggaaacccccttgttttcaatcaacattctctctacctcctttttgtttttattatgagatgttgattcagttgcattgaagtgaagtaatttgtttagaagcggt

SEQ ID NO: 53846 - DNA, 113 bp, Glycine max
  unsure (1)..(113): unsure at all n locations; Clone ID: 701015815H1
ggcaggcncggtncgcgtcctggcggtgtcactatgtgagagnnntaggtctggaaactgcaagcnntccccagtttacnnatagcnaagggggncatncatgctcctattgt

SEQ ID NO: 53847 - DNA, 261 bp, Glycine max
  unsure (1)..(261): unsure at all n locations; Clone ID: 701015816H1
ggggtctcagatgccatcaacaatggttatgattcatggggacctctctttggtagattgttctttgcattgtgggtgatcctccatctctaccccttcttgaaggggttgcttggaaaacaagatagaatgccaaccattatattggtttggtcaatccttctggcctccatcttgactctcatgtgggtcagaattaacccgtttgtgtcaagagacggcccgtgttaganatttgtggatngaatgtgacgagtcntg

SEQ ID NO: 53848 - DNA, 269 bp, Glycine max
  unsure (1)..(269): unsure at all n locations; Clone ID: 701015817H1
ctcctccttctccctcagaattcgcaatgctgcctcagaagcacactctggtggcgacactggctgtggtgctcgcagtagcacaagcagtagatctggcttccgagcgagccgcattgctcgctctccgttccgccgtgggaggccgaaccctcttctggaacgccaccagggagagcccctgcaattgggccggggtccaatgcgagcacgaccacgtcgtcgagcttcacctccccggtgtcgtctctccggcgaaatccggtcnt

SEQ ID NO: 53849 - DNA, 272 bp, Glycine max
  Clone ID: 701015818H1
caataatcgcagaagcagtttccggtgcatctcatcgtcttccaaaatgaacgacgcagatgtctcgaagcaaatccagcagatggtgcgtttcatccgccaggaagctgaggagaaagccaacgagatctctgtatctgccgaagaggaattcaatatcgagaagctgcagttggttgaagccgaaaagaagaagatcaggcaagaatacgaacgcaaagagcgccaagtcgaaattcgcaagaagattgagtactcaatgcagctgaatg

SEQ ID NO: 53850 - DNA, 270 bp, Glycine max
  Clone ID: 701015819H1
aacactttccacttgtctccgaattagttatcttgagaaacattattcccattgctatatattatggctagcatgaaggttacatgggtggttgtgatcatgtgcatggccgtggtgggtgcaccgatgatggcgcaagccatgaacatgcaatgatgtgacggtgaacatggcacagtgcctatcctacctgatgcagggaggaacaccttcaacactttgctgcagcggagtcaagaacattcttggctctgctgtcaccaccgttga

SEQ ID NO: 53851 - DNA, 244 bp, Glycine max
  Clone ID: 701015820H1
aaaactcttgtacttggtttcatgccagattagggaactcttttagttgtcaattagatcacagagacatggaggttgctatggaactggaagatgatcttttttttgctgatttgagcaaggaaattgctctactaattatggatgaagatgaagatcctcttgcttcttgtcctcctgactctcttcaggtactttactactttaatctcttcaaagttcaaacacatgcacacacatactt

SEQ ID NO: 53852 - DNA, 264 bp, Glycine max
  Clone ID: 701015823H1
agcaacaatggcagccatggctgcgcttcagagctcaatggtcggtctctccctctcctccaactctttcttaggccaacgcctttctcccatcaccctcccctctcttcttccgggtaagtcaacagagaagcaatgtcctattgtaatgaggcttaaacgatgggaacggaaggagtgtaaaccaaacagccttcctatcttgcacaaaatgcatgttaaattggagatacggtgcaagtcatatctggacgtgaaagggga

SEQ ID NO: 53853 - DNA, 108 bp, Glycine max
  unsure (1)..(108): unsure at all n locations; Clone ID: 701015824H1
gangctcgacgttgtcaccccttncgagcncanaccgaataccgttntactcagctgctgcagcncttgagctcccaactncgtncttngtgnttcagcatacgagnt

SEQ ID NO: 53854 - DNA, 267 bp, Glycine max
  unsure (1)..(267): unsure at all n locations; Clone ID: 701015825H1
gggctttccttcgatccaccttgggcgacctcaatggttcttttagcaatgctagccattgtctccgcaactgactattatggatatggtccaacaccaaagcttgagaaccccaaacccaaaacagattacaaagttgacaaaccacaccccagaataccagattactatgcagtgcccaaaccaaaaggaaacgatgaactacntctgttccccacaatcattggtgtccanggtgttgttttatgtaatcgggttccattattc

SEQ ID NO: 53855 - DNA, 259 bp, Glycine max
  unsure (1)..(259): unsure at all n locations; Clone ID: 701015826H1
cggcactgcagccgtagaaggaaaaccgaccatggtgcacgtctccttttacaggaactatggtaagacgtttaagangccccgccgtccgtacgagaaggagcgtctagacgcggagtgaagctggtgggggagtacgggctgcggtgcaagagggagctgtggagggtgcatacgcgctcagccgcatccgnaacaacgcgcggaatctccttacctcaacganaananccgcgcggntttcgngggnggtntttct

SEQ ID NO: 53856 - DNA, 267 bp, Glycine max
  unsure (1)..(267): unsure at all n locations; Clone ID: 701015827H1
gacaagatcaaggagaatcaggagaagattaagctcaataagcagttgccctacctcgttgggaacatcgttgagatattggaaatgaacccagaagacgaagctgaagaagatggtgccaatattgatcttgactcacaaaggaagggaaagtgtgttgtgctaaagacttctactcgacagacaatctttctacctgttgttgggcttgttgaccntgacaagttaaaacctggtgatctggttggtgttacaaggntagttatt

SEQ ID NO: 53857 - DNA, 266 bp, Glycine max
  unsure (1)..(266): unsure at all n locations; Clone ID: 701015828H1
gcaaaggtacctgcattccgagtaggtttgtagaaaatgaaattgagtcatctgtaagtgattttagtcaaatgaaagtcaatgtagatagcagtggcaacacacggaatcaggagccaaattttataaatattccaaaagtgagccaccctatcatagaaagatatccatctcgtgatcattcacgtgtgttcactgaataggttcaaatattgttgagaaggcctttctatacnggtacgagtcagtagtagtagtantccttt

SEQ ID NO: 53858 - DNA, 194 bp, Glycine max
  unsure (1)..(194): unsure at all n locations; Clone ID: 701015829H1
gcaagcggcatagttatgctaccaaatccaaccagcaccgggntgttaagacccctggnggnntgttagtnnagnagantannnataggattacaactggcgannctgnaactctactgggagaggaagtagaaattgaggtaccagtttacaaagaacctgcaggagannattccaagatggnaactgntgaa

SEQ ID NO: 53859 - DNA, 268 bp, Glycine max
  unsure (1)..(268): unsure at all n locations; Clone ID: 701015830H1
ttccccaaccttccttgaaatttcaaaccctaaactaaacaaaactattaattcccccatcaacccctcatctcatcactattattatattcagataataataaaaagaaaaaaacatcactcaaactcactcattttttttctcaactnnnnnnnnnnnnnnnnnnnnnnnnnnaaaaatgggcacaccaaacccaacccaacccgacgatgggccctgacccattcgccggcaatgggaaagcccggagaacaccaccctctgccc

SEQ ID NO: 53860 - DNA, 97 bp, Glycine max
  unsure (1)..(97): unsure at all n locations; Clone ID: 701015831H1
gggtttaacattcttgttcgtgcctttgaaatggattggcatgaatgccatgcttgtttatgncatggcagctgagggaatcttcgcaggattcatt

SEQ ID NO: 53861 - DNA, 267 bp, Glycine max
  unsure (1)..(267): unsure at all n locations; Clone ID: 701015833H1
atccttgcaacacacattgtcttgtcggcaaaatcttccaccaacaacacacagtccatggcaggctcaaacattctttctcactctccttcccttcccaaaacctacngcnnctccttaaaccaaaacgcgttatcccaanagcttttttttctgccccncanattcagagccaccacaaaaccangtgctctnngagcggttctctngagngtgntgaanaannggnggnggagganganngnnnttcnttnnngnantgttcnc

SEQ ID NO: 53862 - DNA, 105 bp, Glycine max
  unsure (1)..(105): unsure at all n locations; Clone ID: 701015834H1
atttctctctgtttccttcttcaccgcatnaatggagttcngacggcgttctcctcgagcatgtntaacnctgctgcctncgacatntactgtngtngtcnnnna

SEQ ID NO: 53863 - DNA, 270 bp, Glycine max
  unsure (1)..(270): unsure at all n locations; Clone ID: 701015835H1
ggcaattgaacacgaagacgatctcaaagacgagaagaacccacgacccctcgacgaggatgacatcgccctcctcaaaacctacggtttgggaccttattccacaagcataaaaaannncggagaaggaaatcaaagatatggccaagaaagtgaatgacttatgtggtatcaaggagtctgatactggattagcagcaccaagccagtgggatcttgtttctgataagcaaatgatgcaggaagagcagcctcttcaggtggcacgat

SEQ ID NO: 53864 - DNA, 143 bp, Glycine max
  unsure (1)..(143): unsure at all n locations; Clone ID: 701015837H1
caaaaaggctgctcctttttaatttgtgttggtttaagctaaaggcctcatcctcattcttttcttcttgttggataggntaagntagctaactctaggtgcaactttgctttgctccttacctcattgcactctctctttgt

SEQ ID NO: 53865 - DNA, 266 bp, Glycine max
  unsure (1)..(266): unsure at all n locations; Clone ID: 701015839H1
gnggaattggnctctgctgcgggtgtctgctgcaantcagnagccgagctacatnccaaatnctcngtagagtcntattcccatctggactggttttgaggntcaagtggngacatatganganaaagttcagacactggaggatgagatcaaggaattagatgnaaaactgtcagcagctaattcagnggtanataccaaggaaagcttggtanaacagcatgctaangtcgcagaagaggctntctcaggtgggagnaagctga

SEQ ID NO: 53866 - DNA, 265 bp, Glycine max
  Clone ID: 701015841H1
cacagttcctgatccatggcatctcgccgccgcatgttgttgaaggtcataatcctcggagacagcggggttggtaaaacatcactgatgaatcagtatgtgaatcgtaaatttagtaatcagtataaggcaaccatcggcgcagattttcttaccaaggaagttcaatttgaagataggttgttcacattgcagatttgggatactgctggtcaagagcggtttcagagtcttggcgtggctttctaccgtggtgcagattgct

SEQ ID NO: 53867 - DNA, 234 bp, Glycine max
  Clone ID: 701015842H1
gcttcgtgtgtatccacctctgtctttcctttcctctaaagtattcttttacaatatataactgtaactacttatttcctaagaattataacttacgtaaaacatgttgggctatgcgaacccgtcggggaatctggctgtggatggagacatgacagtgttggaaagacagagggcgaggatgaagtggcaagaagagcaagagtacttttctggaaacagcttcaacggtgt

SEQ ID NO: 53868 - DNA, 265 bp, Glycine max
  unsure (1)..(265): unsure at all n locations; Clone ID: 701015844H1
tcgangntagtncctccanngngaagttaagtgttcgcacacntgncttcaatgtcccaaatncancctgcancatccttgaatcctccaattgncacgccttttggatccatttttctccgtgaggccgtgancgcatcgcgattttgttttgggaacccgcgaaaactgaatcagatagtgcggcacggaaactaggaattagagcaatggcaaaaagnctggtgcggatactgcaatcggngacggggtctganccccnttc

SEQ ID NO: 53869 - DNA, 267 bp, Glycine max
  Clone ID: 701015845H1
gtggaaagtccctcttctcaacaatcggtttccgatcatcaaccccgctactgaagacatcatagggcatattccagccgctactaaggaagatgttgaccttgcggtggatgctgctaaaagagccttttcccataacaaaggcaaagattggtcttcagctcctggctctgttcgtgctcgctatcttcgagccatcgcttcaaagataacagagaaaaaggatgaactaggaaagcttgaagcaattgattgtggaaaaccact

SEQ ID NO: 53870 - DNA, 261 bp, Glycine max
  unsure (1)..(261): unsure at all n locations; Clone ID: 701015853H1
cgggaacccagatttccaccattctgagtaacttcacacaccatataacanaaaatgaggtggggcttgtggcaacttgggcaatcaatccctcgccgtcttgctcacggtaataataaagctgttgcttgtcgatattttgcctcagatgctgagctgaaaaagacagtcctttatgacttccatgttgctaatggagggaagatggtgccatttgctggatggagcatgccaatccaatacaaggactcaattatggac

SEQ ID NO: 53871 - DNA, 210 bp, Glycine max
  Clone ID: 701015855H1
tcaaatatccttgagccagacatgtacaggaacgctgcttcacgtcttagggtcatcagtgcccgttcgtgcagcagcagcaggatacctgccagtgccagatttgcaagttccgttgccacacaacaatcctcttctggtttgggtggtttatttggatggctcactggagaccgatccagttctttaccatctctggatttcccgctt

SEQ ID NO: 53872 - DNA, 210 bp, Glycine max
  unsure (1)..(210): unsure at all n locations; Clone ID: 701015858H1
tagtgcctccttgccagaagtaaaatggcccaagaaactttcctattcacatctgaatcagtgaacgaggggcaccctgacaagctctgtgaccagatctccgatgctgtgctcgatgcatgcttggagcaggacctgaaagnaaggttcctgtnaanttgcacaancccaatggggggnnttttgggnagnncccacagnggggggggg

SEQ ID NO: 53873 - DNA, 260 bp, Glycine max
  unsure (1)..(260): unsure at all n locations; Clone ID: 701015859H1
gttcttcacatcactaccaggaagtccccctgtggtgaaggtaccaacacatgggatagatttgaacttcgtgtccacaanagagtgattgacctctacagtgccccatatgacggtaaagtttggctttgtaaaattgattgtctagtganctgatttgttttggatgctttaccctgaaatttagggctataaaactnattgtaaattcttaacncaataaactagttncgttttnttatatgatnccgggtggaccc

SEQ ID NO: 53874 - DNA, 264 bp, Glycine max
  Clone ID: 701015860H1
ctgggagtctccattaggttgcctcatgttttcttttactatgcaaatggaggatggacgagtcgttcctttggttcagtatgtggtttcccttgctatgacagaggcaatcaaggatatctgtgacaaaaatgggttacccagcatagatgttaaaatcaagtggccaaatgatctttacttaaatggctctaaagttggaggcattctttgtacctcaacatataaatcaaagaagttcaatgtaagtgcaggaataggctt

SEQ ID NO: 53875 - DNA, 189 bp, Glycine max
  Clone ID: 701015861H1
agcacatatactattggccctttccaatctacaaaaaatgaaaaagcaaaagttaaagtgaaagttcggttgaatgtgcatggaattatatctgtcgaatctgcaactctactggaagaggaagaagaaattgaggttccagtttacaaagaacctgcaggagaaaattccaagatggaaactgatgaa

SEQ ID NO: 53876 - DNA, 100 bp, Glycine max
  unsure (1)..(100): unsure at all n locations; Clone ID: 701015864H1
accatatggcttttgaattgtatggtatgcttgcgggtaatgtcagtcccgatnccgggatcagaangtgacacccaacatanggacngntnagntgant

SEQ ID NO: 53877 - DNA, 273 bp, Glycine max
  unsure (1)..(273): unsure at all n locations; Clone ID: 701015865H1
gcnncnccttctccctcannattcgcaatgctggcctcagnngcacactctggtgncgatcctggctgtngtgctcgnagtancacaancagtagatctngcttccnagcnagccgcattgnctcgntctccgtnccgcngtgggaggccgaancctcttctggaacgcnaccagggagagnccctgcnattgggccggggtncaatgcgagcacgaacagtcgtcnaacttcanctgcccggtgtnggttcnncggcgaaatccggtcngta

SEQ ID NO: 53878 - DNA, 273 bp, Glycine max
  Clone ID: 701015866H1
caataatcgcagaagcagtttccggtgcatctcatcgtcttccaaaatgaacgacgcagatgtctcgaagcaaatccagcagatggtgcgtttcatccgccaggaagctgaggagaaagccaacgagatctctgtatctgccgaagaggaattcaatatcgagaagctgcagttggttgaagccgaaaagaagaagatcaggcaagaatacgaacgcaaagagcgccaagtcgaaattcgcaagaagattgagtactcaatgcagctgaatgc

SEQ ID NO: 53879 - DNA, 245 bp, Glycine max
  Clone ID: 701015868H1
aaaaactcttgtacttggtttcatgccagattagggaactcttttagttgtcaattagatcacagagacatggaggttgctatggaactggaagatgatcttttttttgctgatttgagcaaggaaattgctctactaattatggatgaagatgaagatcctcttgcttcttgtcctcctgactctcttcaggtactttactactttaatctcttcaaagttcaaacacatgcacacacatactt

SEQ ID NO: 53880 - DNA, 248 bp, Glycine max
  unsure (1)..(248): unsure at all n locations; Clone ID: 701015869H1
accaaagaagaagattgaccatggcttcatcaatgaggatctcaaggctgctctctcgttcttttctttctgcttccactactcctttgttctctagaggtggaagtggtgctcttggtgcagggctcagtaaattcagcactgctgctgcnttgaagaaccaatcaaaccaccagttaaagtagaacacacccagctcttaatcgatggaaaattcgttgatgctgctactggcaaaactttccaag

SEQ ID NO: 53881 - DNA, 103 bp, Glycine max
  unsure (1)..(103): unsure at all n locations; Clone ID: 701015873H1
cacagttcctgatccatggnatctccgcngccgcatgttgtatgaaggtcataatacctacggagacagacggggttangtaaaacatcagtgcatgcaatca

SEQ ID NO: 53882 - DNA, 259 bp, Glycine max
  unsure (1)..(259): unsure at all n locations; Clone ID: 701015875H1
gacaagatcaaggagaatcaggagaagattaagctcaataagcagttgccctacctcgttgggaacatcgttgagatattggaaatgaacccagaagacgaagctgaagaagatggtgccaatattgatcttgactcacaaaggaagggaaagtgtgttgtgctaaagacttctactcgacagacatctttccacntgtngtngggnttttcccccganantaaaacnctggtntntggnggntnaaaaaanntntttt

SEQ ID NO: 53883 - DNA, 259 bp, Glycine max
  unsure (1)..(259): unsure at all n locations; Clone ID: 701015876H1
gtttgttcctccatcgcgaaattagggttcgctcacttgtcttcaatttcccaaattcaccctgcaccatccttgaatcctccaattgacacgccttttggatccatttttctccgtgaggccgtgacgcatcgcgattttgttttgggaacccgcgaaactgaatcagatagtgcggcacggaaactaggaattagagcaatggcagaagatctggtgctggatactgcatcagagactggngctgatccctcctctg

SEQ ID NO: 53884 - DNA, 262 bp, Glycine max
  unsure (1)..(262): unsure at all n locations; Clone ID: 701015877H1
gaaaaccacccactcctccaccacaggttcagtcacagacacaagcacagtcacaggcacaaacgcaaacacttgntcctcaatttcaacagaagtcaactggtggtggcgccgntgttgatttgccttctcctgattcagtttcaagtgatagtagtcttgcgaatgnaatctcgcgttcgaaacctgctgtttatcangaacaagttcagattcaatccgggactacnagggttcccagtaaccctgtggatccaaagct

SEQ ID NO: 53885 - DNA, 264 bp, Glycine max
  unsure (1)..(264): unsure at all n locations; Clone ID: 701015883H1
ggtgggtattgcttcacacaaacaacanacagtgtnctgctgcaccttgcaatggnntcgctatcaacatggtntncgctacattggcccacaagctcgaatactccttctccctcagctggaagnactacaaaggaggtcaaattacagacagatnggtncggatgttgtttgganaaacttctntcaaggaaagctgacgtacttgcactggaatnnaggagangagatggcccctnctattgatggtaaagcagtaactct

SEQ ID NO: 53886 - DNA, 269 bp, Glycine max
  Clone ID: 701015884H1
ctgtgactctgtgcttagttaacgttaacagtgacttaagatggcggattctgcagatgtcacccacgatgttgtgtccctcctctcttctcctcaaagggactttcttcttcgaaacaacggcgatcaggttaaaattgacagcttgaagggtaagaaacttggtttgtatttttcggcatcctggtgtggtccatgtcaaacatttacgccaactttggtggatgtgtacaatgaggttgcaaaaaaaggtgacttccagatcgttt

SEQ ID NO: 53887 - DNA, 254 bp, Glycine max
  Clone ID: 701015886H1
gatccttctttttctccttgaactcaaacatggcagatgaggtggttctgctagatttctggccaagtccatttgggatgagggtcaggattgcacttgctgaaaagggtatcaaatatgagtacaaagaagaggacttgaggaacaagagtcctcttctcctccaaatgaacccggttcacaagaagattccggttctcatccacaatggcaaacccatttgtgaatccctcattgctgttcagtacattgag

SEQ ID NO: 53888 - DNA, 98 bp, Glycine max
  unsure (1)..(98): unsure at all n locations; Clone ID: 701015888H1
gagctgtccactgaaatacggttccattcattgagtcagttgaacaangagnagggctgnnncctcttctagaggtggtgggttgccacattgcnnca

SEQ ID NO: 53889 - DNA, 250 bp, Glycine max
  Clone ID: 701015890H1
cggacaatgaatgctagtgagtgtgttgccaggggttgtgcattgcagtgtgcaattctcagtccaacttttaaagtacgggagtttcaggtcaacgaaagctttcctttctcaatttctctctcgtggaaagctccaagttctgatgcacaggaaagtggaccagataataaacaaagtacccttgttttccccaagggaaatcccataccaagtgtcaaggcactgaccatctacaggtcaggaacct

SEQ ID NO: 53890 - DNA, 257 bp, Glycine max
  unsure (1)..(257): unsure at all n locations; Clone ID: 701015891H1
cntagtgcaatgagcttccaaggctgcacttctcttgtgtttcaatgttctcttcttcaccgtggttagctccacatatgtgccatngcaacccacaaccccaaaactccggaacacccacctgtcccaaagcnaccntccccaaagcaagcaagttgccccnaagncactattaagttgngagtgtgtgctgatgtgttaggttgatcaacgtgcanttggggagccacaaaanacccatgtgcancttgtgggng

SEQ ID NO: 53891 - DNA, 254 bp, Glycine max
  unsure (1)..(254): unsure at all n locations; Clone ID: 701015892H1
ttcctccttcccccagagatgatgccatgcagctttaccgtgcttttaagggatttgggtgtgatacaagtgctgttatcaatatacttgctcatcgagatgctacacagcgtgcctacatccagcaagaatacaaagcaatgtattctgaggaactttccaagcgcntagcttcggagcttagtggaaagttagagantgcngttccgctnctggttncntgaccntgcaggacgtgatgcnacaatnntagg

SEQ ID NO: 53892 - DNA, 261 bp, Glycine max
  Clone ID: 701015893H1
cgaaaatcaaccttctcaagcttgcacattttgctgttatagtttctcggcagtattctgaaaaagaagctgctgttggttatcttggaggggtcattcagaaacttcaagacactagggagcagcgcatagaagaacctattctttacattaagatgcaaatagcaatattcaagcttgagcaaggtgatcaaaaggaatgcaagaaacttctagaagatgggaagagtacactcgacagcatgacagatattgatccat

SEQ ID NO: 53893 - DNA, 262 bp, Glycine max
  unsure (1)..(262): unsure at all n locations; Clone ID: 701015894H1
agntactggtgccatctatgtgagtgagtatattgctattgctgctgctatctacttcctctctccgcactctccatcgttttaggaatatcncaccnaatntcgtgaaatcgaacgnttccgacagantcgtacgaattattgttcattgtttgcctctnctgttgtgctccaccttggnnaatanaagtacagatttatttcttcaatgggggatgctgagaatgcccttccaccttcaaagaaaagggctgctggaagg
